United States Patent Application Publication US 2015/0232836 A1 - sequence listing, part 2

SEQ ID NO: 40 - DNA, 25649 bp, Mus musculus
attatattgtttggataccactttaccattagccacataggcacctatgccagtttttgatccatcagtatataccacaatcccatttttaagtgggtttcttactgtttctcaacagcttttgaaaatcatttaaggtatggaggtgatctcttcttatctctaccttttggggcacaatcttatctggggacaccacagagcccaagaattgtcctgtatcagaaatttggaccttttctgtggctatctgtaaaccccactgacttaaagttttaagtagaaaaggatatgccttttgtagcatggtaaggtctttatggcacaggaggatgtcatccatgtaaaggagcaaaattaaagaggggaattgttccctcactggcaaaagagcttcttgtacataaagttggcacattgtaggactattggacattccctgtggtaagaccttccattgatacctcttatcaggttccatgtgattaatagaggggatggtaaaggcaaatctgggcctatcccttggacacaaaggtatagaaaagaaacaatctttaatatctataataattaaattccagccacgtggtaaggcggaaagtacagggagacccctctgtactgggccaaataagttcatttgctcattaatggctctgaggtcatggagcagtctccactttcctgactttttcttaattacaaaaattggaatattccaaggtgaggtagatggctcaatatggcctagttttaattgttcctctaccagttgaatcacagcttctagtttttcagaggataggtgccattgaggaacccacactgggtcccctgttttccatggtatgggtcgtgctgccccaatggccgctaaggaaaacccagaccctgtctgtcttggtttccattaggtgagatgggctctatccttccctgttcttgatgtcctaacccttttccttctttataacccatctttgccatgatattttttgctttagttgaataccctcccgatggggcgttttcattggacaaaataaggcccaaatgctgcataatatcccttccccagaggttaaccgggagtgggagcacataaggtatgaatttcccttgctgcccttcagaggattcccacgtcaaggcaatggagcttatagtgggacatgattgatatcctaggccctgtaatgaatgagatgactctgtggtgggccatgctttgggccaccaatgtgtagaaattatacttttatctgctccggtatcaaggatgccttcaaactcttttccgttaatcttaaggcggagcttaggtctatcatttaaagatacaaccaaataggcagaatcatttcctgaggagcccattttctttatctcaggtcctgcaaatttctccctggtattatcagggaggagcagcagctgagctatcctatctcctttactaatagaaaaaacgcccttagggcttgagcacaggacctgtatttcaggggaatgttgacaatccataactccagggtggactactaagccctgcaaggtgagtgaaccccggccgagaataaggcccatggttcccgggggcaaggatggtataggctccactggcaccggctgaatactcatttgaggcattaataggaagtcggaggcggcacgcaggtccacccttgtgggtcttcctgggtcgcctctctgactgcttcctgggtcctgacaaaccggttcccatatctttgagggccctgggaccgagggcccgatgacccgttttttggcacataagctgattgactatcaggtgggggaaggactctgccctttatatccctcacagagcgacactggtcagctctatgataacccttgccacacttagagcaaagagtgagagtccctccctgtttatctggagctctgcaatctttcttaaaatgcccaggctttccgcaattaaaacatgtcctctgatcatttctgcccatggagcggttctgagattgaaggatggcggccgctaagcctgcattggtgagaggtcccccaagccctcgacagaccctgagccagtcttgtaagcctttgttctttcttggggctatggccgctcggcactcctttgtggcttgctcatagattagctgttctatcagaggcgcagcttgctctgactctccaaaaatacgctctgctgcctctgtcattctggccacaaaatctgagaaggattcctgaggtccctggattatctttgttaactgcccagtggtttcacctgctcgggagagcgccttccaggccctaatagccgtggaagaaatctgggcataagctccccaatggtagtttgtctgatcagcagaataagctccctgacccgttaacaagtcaaaagtccaatctctctgctctggagtcaaagcagctgcgtttgctcgggcctgcgcttgtgcagcttcgtgccaaagcgctctccattccatatatttgcccatactagggagagcggcttttacaaccgtttgccagtcggcaggagttagtgccatgccggcaagcctgtctaactgcaccaaggtaaaattagcattggttccgtatttacggaccgactcggcaatttctttaatttgtaagtattctaccggagcgtggacacgcccaccctcggctccttcaaagaccggaaattcctgttgtattttcctttgttcctctctgggaatgaatgagtctgcgcactgcctctctgcgcactgcctctctgcgcagggctgacgcactacgcagggcggggactccgcatagggcggaccttgaagccgactgccctgaggccaatcagcaaactggccttcgccagccgcttttggcttccttaactgattagctagcactttacctggctggtacccttttttctcataatgagctgcttcttcctcccagtctgtttcctcagaggagaattcttcatctgcttcagagctactaagagctggctccccgagcccatccagcgatgagcacaggctccttttcctagagacctccgctaattgatctttcttcttttccctttttcctctttttcttctaatctctctccaggtattcctacctaaccttaacttttcctcgggttcaagacccttggaaaggcctgtatacttattttgtgtaccatatttcctctttgttcctactctctctccccactttacttctgatagcttgtcctgaatttcctctagaattttccctgccttaaccacttgataacatgtgaaaaggaacaaaagggcttctaacactagaaaaaattcaaggccaaacattttccactttacttctgatagactgtcttgaatttccttagaaagttcaaggccaggcttacctcgtaaagctatactcactggtactctcgttccccagctgaaaagttctgaattcatacagttgaatccttcttaacagtctgctttacgggaacctttattaccgcgacccgcagttctggttctggaatgagggatcttccttgcgccagtcccgagttttttctcgtcccggaattcggcaccaattgttattagacgcgttctcacgaccggccaggaaaaacaccacagaccagaatcttctgcggcaaagctttattgcttacatcttcaggagcaggagtgcaagaagcaagagagagagaaaacgaaaccccgtcccttttttaggagagttatatttcgcctaggacgtgtcactccctgattggctgcagcccatcggccgagttgacgtcacggggaaggcagagcacatggagtggagaaccaccctcggcatatgcgcagattatttgtttaccacttagaacacagctgtcagcgccatcttgtaacggcgaatgtgggcgcggctcccaacagggcaggaatagaaaccctgactaagacaaattggtaccagcatagtggggtattcctgtgacaacctgaccatgttttggggaggactgtggaaggattttggaactttgggctagaagatcggtattaagtgctctgtcagacgttgtgtaggagcttggatgttaatgttgagaacagtgcagaagatggaggtctggtttgtgaaatctcagagggaaaattaaagactcttttcagggccattgctattttggattgtgaagattctgtggttctgtttagctggggctgaagaatcagctgtgattaacaagataccagaactactaaagtgaaaacttttccttactgggactattgattctggttagctggagctaagaaattagcggtgattaagcagagaccagcatcattgaggtgacatcttcttggaagtgttttctgagagcaccgaggctgtgttccagagagaaccaaagttgtacctcgtgccgcagcaggacttggtaatgtgtaagagtcacccaggtggtactgtttttgaaggcatgaggggatcacacagagcagctgaggctaggcactgtgagaggccacggaaggccattggtgaaggtgcagcctcagttgcagttgatggcccaggactgaaggggtcatgcaaaggagttgaggcttggcaccatgaagagagcctatgagaggctgttggtgaagcctagttattgcggaagatagcagtgtttggagatgccagtaccatgagatgaccaccacggacagcagcagcagtggagtacaggtagctggagcctagaagacaaggtgtgtgctacaaagggcatggctggagaagtgacccaagcccttggaggagcccagagcatcgtgagttggatcacagacattggacagttggagtttaatttttgcttttgattgtgactgtgccctgatgtttttccctcttgaaggaagtttttttagtgaagcctagagttaagagactgaattttaaggtactttgaattttaaaagaaaatggatttttttaaaagattgaacttttgatatgtaaagactgtgggacttttaaagttgtttagatcttggggatgaataagaactaagagttgaggcttactagtgatgtgtttgtgtgtcaagttgacaaggggtcaattgtactggctggtttgatgtgtcaaattgacacaggctggggttgagcttcagttggggaagtacctccatgagaccagctgtaaggcattttcgcaattagtgatcaagggggaaaggccccttgtgggtggtgccatctctgggctggcagtcttgggttcaataagagagcaggctgagcaagccaggggaagcaagccagtaaaggacatccctccatggcttctgcatcagctcctgcttcctgccgtgctcgagttccagtcttgacttccttggtgatgaacagcactgtggacgtgtaagctgaataaaccctttcctccccaacttgcttcttggtcatgatgtttgtgcaggaattgaaacccttactaaaacaccccttatgcaagatccagcacacccacggctcctgtaacccttatggctcattctctatgtccacagactctggcttctctaattttgcttttctttttttttttttggtccccttggaaatagtctcatgtagaccaggcttggctcaaactatgtagccgaggatgattctgaacttctgacctgcttgcctccattctctaagcagccactattgcgaagttttactcagtgctgggaaggaaggccacactctactaactgagctccatctcagctccttttcatctttaatgtgaaaatctgatgatggcttacccctgtttaaaatcttcctccacagactgggcaagatagagtctccagacaagagctatgcccgagtccctgacccaggggacttcacctcgcccaggaatgtgaacaccataccttagaggccatacctcttactgttagctatgctgagtgacaactgtctggcagacagctgtgctttcctctggcttgttgtatgctcaggagacctgccaggagcctcctgactggagccagttccacagctcgctctagcaaggcttcccagccctgcatcacccccaggcacagtcctcctactgctgggatatacaagaccctggcaccccaaatctcatagccctccatcctcttgtcaggagggctgcagtggctggctacgtctgaggggagctgggccctgcgcctgatgggctgtgggaaacagcaagtggcatttcctcatgaggtcgggaaaagtggaaaattggcccagccttaagtgagaggggtgggtgagggcagtcacctctctcttcagaactgaccacacaccttgcccgttcccttcagggacttcagggtctgggaacaggtggagcctactacctctgcttggtcactctgtcaggtgcctcccaatttggccttagtgacttcatagttctcctctgccctatccttttcacagcaatgattcttcctgtgccatctttccaatgtcctgacaacaacttggtcatgctgaattcataagtgctgtggtatgtgtccactatgctctgggctaactcacttatgtcaccaccaagttggaaccatcctttgggaacttggtggaggactgcagcagcatagttgagtctagtcaaggcctagaagcacacccactgtagtcccttgctgggtgctctatctctagggttctacaggcctcactgagtagttctccaccttcctctcttctagggcttgggccccaggcaggaccttcctctgacagacacacctcaaccctcaggctaagagtagatgtgcaaggcagagttcctttgtgtacatttaattttgcaaaatgtagaggtgtgtggctgcatccagtggactcaatcctggctctgtcctggctggtactcatgatgccactgtgaagtgatatacaatagggaccctgtacctacagtacacatgcccaaagaagggcagggtgcagcaatgctttctggatacagcccacaatcagaattcccagagacaagaaatacttgggtttcagagagaagggaccccaggcagattgaaagtaagatcaggaccacaggaaagacaataaacacttgtggggtgtgtgtgtgtgtgtgtgtgtgtgtgtgtgtgtgtgtgtgtgtgtgtggtgcgtgtgtgtgtgtgtggtgcggtgcttaagagcatgtaacactcttccacagaattccagttcagttcccagtgcccacgttagctattcagttcacagcctcctgtagctccagctccagagaacgcagtgccgccttctgctctctgaaggcgccttcacacatgctgcagatactcatacaaatacacatcggaacgaaaatgaaaaagaaaccctataaaacaaaataaagcaagccgaacatggcagcgcaagcctttaacttcagtagtcaatatgtacaggcaggaggatcaatataaattggaagccaacctggtgtacatagtgagttccaggctagccaggaatacagactgagaccttttctcaaaaccaacaacttctatgcctcgcccatctactgaatgggaaacgctgggctggggctcagcagtaaacatttgaataggtttgtataagatccacccttgatacacaccaaagttgttgttttggttttgtttgtttcaagaaataaggtttctctgtgtagaactggcaggcctagaactcactctgaagaccatgctggcctggaactctgagacctgcatgactatccctcttgaatgcttagttcaaaggtgtgcaccaccactacccaggcttgaacactaaaactgtaatccctctccttcatatcctcacttctaggaccttctggagaactgtgtccagaagtgagagaggaatttccataggtattgagtgtaatcagtaatgctatatagtggtcactacggccgatgtgacagaatacccctgatgacagctaaccggaggaaggataggttttagcttatggtctcagaggtccctgtgaatggttggtcaccaccatcaatcttagaagaccaggaaccttcaaaggcagacctccactgccctacttcatttttcttttcttttctttttttcttttcttttcttttctttccttttctttccttttccttttcttttccttttctttcctcttcctttttccctttcctttttccctttcctttttccctttccttttccctttcctttttccctttcctttttccctttcctttttcctttccttttccctttcctttttccctttcctttttccctttccttttctttccttttcttttctttcctttccttttctttcctttccttttcttccctttcctttttccctttcctttttccctttcctttttccctttcctttcccttcccttcccttccctttccctttccctttccctttccctttccctttccctttccctttccctttccctttccctttccctttccctttccctttccccttcccttcccctttcctttccctttccctttctttttccctttccctttccctttccctttccctttccctttccccttccctttcttttctcttctcttcccttccctttcttttctcttctcttctcttcttttctcttcccttccctttctcttctcttctcttctcttctcttctcttctcttctcttctcttctcttctttcccttttatttttgagacagtgaggaagagggtttattatacataagttaaactcggccacaagtgagaacagaacgactccagaatcccgcagtgcagggcagagggccagcaggactgttttggttgtgaggaaggaagtcagtctctcgggtggtctcagcaagaacagtgatgacgtctcagatgcactgagacttattaccaacagtagcagagggtccaacaacctgaagcagcccttggccttcagattcctggtcttaacatcccttatgcctgctcctccagccttcgcaggtgcacaagctaatctccctcggccttatctttcttctcctgggcttcagtctgtacatttccttcttcctacactatgccctcttggcagaggagtttcaaaggagatggcttcagacaccctggagctggagttagaggtggctgtgagctgcctgacctggatgctggaagcctgactccagaccctggaagaacagtacaggctcttcactgctgggtcatttctccagccccctaatctactagcaagttccaggacagctggggctacagtgaaactattttcaaaacaaaataaggagtgagagagaccttttcttcccccttgtctgtactgattgttcacatttgggagcattttgttagttttcaaaacaaatctacactcttctccttgactgagttcaacaggcagaagcacccaccagtgctgtggagagccaagctgaccatagcagggtcttctccatgcccctctgacttcattcaggacccccctaacttgcttctggcccttgtctcctacaactcccaggctgcttgagtcttaagaaaaaggaccttccagtgggttgagcaaactgcgaatctaggtaatatggtgaccggtattcacccaggggtgactgactggcttctctggatcaccttcattctgaaatactcaagtcatatcctaaaactgtaagtgagaggagagggacttctgaagagtgtgaaagggccagggggcagagcaagatagggggtggagcaatcagggggtggagcaagacagggggtggagcaagtcagggggcagagcaagatagggagtggagcaagccagggggctgagctcttcataaggtccaatattttccagaacatgggttgtgctatgtgtgagtgtcttcgcatataatcaggggctatgacctcattgttgttgttgggggagggtttgcttctgccataatgtgtatgctccttgtctctggactcaaccctaacagccttagccttatgatcagcacctctggtttgacagtgcccaatcaagcccatgtttgttccattaaacaaagccaccaagagaaaccagggtgtccttgaaaccaagtttcaaggttgtaaaagagtaggcaaaggtggggtgtctttgttcttttcagcttcctctgatgatcagcctctgatgtaaaaggatgtggtggggaggtagttgctggcttctagtttggttaagttggtcccaaagatagactttttgaattctagttgttctgaggcaggaggattgcagcaagttttgaaaagccagcctgggatacatatagagggagaccctttctcaaacacaaaccagggataaagatatagggatagagatggtagagcggttgctagaaatcaagaggccctgggtgtgtgtcgaggcactgcacgaaagctagctgataatcccggaactcaagaggtagaggcagaaagatagaagtttaaggtcatcattggctacttagggagtccaagaccaggttagattacacaagaccctgcctacaataaataaatagatagatagataaataaataaataaatctctctctccttgcttagggtgtatgtcagttgtgtaagtatctggctgttctatgtgaggcctgcgtttgattatcagtcctcgggggacagaagagcacttgatagaagaactccttaatgtcattgctactggtttgaactacaatacctggcttagttgctaatatttaaagtactagtatatctcacaaacaggctttccagactatcgtgacaaaattagaagtccttctttgcatgcctctggacatggtggccagctcccagttgtcatgtatttagactaatatatctcttccaggatccaacagaggccaagtgaccaatgttttttctcatcattagggctgttgaaattgtacaagccgggacgatagggaattgtgtatcagtgtccctattaagtgtagattgaaagaaggctcagtgggtaaattacttgctgtgtaggctgagtgctagcatccacattacaaagctgtgacagagacagattgatcctagagtcatgcttatacagtttatggggtatttgttccaggttcagggagagaccctgtatcaaaaaccaaaacgtgcacaagcatgcacacacacagacacagatacacacagacacacacacacacacacacacacatgtatatacaaacatatacatacatacacacacagaattaaatataaatcaataaaaagaaaggatccgggcgtggtagtacacctctttaatcccaacactctggaggcagaggcaggcagatttctgagttcgaggccagtctggtctacagagtgagttccaggacagccagggctatacagagaaaccatgtctcaaaacaaacaaacaaacaaacaaacaaacatccaaaaaaccaggaaagataaactgatggcagatatagcacacaccttaaattccaagacttagaaggcaaaggcaaatgatctctgagtttgacaaagcaagtttcatatcagctggggctactctggctcttccatgtgctctctctctcacacacacacacacacacacacacacatgcatacacacatttgtaaaaaacttttaagaagaatgaaagacagaaaaagactaaggaaagtcttttcaggttccttccaggctgctacataaactccagatcttttgaaataagaagcaaagtgaagaacagacaagaaatgctgttccccagcgttccagcagcctcattgtacatagacctgtaaacccagctcagtgcctgtcctcagcagggcttgcaaaaagtccatttctttggcaagaaaaaaaaagggtaaaaaacctagacacctaggtttgaaaataaaatcgtctttatttcaaggtcattggtggggagggcaggaataaataatggggttgaggggctgcaggggtgtagagaggtcaggatgtggctctaggctatgttttgcaacagataccacactgggaattgttacagcatttacagcagaagatgcagatggggaagttggtgtctctcttccttctcttctgcattggtatctgtgtaaagaaagagaggtaagcagcctagcttgggcatgggagaggctggggatcagggagggagtcccagatgctcttaccgcaatgtctgccctgctttcttccccgtgcaaaggctgcagctctgtagtctgtctcatctgtgaaagcagaagaggtattgaatcttgtggagtacccggcatagcttcctgacttttctctgccagcttctccccagagatttagggactgtgcttagacagaatttctagaagggctcctactgccctgtgtcccctcaccattccttggatgctcctaaaagcacccactttctttgcttttgcacactccggacagttttccctgcatcttatctcttataaccaggtcaccccatagcacaaaggcttatagcacattcatctggattgtggctttccaggacagatcatcatctgcacagctgtccacaaagctcggcacagcagaacctctacagccctttattgccaacactggcttcacttatcagaccctacagtccccaagggtcttgtgattgccttgagtgcctatgtgtatcatatgcatgcttactgctgactgccatctagggcagaaggcatcaggtaccctggaagtagagttcaggatggttgtgatccaccacatgggtgctgggaactgactctaggtcctatgcacaagcatcaaatgttcctaacagctaagccatctctccagacccttctgtatcattttttttttctttttttgtttttttttttttttcagacaggatttctctgtgtagccctggctgtcttgaaactcactttgtagaccaggctggattcaaactcagaaatccacctgcctctgcctcccaaatgctgggattaaaggcatgtgccaccactgcccgacttctgtatcattttctcatagaatactttgcctggctgtcagcctcttagccccacctctggtccttcctcattagagtttttctgcccattgtcttttgtactatccacagtaattctttataaaatactcatgtaaaggctgcttaaagaatgccctgacggggtgggacagccaaggaacacttttgtttggctcccaccatgcttcattttccacagtaggacaacagagtagctattcaaggacacctgtgcagcttcccagctcccactaaggaccaccctcttccttgtcagcagctgccatcactcctgagccattctaactactcagtggtgagcagctcctgcctgcctgggacctggctctcccaccacaatgggcctggggtgctcacctgttgatggagataggtggtgctgctcaggctggcaaggaggagaagcaggagacaggcagcctgggtccgagtgctgagtgccatcatgccttctgttctgctgtgcagtctaaggacttgtgtggtggctgtctaggagccagtcccagtcctttttatgggactagtgggaggagggtcacctgcgcctcacccacccccattttgctctgactcatttccaagaaaatagtggcgccaaacaggcgggagagataagcgggaacagtgacaggggacagggttgtgtcacctacagccagcagaggtgcatccagagggtggggcagacagaaccagggacacaagcctgcagccagccacctgtgatgtcacactgtggctctcagaaaaattccccttctttcccctaaacagtgattggattggtgagtggaagaactgtacctttacccctatcagtgccttcagtatggctgttactcactgggtttctcagaaggacccagcaatgtcgtacacatgtgcagggtgcatcccagcattttaggcccatgagtttgtgtcagcattagccctggagtccaccgtggagaccactgtgaagaccatatgatgtagctgtcatgttggattccccttctgcctcccgaggcagcagtcactaatcataggcagagccaatgcatttcacaagctcgtgtataaaaaacacactggtttcacatggcagtgagtactgattctgtgtctttaccaccggtgccaactcacttttgtgttaacagctggtgctacttggcctctaagtggctgcctactccctcctgggctctacagttgtttatgctgaaagttgccttccagtcactgatgcaggggtctggcttgacgatgtattcctcaaatggtttccctctaagcacaggggacacagtattgtgtgacacttggcttagcaggaacagactgtgccccctctcagctccaagtgcagtgggattatgccagaacctccccatgccacttggacaacatataccacagagattggtacacagcctacaccagggcttttatagctagttcttggagtactactaaagcctgtgtggtgctctttctattacctggaccccttggtatgagcagcctgagatattatcaaactttgactccagagataaactactggacggcattcctgagttacacagggagcatccagtcagttctgtccagaacctgggaaggcttctacccctctgttgctgctcattgggctgttcatgtgttccacatgcttcctcaaagaggacttttggaagtggtaaggccaaagacagggttcatttttttttttaagttttatttacttaatttatatgagtacacggtcgatgtcttcagacacactaaagagggcatcggatcccattacagaggtttgtgagccatcatgtggttgctgggaattgaactcaggacctatggaagagcagcaggtgctcttaactgatgagccatctctccagctcgagacagggttctcaagacaccaggggccaacaggagtacttagattgaggcaaggtacaaagtgtagcaaagggaacctgacgcgcaggcctccatcctgggaatggtgagccaatctcttggggacatgatggtattccccgaccccgccaaccatcactgtggcttctcaggacaggtttcatcatcagccaagggccacaagggtcacagcacaggcgccagagctacaatttgaggcgacagactgccgggccaagcctggctttctggccatctgccctctcttgggggtggggggctcaaggccagccctcatcattggctggtacagagggagggcttcagccccagagcccagggatactccagcctcccctctaacagcaggggtatgtccttgacctcagctcccacacccctaatcagcaccccagggcctcagttaatgcccccagccattgtcacacagctacagtataactgtagcttagatatcagggagaccctaggaaccctacccaaccccatgcccaacatggacacacagacagacaaggcggggccacactggccagtttattgcagttaaatacctctctctctattttttgtccattttccataaagaaaattaaaacacacacacgcacacacgcgcatacacacacacccaaacgtacacacacacccacacacccagaggggagcagggatccagaacaagaggggtggcgggcatggcctccctgcaaaggtccaagccccagggaaggcccgcatccccaaagctccctccttcccatgagcaccctgtctcaatacctctagagaccaaggaggcagcgggcagcggggcctctgtcctcctcccctgctcctcctgatgagcccactataagtgatgggctggtgaggaccgagaagggaggctgatggacagatgggcaggtgggcatcgttttcgcatggaggagggtagtgggcaacgtatcaacagaaatgcattatgtctccttgtttttgttaaaaatctactataaaaaaacgcagcttggggaggggcatctccctctctgtgctaagggctgggggaggggcagcagaggccgacagcagctgaagggtgagccggcgggcatcactgccgggtactctcgcccaccatttccaggttgtgctgctgtagctgggctcgaagcagggcattctcattcttcagctcctcgatctgcaggcaccatgggggacacgggagccagggttaggccttggcacactgggcccccgtggattccaggcctgtacccacctgctgcctgaggagctcattgtccatctgcagccgctctgcctccttgaaggtctcctgcatgcgctggttggtctggcgtagctcccggatgtaatcgcaagccttggacaggatgccccctttactctggagtggagggcagacaagagtcaggaggacagaacagctcggctcctgtgcccgacttctggaagagactgaggacacttactgctcctgtcttgctgttgtctgcatgacaatctggaatgattttggaaagctggacgatccagttgttgatcttgtccctccttctccgttccactgcaggaaaacagtaaaatcagcattctatggacagactcactgaaactaggatggcataggctgcccagtcatgttgctaagcgaggaccccggctgctgtctcctcatgggccacactgcttcctgaggagcccagtcaagtggcaaccctcaagtgccatgctgtcaggacagaaagccacgaggactgctgcacacagtgtcacaccatagactgaaaatgtaggtctggaacttgtatatcaccccctatgcaggatccagcacccccacggcccctgtaacccttatgtctcatttctctttgttcacaaactctggcttctctaattttgcttttttcattcttttttatttttttgttcccttgggaattgtgtcatgtagggcaggtcgggcacaaagtatgtagccaagggtgatctgaacttcttacattccttaagcagccaccattgcgaagttttactcagtgctgggaaggaaggccacactttaccaactgagctccatcccagctccttttcatctttaatgtgaaaatccgacgatggctcgcccctgtttcaaatccttctccacagccttggcaagctccagtctccatacaagagctatgcccgagtccctgacccaggggacttcacctcgcccaggaatgtgaacaccataccttagaggccatacctcttactgttagctatgctgagtgacaactgtctggcagacagctgtgctttcctctggcttgttgtatgctcaggagacctgccaggagcctcctgactggagccagttccacagctcgctctagcaaggcttcccagccctgcatcacccccaggcacagtcctcctactgctgggatatacaagacctggcaccccaaatctcatagccctccatcctcttgtcaggagggctgcagtggctggctacgtctgaggggagctgggccctgagcctgatgggctgtgggaaacagcaagtggcatttcctcatgaggtcgggaaaagtggaaaattggcccagccttaagtgagaggggtgggtgagggcagtcacctctctcttcagaactgtcctcacaccttgcccattcccttaagggacttcagggtctgggaacaggtggagcctactgcctctgcttggtcactctgtcaggtgcctcccaatttggccttagtgacttcatatttctcctctgccctatccttttcacagcaatgattcttcctgtgccatctttccaatgtcctgacaacaacttggtcatgctgaattcataagtgctgtggtatgtgtccactatgctctgggctaactcacttatgtcaccaccaagttggaaccatcctttgggaacttggtggaggactgcagcagcatagttgagtctagtcaaggcctagaagcacacccactgtagtcccttgctgggtgctctatctctagggttctacaggcctcactgagtagttctccaccttcctctcttctagggcttgggccccaggcaggaccttcctctgacagacacacctcaaccctcaggctaagagtagatgtgcaaggcagagttcctttgtgtacatttaattttgcaaaatgtagaggtgtgtggctgcatccagtggactcaatcctggctctgtcctggctggtactcatgatgccactgtgaagtgatatacaatagggaccctgtacctacagtacacatgcccaaagaagggcagggtgcagcaatgctttctggatacagcccacaatcagaattcccagagacaagaaatacttgggtttcagagagaagggacctgaaggcagatggaaagtaagatcaggaccacaggaaagacaataaacacttgtgtgtgtgtgtgtgtgtgtgtgtgtgtatgtgtgtgttcatagcctgtgtccaggtggtaacattgttaggtccctggcttgtaaaaaccattaggacaagctggaccagcagaagccagttagatcagagaagcgctgtagttagaaaaaagcacttaaaacacttctcacagccatgtgtggtagcacacacctttaatcttataactcaggaggcagatgcagggcggatattggtgagtttgagaccagtctgctttacagaataagttctaaaatagccaaggccatatagaaaaactgtttctaaaacaaacaaaccaaccaacccccacacctcatagcacaaccttccaggaccaaaggaagagcaggagcaggagccattagcacgcctctctccatcaccaagaaaagcaagaaaataggaggctgggtccccctggctccctcagtcaagctgcctccctgtagaggagaggccctttcacagcggcaggtaccacccaccatggttcacgtggctccttctccaggcttgtcctctcacagagcccaggttaagtttctcaaagaactggaaccatgtctgctgtgttctgactacagagaactgagaaatcaaacaaaaatgagatccagagctctactacatgtctgcaaattgggcaacatgcttcctgaacaacctagggtcaaagagaaaatcacagaactggaaaatattttgatataaatgataatatcaacatttgctcaatcccatgaaactgaaaagcttctgtaaggcaaacaactctgccagctgggacaaaacggcagtgtacaggttgggaaagggtcttcaccaactctacatctgacagaaacaactcaagaaattagacatcaacaaaccaaataaaccaattataaaatgaagtacagagctaaaagagaattctcaacaggaatcttgaatggctgagaagcacttaaagaaatgttcaacatccttagtcatcagggaaatgcaaatcaaaatgaccctgagattccacctcacaccagtcaggatggctaagatcaaaaacttgagggacagcagatgctggtgaaatgtggagcaaggggaacacgcctacattgctgttgggagtgaaacttgtgcaaccactttggaaatcaatttggcagttactcagaaaacggggaataattctacctcaaggcccagctactccactcctaggcatattcccaaaagatgctctactataccacagggacacttgctcacatgtgttcatagcagctttatttgcaatagccagaaactggaaaccacctagatgtcccgcacctgaagagtggagaaaggaagtgtggcacttctacacaatggagtactactcagctactgaaaacaaaggcattatgaactttgcagacaatggatggaacttgagaacatcatcctgagtgaggtgacccagagtcagaaagacatgcacggtatgtactcactgataagtgaacattagccataaagtgcaggataactaagctatgatccacagaccagaagaaactggataataaggaggtcccaaggaaggatgtgtgaatctcactcacacggggaaatgaaatggtcattggaggtggatggaaagagagaactgggtaggagagggggcaaggaggcagtcaggtgtggggagaggagtgggcaggcaagggctgggagcgagaatgggaatcgttgggagaatgcagggcgtctatggggtgactctagttgagattcctaccagagagggatgtagagacgaaagggccacttcctgtagccaggcaggacttccagaagaggcagggggacatctatctataaagcctttaacccaaaatttgtcttgcctacaagatgtgcagggataaagatggagcagagactgagggaacagtcatccaatgactgccctgacttgagacccatcccatgtgagagagtctaattaactaactaactctactaatgatactcttgtgcttgcagacagcagcctagcataactgtctcctgagagacttcatccagcagtggatggaggcagatgcagagagccacactcatcaggtggagtttggggagtcttgtggaagagtaggggatagaagtgagcaagtcagaggggtcaaggataccacaggaagacccagagtcaactgacctgggaccatgggaattcagagcctgggctacaaactagggagcatggagctagatcccctacacatttgtggcaaatgtgcaatttggtcttcaggcgggcctcctaacaagtgtgtgtgtagggggcgggggggggggggatgctgtcttggtctctgttctctgcctttgggtcccttccccctacctgaactgcctggttgggcctcaatgagagaggatgtagtcctgctgggactagatgccccagggtggggtggtacccaaggaggggcaatgtgtgtgtgtgtgatctgccaagagggatctgggagcagaggagggagggggactgtggtctagatataaagtgaatataaataataatttattacaagaaaaaaagagagcgagaatcaaattagaaaaacaaccaaaacaaaaaaaacaaaacagaataaaaaaacctatttgtccaaatgggcctgaagtctacagtcagaagtctgtagctctggttttgcatcaggaaaaggtttgttcgtttattttttctttaagacagtgtcttcctatgcagcccagctggattctgccccagcttcaccagtgttgagattacaagagcataccatgatattcatcttttaaaagaaagatttggtaatcccagctactaggcaggcggaagcaggaggcttctaagtacaagatcagtccggataaacagtgagactctaggggtatagttgctggcagagcactttcttagcatgctccaggccctaggttatagtcccagcgccataaacaaagaactcaaaacaaaacaaaccacaaggcaaaaccccatgcaccaccataatgaagaacccaagcaggaccctcttacagtgaaaaccaataaagcagaaagagctgtccagcccagcacttaaagacaggtttcatggcaagacctgcactgctatcaccattaacaacaggctccccagccacccctttcattcaggctcccgacaggtcccttggtacaaatgtgcagtttcctcaggcccctgctagtaccctctgcaacccaccctacagaaaaaccacaggggaaaaagacggagaagctacatggagactcttgtcagcacagagccctgggaaggaaagggtagagctctgaaagtcaccctgccttgtttctggcagggagcatttttggggcctctcaggaaggcaggcagtgtgtgctataaggacaacacaggtatgagaagtctcatggacagctagacatgccaagattctgagtggcaatttcagatgaccaggaagtaaaaactgcatcttttggaccgcgccaagccccaagaggatgggaagaagcaactatcacctttttggataaaaggaacaaaagactctggtgccggggatgttaggggtgtgacaactagagcttcggtgcacctgcggccggcgcttacaataaatggaaaagaactcaggcccaggccttaagaaacactccatgctgctcctcatttatgagaacctctctgtaaagacagcccagggaccttgcggtgaccctcaggctcagcctggaaagcctgtgaggaatatcaggctgttgcagggatggagggagggacaaacaatgaacatccccaagggtggaggtggggtgaggctagcagtcacagcagatgtgtggagctcagactggaaaagaagctagaagatttggcaatgacgttgtcacaggtgaccttcaatggggccagcctggtaggctagactgccaagctccaaggaggacggaggacaggtaggtggaggttcaaaccttttacaggttagacgccagagggttggactgagaggcgaggttatgggtgaaaaacaaccccgggtgaggcacagtgacccttcccggcctgctagccaggctgccacagcctgaggccactccgaggcgggcagctgcagtgaggccagggtttgtggaaactgagggttgtgttactatcatttacatcagacaacacagctgcaaagatggaaaaccagacctgagttgggtggaggagctgtcacagcctgaataacccactagagaaacatctaactgtccccaaatcacatccaaaacaacctcaaggctcagtttaccctttccttcaaagccacctgacctaggcattaggcctcaacctagcagatccccccgaatctggctccgtatgcccatcctctgaatcccgacacctcagaccaggcctctcccttcccagatacaggactaatacagacttcttgggtttcggttcctcatcatcctatcagtttgcatccacacacaggccccatgagggtttccccgtggtcagactacatccccaggatcaggaaaaccaattagggaagagctcctagagaccccgcgtgagccagcctggtaggtttcccctcagcactaggatgaagcttcctctttcccttccccattctgctcttcctcaaacttaaaagtgtgtctgcccctggcctagacacttgtctgtgctgtccccagatccccgagagaggcctctgaagctcgtgttgacaagtctgctcctcttgcttagcttcctctcctccagtactccggcatgctgggggcacatggcaatatgtgcagcttgtctcctaccaaggagtggtgagagtccagaccttgtctctctgtgtacttgaggtctagatggggagctggtataggtatgtacttattggctgaaagtctgaacttgccacttagaacagcagtggcccccaccattgacatcaaagcactcctaagtcttagggccttgtctagacatctgaggcttcaccctggctcattcttaaagagtgtgcacagaagtttagcaacaagcaaacaatccccttgaaagaacttgactcttcatcagcctgtgtgtccctctactggccaagttcttggaaaaatcttcctggggtgacctcacttcagcacgttagcaatcccttagccacaagctgtccttcacaattctgacggactccctaggccaggctgcagacttggcacagggcctgtgctgtgttgccctgccctgcctgggatccagggtcagtaaatatttgttgagtgatggctgtttgggtattagaactaccttacactgagggctgctatgtgcttagcagtggtgacctatcaaggctgggagaccaaaggacagcactaaaggacaaaagacctcagggtggaacatggagcttccgggaagggtaggaggctctggcttcagctggccagaggctgcccaggtagaaatggaagcctgctcatgaggtcaaaccccatgtgcagatctggggtccaccacttcaagaggatggccaacaaatcaaatcaaaatcataggcgggcaagaggaaatatctggccaaactgaatgcacgccctccatctttcccaacatcttgccgtcctccgccaatcagcactgacctaaccactcagcatgcacgtctccagcatctggacatgtcaggcaatgggctcaaggcacccaggagcactccgccatccttaccttcattgtgctgagctcttcttctctcatctcgaggagttctggttccatcaattttcctaaagcagaaggggaaacgacagcatttaccaagctatcagacttgacaaacacctttgtttttaaggtactggggattgaacccagggcttcgcagaatgctaggctaccattgggttagctcttcacagttatctttcaaagcaaatccccgtgaagagagggtggaaatagatgaaaaaaatttaaactgatacttccgaagcagaagctcataaaacccataccccactcctgctgtatgctgaccagccctgaaaccctcccttccctctggctccaacaatgggactggcacatacggagaataggggtgtgtccggggtgcaattgtcctctgtgtgcctgtctgaagcacatcctggggtgtcatcatgacatagaactggcctgcagggaatgtgcagcgaacatcagtaatgggtcaagctggaactgcttaaatggtttccctagctttacctcagaacccttccttccccttacctccggcctgtaggctctggtctgtagtttgaacagacacagctgtggtatcgcccacactggatgctggaaaataagcaaatcgtgcctccccgctgacagcttcggccgccgggctgccaccattgctgaatggattttgaattacagcctagggaggagtacacataggccatccttagccacccctgctatgccatctttgttactggtatcggtgtttgtttactatacggtgaggcaagggcgtagcctactgtgtgtgccattctgtacagaatctcgtctctgacaccattcaaccatcattagctctactctttcctctaagaagttttccagttttgcaatgaaaagtaactccaaaagaccctatccaacgcctgtgcaaaactctgaccagaccttacacagccggccagcccagagaacatcatgtgtgtgtcacacaccccaccccctgggccttccccctccccagcccctccccataagtcgcgggccacctaccagcgggaagggtgctgcgggacctgtgggtacagaggcagcggcagggccggggcgctgggctgccccgtccacacccacctgggtcacagcctgctgcccccccgcgaaggcagcggtggacacgacgctgacggcgccggccgcgtcgccctggccgtccagctgaccatcagtcacctggactacgcggtatgtcacctgcagggggcggcaga

SEQ ID NO: 41 - DNA, 64524 bp, Homo sapiens
actccagactgggcgactgagcaagactccatctcaaaaaaaaaattttttttacatcataatttaaatgttataactactgcccagagcttggtttctaataataccattttccaatataagaaaccagagctcctggtgcagcatctgctctggcccctggtcccctcgctccccacccacccaggccccttcctccggagctcacctggggcctccatcccagaagctcagggcttatttttctgattaaagaaaataaaaagtgccgtgccaccattttttataatagcatcagggtttataatttaaacaacaacaacaacaacaaaaacagaaaaaaaaaacagagctctttgtaaaaatggctgactccaaggctaaggcaggaaaagtaaaagatgagactggaatatcttgtggtgccagaaattaagtaagtgctcaaagagtgatgaggacatattgaaaggacacaggagccaacatggagggacgcccagtagccaaatcttggacaacctgggcaacaaagtattaagtactactaatggatcattccctataggataaaatcagaatccctgagttcatgatgatgtaaataatttcatttaaaaaaatgaggcctgttggccgggcgcggtggctcacgcgtgtaatcccagcactttgggaggccgaggcgggtggatcacgaggtaaggagatcgagaccatcctgtctaacatggtgaaaccctgtctctactaaaactaaaaaaaaaaaaaaaaaaaaaaaaaaggcctgtaataccagcactttgggaggccgaggcagggcagatcacgaggtcaggagttcgagaccagcctggccaacatggtgagaccctatctctgctaaaaatataaaaattagccaggcatggtggtgcgtgcctgtaatcgcagctactcgggaggctgaggcagaagaattgcttgaacccaggaggcagagattgcagtgagccgagattgcaccactgcactcgaccctggacaacaagaacgagactccatctcaaaaatgaataaataaataaatacacggggagaagggaattcgcttcattgcagtaacattacatctaataaatgaagaaagaatgatgataatggaaaaatcaacattcaacacttcggtaatagttatttcaggcaagaatcatcaatggaaatgttaagtatgtgagttgatggatttgttagactggtttaatcattccacaacatataccaaaacatcacattgcaccccataaatatatatacaattatttgtcaaaataaaattgaaaaaaatgaattttcatggaaaataacagtgagcatagatataaagattaggggataacttctggcttcaaatattaaaaatacaagtgcaaaagacttatgggaaaataaaaaataaaagtaaaaataaaatatttaaaatactttctagtaaactacctggtacacagtagagttctaaatgcagaaaggattctacatgtaattgggattacaggtgtgtgatcccaaaggattctaaatgtaatgattaagggtgcattccaaaaaaacaaaacaacaaaaacaaaaaaggtccattccattgtttctcaatttctcctctcaaatgcatgaccacagcttcagaattcaacttgcttataattcacttcttcttcttttttttttagacagagtctcactctgttgcccaggctggagtgcagtggtgcagtggcgcaagatcagctcactgcaacctctgcctcccgggttcaagcgattctcctgcctcagcctcccgagtagctgggattacagacatgtgccacaatgtctggctaattttttttatttttagtagagacggggccttatcatgttggccaggctggtctcgaactcctgacctcagatgatctgcctgccttggcctcccaaagtgctaggattacaggaatgagccactgtgcccggcctataattcacttcttaaattgaaaagtacacacacaagaagaatcatcaatggatgctaaaattagtgggtcaaagtttgatgaggaacagaatatttacacagtctcaaactatcattcctcgtattaattacaaagggaaaaatagtatgtttatactggagatctggcagaggctgtcttgacaaagtaatccagattaacatcatcattaatgaaacaaattgacatctcgggcctcctaatatgaagcactgtgaaggacaggcacactattactactgttgtatttctggcccaaaatggaacacatgaaattttgttgttttatttgttttgttttgttttttagatggagtatctctctgtcgcccaggctggagtgcagtcgcacaatcttggctcactgcagcctctgtctcctgggttcaagcaattctcctgcctcagcctcccgagtagctgggattacagacatgtgccaccatgcctggctaattttttgtattttcagtagagatggggctttaccatgttggccaggctggtctcgaactcctgacctcagattatcttcctgcctcggcctcccaaagtgctgggattacaggtgtgagccaccgcacccggcccgtttacactggatgttaacaacactgaagaaggataaactgaaaagtctgagagcgagtgagcgtgcgaactcatgagcaggaagaaatagggaagtacagaaggaggatcaggaaggtggcattccagaagccaaagaaacagattcaaaatcaaagtggtaaattttatcaaatgcaatagaaaggacagttatataaggccaaaaaagtgtccactggatttggcaagaaagcagtcacgcagtcaatgatgtcttttgccaacagttttgtacaatggtgggtgcagaagacagatcacaaagagtttgaggagaaaatggaaaatgaggaattggatagagcaagtaaggacaactcaaaaagccagctgtaaccagaggaagatgcatcgtcaagagagggctttaaacatgttcattcattcaattatttgtttacttaccttatttttaggataggaaaaacttgagtgtttacaaacctaaggggaaaaactagaaggaaggataaacaaaagctatgggagaataaaatcagcatttgatagaggcaagtaccaaaggtgatggaatgcagggcacagatggatctgctggccagagaagggacacctcacccctaggcctggaggaaagcggggaagaagcagtgtagatgtggatggaaagaaatggatgtggttcacacttgaatccttcaatctcttcataaactaatgggttgagtctatttttctacagtgaggatggtggaggttgaatggggatgcatgtttacattactttttaaaaagtcttcacatctgtaatgccagcactttgggaggctgaggcaggaggatcacttgagcccaggagttcaagaccagcttgggcaacacagtgagattccgtctctataatttttttttttgagacggaatttccctcttgttgcccaggctggagtgcaatggtgcaatctcggctcactgcaacctccgcctcccgggttcaagcaattctcctgcctcagcctcccgagtagctgggattacaggcatgtgccatcacgcccggctaattttgtatttttagtagagacagggtttctccatgcttggcctcccaaagtgctgggattacaggcatgagccactgcacctggccctctataaaatttttttaaaaaattagccaggcatggtggcacacgcctatagtttcagccactcaggaggctgaggtgggaggcacctgagcccaggaagtcgaggctgcagtgagctatgattgtgccactgtactccagcctgggcgacagagcaagaccatgtcttgaaagaaaaaggggagagagagagagagagagagagagagagagagagagagagagagagaagagggggagggagggaggaagaggaaaaagggagggagagagggaagaaaggaaagagggagggagggaggaaagaaggaaggaaggaaggcaagaagggagggagggagggaaggtcatggtttggtccaggcatggtgattcacacctggtaatcccaacacactgggaggccaaggtgggaggatccattgaggccaggagtacaagaccagcctgggcaacatagcaagaccctgtctctaaaaaaaaaaattagccaggctaagcaggatcacttgagcccaggatgtcaaggctgcagtgaagtgagctatcattatgcccactggactccagcctaggtaacagagcaagaccctgtctcaaaacatttttgccttttttaaccttttttttttccttcagggaggtatggccttagactattcagaacgttactggtgggaataacaaagggagctgaccgaggatttatacaggaccgtggaggggtgtttagagccaagttgagatctgagcccatgaatctgtaccagtctccatggttgtggggttttctccagcagtactcagcagcctagtatatggacagagaaaatggggtgtgttttgagccagggtgtggcttagccatcttggcagagctgaatcatagggtacaaagggcttccaggagtcagggagagtgattcaggtgggatccaaacagaactggtaagtaaaggaagtcaggaacagggtgggagaccgtagaattggagatctccatgaatctgaagcacaattagggtggctagagagaaccggagaggaagcaaatcgcagtcagagattaggatactacagtttaagggctgccatgagcagcactggaaagcgtccccataccttataccactgtaggaggctatacattctagtttccctgagacagtcccagtttacatgttattctaacattttgtctaatttagcatttgtcccaaacttcattttctaacaaagtttaagtattaatagttgcatttaaataagccaggatgagtctgttgggccaccatatttttatttttagagacagcgtctcgctctatcacccaagctagagtgcagtggtgcaatcactgtaacctagaattcctgggctcaagcgatcctcccacctcaacctcccaagcagctaagactacaggcacgcaccaccatgcatggctattttttttatttttttgtagagacaaggtctcgccatgttgcccactctggtctggaattcctggcctcaaacgatcctctcaccacagcctcccaaagtgttgggattacaggggtgagccaccttgcccagcctaggaccacaactttttaattccaacttctgccttggtctcatctactagtttgtgagatgcatatacagagaaccaagttctcactttaacacagggttaaacctaaaagacaaccagtgataacccttctccctttctctaatcttttccaaatacaatataactaacacctcccgctcaaggatagcatgtagggcgttcactgataacaaagcaagtgcaatcaggcactaggggttagggacaacgaactcattttattcccaggtgggaagtgagaggagtattcaccattgtgcgccttgctgaatatgtggtgtaccagccagctgtccccatgccaaagcctgcaagatacaggaagctgccaggccaccagttggtaagtcagtggatgcaggaaattatacatttacatgtatgtaaaatatattccggaaataaaggcagaggagtcctgccatagaacatatatcgagtagtctgaatacttttggtataacagttattcattatacaatgtgtatctacaactcatgtttttatttttttatttttatttttttttctgagatggggtttcactctccacccaggctggagtgcaatggtatcatctcgactcactgcaacctctgcctcctgggttcaagttattctcctgtctcagcctcctgagtagctgagattacaggtgcccgccaccacgcccagttaattttcatatttttagtagagatggggtttcaccatgttggccaggctggtctcaaactcctgacctcagatgatccacccacctcggcctcccaaagtgctgggattataggagtgagccaccacacctggcccaactcacgtttataataatttttttttctagaaacagagtatcacattgttgcccaggctggtcttgaactcttggcctcaagcgatcctactgccttggcctcccaacactgggattacaggtgtgagccactgtgcctggcctattttattgtttgataatgcttttttaaattttggaaacaacttttccagcatataagttcaaaaactaaagtgcataattaatgaaaaagtaaatactgaatctctttctcaagaaagttgatgataaatgtataacatgcataaatcatttgtccgcatttatcagccactcacagggcacaatgatgtcactgaccacatgaaaatcagaagacataaatctgcagagaaagcatcagtatctacctcaaaagtttgtcggttttttttgtttgttttgttttttgagacagagtctcgcactgtcgcccaggctggagtgcagtggcgcaatcccggctcactgcaacctctgcctcccgggttcaagcaattctcctgccccagcttcccaagtacctgggattacaggcgcccgccaccacgcccagctaattttttgtatttttagttagagtcagggtttcgccatgttggccaggctggtttcgaactcctgacctcgtgattcacctgccttggcctcccaaagtgctgggatttcaggcgtgagccaccgcgccaggccggtttgtagttattttaagactgtggccaaagaggtacagctgcagagaggtatttacatactgctctgtgaaggacttttgtttagatcaaatgacttatttagatcaaaattcattggctcattttccattttatgttgccttgtacatgatgaaaagtgaagcactacttgtaatgcgtagctctattagcagaacttcacagttaaatgatgccagtttaatgttgatatctttagatggttccaatagaaaatcagttgtattagtcggggttctccacaaaaacagaagcaacaggatgtacctggatctatctcgatctatctatatgtctatatgcgaggttgggagagattcatttattttaaggaattggctcacgcaattgtggaggcttgttgagtccaaaatctgaaggtgtaggcctgcggtctgaagactcagggaggagttgcagttccaatccaaaggcaatgtgctggagaatgccttcttgatcaggggaggtcagtgtttgttctattaaggcctttagctgatgaggcccactcacattatggagggtaatatgctttctcaaaacccaccgatttaaatattaatctcatacaaaaaacaccttcacagaaacatccagaagaatgtttgaccaaatatatgggccaagttgacacataaaactaaccatcatggccaggcacggtggctcacgcctgtaatcccagcgctttgggagactgaggcaggcagatcacgaggtcaggagtttcagaccggcctggccaacatggtgaaaccccatctctactaaaaatacaaaaattagcccgacgtggtggcacacacctgtaattccagctactcaggaggctaaggcaggagaattgcttgaacccgggaggtggaggttgcagtgagcccagatcgcgccattgcactccagcctgggtcacagggcaagactttgtctcaaaaaaaaagaaaaagaaagaaattaaccatcatgttagttaattccaattatggttcaattttacaccccatttatggaataaaagtaaagtttatggaggccgggcacggtggctcatgtctgtaatcccagcattttgggaggccgaggcgggcagatcacctaaggtcaggagatcgagaccattctggctaacacggtgaaaccccgtctctactaaaaaatacaaaaaaaattagccaggcgtggtggcaggtgcctgtagtcccagctactcgggaggctgaggtaggagaatggcgtgaacccgggaggcagagcttgcagtgagccgagatcgcgccactgcactccagcctgggtgacagagcgagactccgtatcaaaaaaaaaaaaaaaaaaaaagtaaagcttatggaaagttattctgatgaaagtgaaacatctggcattattgagaaaaccattatcaactcattgaaaaagtaaacatttagtataaatatttttgtgatgattgtttttcatagaaatacaaattttggcggagcacagcaccatggttaaaaacagacttcttaataaagaaatttctagagaagaaatacagttggacttggttgtggcgcacaaataattcataattgtgttcaaacaagtcgattacaaaattgtttctggctgggtgcagtggttcatgcctgtaatcccaccactttgggaggccgaggcaggcggatcacctgaggtcaggagttcgagaccagcctgatcaatatggtgaaaccctgtctctattaaagatacaaaaattagccgggtgtggtggcgtgcaactgtagtcccagctattcgggaggctgagaaaggagaattgcttgaacctggaaggcagaggttgcagtgagctgagatcacaccgctggactccagcctgggtgacagagcaagactccatctcaaaaaaaaaaaaattgtttctggaaaggcatcgggaagaggaatcttaggttacactcatgctttccttatttcttcctgcatgcagatattccagtaaagaacagtgacatacctagcatataggacgtccagagtagataattttttaacatttttcacctctatgacaaaatcattttcaataataatcatataataattaggaataattattttcttgcttttgtctgtagtgggaaaacaatattttagaagaatacatttccactttaaatataatgtggaaattcagtaaaccatttcatatgtgaaccagattttcacttaccaagaaaaagtcttacatcttgcagattgcagtgtttgctgttttccattttaaatacaaataaaaagtccaaattgtcacacagaatgacaagattgaaagaacagtactgtttctttgtttttacaatcatctggctatcattatttgtttcaaatccactattaaaatacaggagtatctggtactgcaggatttggagaaaggaactgcaagccagaggcaagctggaaggattctgaattgttgggtacctaatttagaaacaaatttgagtagctgagaccacatgtgtcaggggacgaatatataaccggaagttctctgaattaacttcctgatagaacacaatgtttgttaaaaggataagtaatgaaaatgttctaatatgaatttcaagttctatgccaaatagaaatgcattcatatattcaccaaaagatatgtacaaaatgttcatagtagcattatttctaatagcccaaacctggaaactgcccaaatgtccatcaacaggggaatggataagaagtcttagaggcaggctgggcgtggtggctcacatctgtaatctcaccactttgggaagccaaaatgggcggatcacctggggtcaggagttcaagaccagcctggccaacatggtgaaaccccattttctactaaaaatacaaacattagccaggtctggtgtcacacgcctgtagtcccagctactcgggaagctgaggcaggagaattgcttgaacccgggaggcagaggttgcagtgagctgagatcattcaactgcactccagcagagcagcagagcgagactctgtctcaaaaaaaaaaaaaaaagtcttagaggctagaagaaagtgaactgtttaaggcaaaattattatggaacacgtaacattggtatcatcatgtattgagccaagctctatgctaggcacttttgcatatattattttgtttaatcttcaccacactctgtgacagagatattaacctcatttgacgtataagaaaccaagcacgcagggaccaaggatcttgcccaaagtcaaaatgctataatagtggggaacccaggatttgaactcagtccaaagcccatacatcccttttccattacagcctgctgcctctccaggataaagagggaagacagggaaagtagggaagtatggacttcacaaattcatacatgctaaaattataacagctactgtttcttgagcacctattatgtggcaaatactatatgaggtactttacataaatgatttttagaattctcgtaaaactcttcatggcagtagttattattctctctctctctctttttcttttttcttgagacaggatatttctctgttgcccaggctggagtgcagtggcacagtcttggctcactgcagcctggacctcctgggctcaagccatcctcccacctcagcctcccaagtagctggggctacaggcacatggccaccaggcccagataatttttcatttttgtagagactgagtctcaccatgttacccaggtttattattctcattttttagatgaagagactgaggtccagagaagctcaatgacttgcctagttttacaaatctcctgccatcacatacccctcagcgtccttaataagagggaggccaccaactatgtgctgggcactgtggtggatgctggagctatagggttgagtatataagaaatggtgttgctggagcaactgttgcttgcttacctgacctatctgagaattaattagcaggggaacatatttttgttttcagattcaatataagaacttgtgtgggcaaaaataaagatcagtagtaataacagtagttcccatttgctgactgtactgtcctaagtgcatatatatatacatacacacacgcatacctatactcctctaatactcaaaatgatcctgtttatgtattgttaatatgctcattttatttttaaatttttatttatttttatttttatttatttttgagacggagtctcattctgtcgcggaggctgaagtgcagtggtgcgatctcagctcagtgcgacctccgcctcccgggttcaagtgattctcctgcctcagcctccggactagctgggattacaggcgcccgcctccacgcccagctaatttttgtatttttagtagagatggggtttcgccatgttggccaggctggtctcgtactcctgaccttgagtgatccacctgcctcggcctcccaaagtgctgggattacaggcatgagccaccgcgccgggctaatatgctcattttagtgaggcaaaaatagaggctcagagtctgatttgtacaaaactacagagcagttaagtgtcctctcagatgtgtaccctgatctgggtgactctaggactctaggtctcaactgttacaaccagttaagggtttggggaagcactgggccaagagtcaggaaaatggaagccacaggtagtgcaaggtcttgggaatgggacgtctggtccaaggattcacgcgatgactggaacccgaagagccggggcccggtttacggccgccatgaagcaacgcgcgccggtaggtttgggaatcagggagccctctgaataggagactgagttgggagggaaaggggcttcgctgggggagcctcggcttcttctgggagaaaattcccacggctacctagtgagcctgcaaactggtaggcgccggcgtaggcgcgcgggcggggccgggggcggggcctgcggggcgtggcggggcgggcagagggcggggcctgcttctcctcagcttcaggcggctgcgacgagccctcaggcgaacctctcggctttcccgcgcggcgccgcctcttgctgcgcctccgcctcctcctctgctccgccaccggcttcctcctcctgagcagtcagcccgcgcgccggccggctccgttatggcgacccgcagccctggcgtcgtggtgagcagctcggcctgccggccctggccggttcaggcccacgcggcaggtggcggccgggccctgaggcgcgggatccgcagtgcgggctcgggcggccgggcccagggaaccccgcaggcgggggcggccagtttcccgggttcggctttacgtcacgcgagggcggcagggaggacggaatggcggggtttggggtgggtccctcctcgggggagccctgggaaaagaggactgcgtgtgggaagagaaggtggaaatggcgttttggttgacatgtgccgcctgcgagcgtgctgcggggaggggccgagggcagattcgggaatgatggcgcggggtgggggcgtgggggctttctcgggagaggcccttccctggaagtttggggtgcgatggtgaggttctcggggcacctctggaggggcctcggcacggaaagcgaccacctgggagggcgtgtggggaccaggttttgcctttagttttgcacacactgtagttcatctttatggagatgctcatggcctcattgaagccccactacagctctggtagcggtaaccatgcgtatttgacacacgaaggaactagggaaaaggcattaggtcatttcaagccgaaattcacatgtgctagaatccagattccatgctgaccgatgccccaggatatagaaaatgagaatctggtccttaccttcaagaacattcttaaccgtaatcagcctctggtatcttagctccaccctcactggttttttcttgtttgttgaaccggccaagctgctggcctccctcctcaaccgttctgatcatgcttgctaaaatagtcaaaaccccggccagttaaatatgctttagcctgctttattatgattatttttgttgttttggcaatgacctggttacctgttgtttctcccactaaaactttttaagggcaggaatcaccgccgtaactctagcacttagcacagtacttggcttgtaagaggtcctcgatgatggtttgttgaatgaatacattaaataattaaccacttgaaccctaagaaagaagcgattctatttcatattaggcattgtaatgacttaaggtaaagagcagtgctattaacggagtctaactgggaatccagcttgtttgggctatttactagttgtgtggctgtgggcaacttacttcacctctctgggcttaagtcattttatgtatatctgaggtgctggctacctcttggagttattgagaggattataagacagtctatgtgaatcagcaacccttgcatggcccctggcggggaacagtaataatagccatcatcatgtttacttacatagtcctaattagtcttcaaaacagccctgtagcaatggtatgattattaccattttacagatgaggaacctttgaagcctcagagaggctaacagacataccctaggtcatacagttattaagagaaggagctctgtctcgaacctagctctctctctctcgagtaataccagttaaaaaataggctacaaataggtactcaaaaaaatggtagtggctgttgtttttattcagttgctgaggaaaaaatgttgatttttcatctctaaacatcaacttacttaattctgccaatttcttttttttgagacagggtctcactctgtcacctaggatggagtgcagtggcacaatcactgctcactgcagcctcgacttcccgggctcgggtgattctccccaggctcaggggattctcccacttcagcctcccaagtagctgggactacaggtgcgcaccaccatccctggctaatatttgtactttattttatttatttatttatttattttttgagatggagtttcgctcttgttgcccgggctggagtacagtggcatgatctcggctcagtgcaacctctgcctcccgggttcaagcgattctcctacctcatccccctgagtagctgggattacaggcgcctgccaccatgcctggctaattttttgtatttttaatagagacgaggtttcaccatgttggccaggctactctcgaactcctgatctcaggtgatccacccgccttggcctcccaaagtgctgggattacaggcgtgagccactgcgcccggcctaatatttgtattttttgtagagatggtgttttgccatgttgtccaggctggtcttgaactcctgagctcaagcgatctgcccgcctctgcttcccaaagtgctgggattacaggcatgagccaccgtgcctggcctaggtagacgcttttagctttggggtgtgatgcctgccccagtatatagtgaatttaattattgctagagctggctgtttgttagttttctttgaacataagatactcattgtttttagtttgcaaatccctcttcctttttaaaaaatttctttcccttaaattgtttgcatgttagcaataacaaatgcttaaatggtgctatgtgctagatactcttctaagccctgttatgtatattaactaattttttaaattacacaaatcagagaggttaagtaacttgcccaagattacccaacaatactaggatttgaacctaagtttgtctcaccccagattctgctcttaatctctaaacttttaagttagtagtgacaatagtaggtatttattgaatacttaactatgttttaggcgttgaagtaaatattttgcaggcattatctaatgtaaacaccctaaagttacataacaggtaccctttaggtaaataaacactagtatgaccttggaggcacagatagttgaagtaacttgcccaatatcacttacatgaaattggccctcaaatgtgtctgatacaacccatgctgcttgtaactatcgttttaaactgccagggtaaacttggacacacttgagctaagaaaaagcttttagatttttgcaaattaatgtgaaagatatgctttatgtggatataatatcttctaaatttcggggatggtagtcctagaaatgtaatcctgccctagccgagcttaccctgccaataattttttacagaattggtaaaacggagcaccttttttttgtccttggccacactgttatcaacagggtgtagattgacatcaatctgtaggtgtaaaccagaattactctttgtgaccaccaggaaatagagcagttcagttcaggggtttctttctgtgaatttagcactgtgacctgcatactacaagtctactttgttttctatccattgtttgtatctgggtattgcaaaaggtaggaaaaggaccaaccagatcagcagagaagagttgccttggagttttcttttagttttctgcagttcattagatagtaactaggccatgtcattttactcccttgtagtgaagatatgttgaagttgtactggtatactcttctacctttctgtaattttatattgtgtagacttgataaaatttatgtgtcaatcaccaccattaatatcaatattgagcctcaattcttatttttctgcccagtggctgccaaattactaacatttacaataattcactactactaagataatctactagttcgatcacatacttcaaattgttatggaactactgtcttcagcattgtgcttctgataactgataagtataattttttttttgtccagagtgaacatgtctattcttccactgtacacactaataaaaggaaaaattgtaatattgggtaaattcatgtccttacacatgtagtagttatgagcccatgtccctagaatgagtaataatttatccctcccttggttgaatagtcaagaatgctgattttaattcttctaacagctttatccctcagaagggaaggcaagcaagttatatatgtagtttatttgtaagactgatatgaaattggaagatgaatctactattagctttaattatttttacatttaggaatattgcatcagtaactcataattttggttttctgttatcctgagttaacacaaattatccaaggagatggcggatcatctgctttgaggtgtttttttttgagaattttaatgtatctgaatataaaaggtaaaaatatgccaactagcaatttctgcccattccagaagtttggaaatattactcattactaggaattaaataaaatatggtttatctattgttatacctcttttaattcacatagctcatttttatcttttatttttgtttgttttttttgagatggagtcttgctctgtcaccaggcaggagtgcagtgatgcaatctcggctcactctagccaccgactccctggttcaagcgattctcctgcctgagccttctgagtagctgggattacaggcaggcaccaccacgcccagctaatttttgtagagacaggatttcaccgtgttggccaggatggtctccatctcctgacctcatgatctgcctgcttcggcctcccaaagtgctgggattacaggtgggagccactacgcctggcccacatagctcatttttagactcacttccattaagtcttgtttggacccacgaacattgtctttttttttttaagatggagtttcacttttgttgcccagactgtagtgcaatggtgcaatctcagctcactgcaatctctgcctcctgggttctagcaattctcctgcctcagcctcccgagtagctggaattacaggcgcccgccaccacgcccagctaatttttgtgtttttagtagagacggggtttcaccatgttgggcaggccaggggtgatccgcccacctcagcctcccaaagtgctgggattacaggtgtgagccaccgcatctggccaacatgtcttttttttttttttcctttttaaccacaaagagacttaagcagtccttgtcacagatgatgaattgatgttgcaagtattgtcttagcttggattaattttcttgcttactgtaattttagataatatagctttgtaattagagattttatgtgtaaaccacaaaaatgtttacatgaaggccattattacagatgtgacgtgcataattattagtaatttgtatgtttacatgggtcagtctggcaaaaaattatgaagttttaaaaattaaaaaaaattataatgccagttttactggaaagtaaaattatttcagtaatcgattatagcaaaagtattgattttcattccagacaaaagtcagaatgaaaggtaatttctcaatactctttcagattaataaaagtacctgtagcgatttttatcattcacaagtatatcacaagtaagttagaatttgagaactgtgttctagatctctgaggagatgcagtcagatttctgaactgtctcagcaaatggtaagtaacttagagctagtaattaataacctgtcctttgatttctgattcagccaagaatggccatatttgggaaaggcagatctggagagtaaccacgttttcattcatttaccacttctaggcccctccagagctctcagatattttggggttgagcccttccccaaagccatacaggaccttttttttgtgatctgttctagccatttttatgttgggtgcttgttatggactgagcatttatgtcctcccacaccccccccataccttttttgaagtcctaacccccagtgtgatggtatttggagacagggcctttggaaggtaattacagttagaagaagtcgggagggttgggcccaggtctgattggattagtgcccttatatgaaaagacaccaggacgggcgcagtggctcacacctgtaatcccagcactttgggaggccaaggtgggtggatcacgaggtcaggagtttgagaccagcctggccaatgtagtgaaacaccatctctactaaaaatacaaaaattagctgggtgtggtagcgggctcctgtcatccaagctactcgggagggtgaggcatgagaatcacttgaacccgggagttggaggttgcagtgagcccagattgtgccactgtactccagcctgggtgacagagtgagactctgtctcaaaaaagaaaaaaaaaaaaaaagagacaccagagagcttgttagaagaggtcatgtgagcacacagttagaagaccttcaagccaaagaagaggcctgagattgaaacctaccttgcaggtaccttaattttggacttcccagcctccaaaactgtgagaaataagtttctgttaagtcactcagtctgtggtattttgttatggcagcctgagcaggtagttgttctttcagaaggtgttgataataaccacatgcaacaccaagtcacaaataataaaacagatgtaacttatattcatacagaaagttgggcactgccattgccttgttggtttacacggctgtgctagttcagtagcagaaaggtgctggtctcctttactcagtttacaatctaggcagtagaatgtaatcactgctttaaacttgatactgcttagggagagaatcattggtgctgggtaactttgggttctaggtttactttttgtgtatatataactgtttttggtaaatcacaagtttctgggcttgtcgaattagattttgttacagattatgagctttattatgctatacagttagttgtatgtatatatgcctttcccactagattttaagctttttttttttttttttttttgtgacggagtcttgctcttgtcgcccaggctgaagtggagtgcagtggcacaatctcggctcactgcagcctccacctcctaggttcaagcgattctcctgcctcggcctcccaagtaactgggactacaggcacgtgccaccacacccggctaatttttgtattttttgtagagacagggtttcgccatgttggctaggctggtcttgaacttctggcctcaggtgatccacccgcctcagcctcccaaagtgctgggatttacaggcatgagccaccacgcccagctataagctctttaagggttgtaaatttataatcattcttttactctcctgcaaattctgttgcacactgccttaatcaaggtagatgctgaatgcatttttgtataattgaatatgttgcaatccccaactctctccaactgttcctgtcaaagcagccactggattgttaactaatccatattagatggggttaattaatatcagatgggacaagtaagggctaataagattataggccaccaagtagatttctgtctagctcttatagagattgagtttattggacctgtttgataggaagttttggtgtttgggatgattaaaactgaagttcctatttattgaattatacctatttatattatttcatatcagtggtccacatgcaagtgaggcttctgagacagagtttgagttctctcttcaactaccataacacttaacctgtatctttttttttttttttttttttagacggagtctcgctctgtcactcaggctggagtgtagtggtatgatctcggctcactgtaacctctgcctcctggattcaagcagttctccatgtctcagcctccctagtagctgggattacaggcctgtgccaccatgcctggctaattttttttttgtatttttagtagagacggggttttaccacgttggccaggctggtctcgaactcttgacctcgagcgatcaacttgccttggcctcccaaagtgctgggattacaggcatgagccacagcgcccagccgtctttttttttaaatagcaatttaacactgttcacagttactcatgtacatgtcatgccatctattacactgtaagttctgtgagggtagctgtatcaaatttatctaactctctctagtatgcatgacatagtaagtattcaataaatatttgcatattagtgataaggatacaggttctgaatagtgggtccttaccatttaagaattagtatttgatggccgggcggggtggctcacgcctgtaatcccagcactttgggaggctgaggcgggcggatcatgagatcaggagatcgagaccatcctggctaacatggtgaaatcccgtctttacaaaaaaaatacaaaagaattaaccaagtgtggtggtgggtgcctgtagtcccagctactgctttgtgaggctgaggcaggcagatcacctgaggtgggaaattcaagaccagcctgaccaacatggagaaaccccatctctactaaaaatacaaaattagccgggcgtggtggcgcatgtctgtaatcccagctactcgggaggctgaggcaggagaatggcgtgaacccgggaggcggagcttgcagtgagccaggatcgcgccactgcactccagcctgggcgacagagcgagactccgtctcaaaaaaaaaaaaaaaaaaaaaattagtatttgatatttgatcattaaatatgaattaagaggacttagactttttgttaaatgtcaagctgggaaaagttgtcatttaaatgaattgcctcttatttaatttcgtctgatgatacattttgtttttattttgtaaaaaattattttttttctttttggagacagggtcttgctctgttgcccaggctggtcacaaactcctgacctcaagcaatcctcctgccttagcctcccaaaatgctgggattacaggcgtgagccacctcgcccggccttgtattatgatacattttgaacaactacaagtagacttggtataatgaacctgcacgtacccattgccaagttctgacaactgtctgtctatagccaattatgcatttcttaaattagaacccccccaatatacccaaatatatatatatgtgtgcatatatatagtaagttgtaacaaagttgtgaattcatacctgaagtatctcaagtgatgcaagttttatgaatttttgtttatgccttttgggaagagttgtattgacaaattttttatgcttaaagtaaaccataaatcaaaaaaataaaatctaggatgcaataaaacaaaacaacttcttgacataagtatggtatgtaaatctgttttgattggaaatcaatttgttatattgccagaattcctgttttagaatacatctctgctgatctgtctgtattcttagactgcatatctgggatgaactctgggcagaattcacatgggcttcctttgaaataaacaagacttttcaaattcttagtcgatctgcagaacctgtagccaggcactgaaccattttgatagatgcagtaatcgttgcaagtgtatatttcaaggagttctggctgggtcctagtttatgcttgtggcagaagcagtgagtaactgggaggaagttggtgagtaagcttcaaggaagaagtcatttttagtactctggatcttcctgattttaaagcactacaaaatggtgcattttcattcttgtcaagtgataacagatatattctgatgagcctgaaatgaatatatattgtatcatttttataatatctagcaaggtttgtattttcctagaacttgaactaaatttcagttcataaaatttataaaatacttagttgttgtaaaatatttttggaatgttcacataggtgacacacaaatgtcccattttcattctttctatagtaaatatgttctgatatgtgaaggtttagcagatgcatcagcatttaatcctagaggatctggcataatcttttcccccaagaatagaaattttttctgcttatgaaagtagtacatgtttctttaaaaacaaatcaatattgacttctgcctgctgtatagcactatgcctccacctggccatgaccaggggcatgtcctggtccacctacctgaaaatgtttgcaaccagcctcctggccatgtgcacaggggctgaagttgtcccacaggtattacgggccaacctgacaatacatgaagttccaccaaagtctgagaactcagaactgagctttggggactgaaagacagcacaaacctcaaatttctcagcactggaaacctcaaaatataactgaattccataaataagattttaagtcttaaatatgtatttttaaatgtattaaaagtcaagctgcttgtatttaagcacctaatacaatgcttaggttgtaaaaggagatgctcaataggtactaactgatatattgagatttaattatggtttgaccaatatttattggaaaccgccaaagcttaaatcatcagcttcttgaatgtgatttgaaaggtaatttagtattgaatagcatgtgagctagagtatttcattctttctggtttatttcttcaaatagactttgaatataatggtgaatgggtattataaattaactaataaaaatgacattgaaaatgaaaaaatatatatattaaagtgtagaaagtgaccaggcgtggtggctcacacctgtaatccaagcaccttgggaggctgaggcaggaggatctcttgatcccaggagttcaagaccagcctgggcaacatagcgagacttcgtctctaaaaaaaaaaaagagagagaaaaaaattttttttatttaaaaaaagtgtagaaagtgtcaagaccccacttcttaccattatttggtatatttctctatacccacccacccttcctccttactccctccctcccttcccaatctttttatctttttgtattctgattttttgtttgtatattttgctttaatttaatgtatcctttaaaaatttcccatacattttatatgtatatataaaaacgcatgctgccaaagataatttataagaaagaccattgaatttttttaaaagtgatatatattcattgaaaaaaatttagaatatatagcaaagcaataaagaactaaataaaattgctgtaactcctctttcaaagataagtgcttttatgattttgttgtatttttttctgtatataggtacatatatagtatttataaagctgtactcatagtacattttcacatcacaggtaccatatcagtgttattaaatattttgtatgccaggggctagacataccaagacaaccaatatgtggttctacttaaataatattagagtatcttttatgatgacacttcatgagttgactataataatcttagacttctaagagtttgggttttcaaaagatcacttagcttttttgggtgatttttcccccttactgtgagatgagagaggctgtttggatttgggattggggtagcggggacagcaacttttcttttctttttcttttttattttgaggtagggtattgctgtgtcacccaggctggagtgcagtggtgtgatctcggctcactgcaacctccacctcccgggctcaggtgatcctcctgcttcagcctccccagtaactgggactacaggcgcgtgccacatgcctggctaattttgtatttttagtagagatggggtttcaccatgttggccaggctggtctctaactcctgacctcaggtgatacgcccacctgggcctcccaaaatactgggattacaggcatgagccgctgcatcagccagcagtttttcttgtggttttttttgtttgttttgttttgttttgtttttgagatagggtcttactctgttgtccacgctggagtgctgtggtatgatcgtagctcactgcagcctcaaactcctgggctcaagtgattccttctgcctccgcctcccgagtagctgggactacaggtatgcaccaccatacctggcaaatttttacaaagttttttgtagggacggggtcttgctacattccccatgtcggtcttgaactcctggcctcaagcaactctcctgtctcagcctcccaaagcactgggattacaagtgtgagccaccacaccatgccagtttttcctgttcagtgtgatattttatcttgttagactacagtgtgttaaaacttgttttactaaattttcaaacatactcaaaagtggagagaatagtataatgaatacccgtatgttcatcacccatgtttagaatattattaaatataaagattttgctgcgtttgtcttagctctttaaaatttttctttttctctttgtgacctaaaggaaattccatatcttatcactttacttctacattcttgactaagatgactaagacatatagttacatggttttttgttttgttttttgttttttaaagacgaaatctcgctcttgtcccccaggctggagtgcaatggtgccatctcagctcagtgcaacctctgccttctgggtacaagcgattctcctgcctcagcctcccaagtagctgggattacaggctcctgccaccacgcctggctaatttttgtatttttagtagagacggcggggggaggtttcaccatgttgacaaggctggtctggaactcctgacctcaggtgatccacccgcctcggcctcccaaagtgctgggattacaggcgtgagccaccgcgcccagcctgtttttttgtttgtttgttttgttttttttgagacagagtcttgctctgtttcccaggctggagtgaagtggcgcattcttggctcactgcaaccttcacctcccaggttcaagtgattctcctgcctcagcctcccaagtagctgggactacaggcatgtgtcaccacacccggctaatttttttgtatttttagtagagacgggatttcaccgtgttgcccaggctggtctcgaactcctgagctcaggcagtctgcctgcctcagcctcccaaagtgctgggattacacgtgtgaaccaacccgcccggcctgttgttttcttacataattcattatcatacctacaaagttaacagttactaatatcatcttacacctaaatttctctgatagactaaggttattttttaacatcttaatccaatcaaatgtttgtatcctgtaatgctctcattgaaacagctatatttctttttcagattagtgatgatgaaccaggttatgaccttgatttattttgcatacctaatcattatgctgaggatttggaaagggtgtttattcctcatggactaattatggacaggtaagtaagatcttaaaatgaggttttttactttttcttgtgttaatttcaaacatcagcagctgttctgagtacttgctatttgaacataaactaggccaacttattaaataactgatgctttctaaaatcttctttattaaaaataaaagaggagggccttactaattacttagtatcagttgtggtatagtgggactctgtagggaccagaacaaagtaaacattgaagggagatggaagaaggaactctagccagagtcttgcatttctcagtcctaaacagggtaatggactggggctgaatcacatgaaggcaaggtcagatttttattattatgcacatctagcttgaaaattttctgttaagtcaattacagtgaaaaaccttacctggtattgaatgcttgcattgtatgtctggctattctgtgtttttattttaaaattataatatcaaaatatttgtgttataaaatattctaactatggaggccataaacaagaagactaaagttctctcctttcagccttctgtacacatttcttctcaagcactggctatgcatgtatactatatgcaaaagtacatatatacatttatattttaacgtatgagtatagttttaaatgttattggacacttttaatattagtgtgtctagagctatctaatatattttaaaggttgcatagcattctgtcttatggagataccataactgatttaaccagtccactattgatagacactattttgttcttaccgactgtactagaagaaacattcttttacatgtttggtacttgttcagctttattcaagtggaatttctgggtcaaggggaaagagtttattgaatattttggtattgccaaattttcctctaagaagttgaatcattttatactcctgatgttatatgagagtacctttctcttcacaatttgtctcttttttttttttttttgagacaaggtctctgttgcccaggctggggtgcagtgcagcagaatgatcacagttcactgcagtctcaacctcctgggttcaagcgatccttccacctcagcctcctgagtagctgggactataggtgtgcgccaccactcccagctaatatttttattttgtagaaacagggttcgccatgttacccagcctcccaaagtgctgggattacaggcatgagccactggcccagtttctacagtctctcttaatattgtatattatccaagaaatttcatttaatcagaacctgccagtctgataggtgaaaatggtatcttgtttttatttgcatttaaaaaaaattatgatagtggtatgcttggtttttttgaaggtatcaaattttttaccttatgaaacatgagggcaaaggatgtgttacgtggaagatttaaaaaaaatttttaatgcatttttttgagacaaggtcttgctctattgtccaggctggagtgcagtggcacaatcacagttcactccagcctcaacatcctgcactaaagtgattttcccacctcacctctcaagtagctgggactacaggtacatgctaccatgcctggctaatttttttttttttgcaggcatggggtctcactgtattgcccaggttggtgtggaagtttaatgactaagaggtgtttgttataaagtttaatgtatgaaactttctattaaattcctgattttatttctgtaggactgaacgtcttgctcgagatgtgatgaaggagatgggaggccatcacattgtagccctctgtgtgctcaaggggggctataaattctttgctgacctgctggattacatcaaagcactgaatagaaatagtgatagatccattcctatgactgtagattttatcagactgaagagctattgtgtgagtatatttaatatatgattctttttagtggcaacagtaggttttcttatattttctttgaatctctgcaaaccatacttgctttcatttcacttggttacagtgagatttttctaacatattcactagtactttacatcaaagccaatactgtttttttaaaactagtcaccttggaggatatatacttattttacaggtgtgtgtggttttttaaataaactccttttaggaattgctgttgggacttgggatacttttttcactatacatactggtgacagataccctctcttgagctacatcggtttgtggggagtcaaaagtcctttggagctaggtttgacaaataaggtgggttaacacttgtttcctagaaagcacatggagagctagagtattggcgaattgaagaaatccccctttttttttaacacacttaagaaaggggactgcaggtatactcaagagagtaagtcgcaccagaaaccacttttgatccacagtctgcctgtgtcacacaattgaaatgcatcacaacattgacactgtggatgaaacaaaatcagtgtgaattttagtagtgaatttcattcataatttgatcgtgcaaacgtttgatttttattactttagactattgtttctgattttatgttgggttggtatttcctgtgagttactgttttcctttaaaataggaatttttcatactcttcaaagattagaacaaatgtccagtttttgctgtttcatgaatgagtcctgtccatctttgtagaaactcgccttatgttcacatttttattgagaataagaccacttatctacatttaactatcaacctcatcctctccattaatcatctattttagtgacccaagtttttgaccttttccatgtttacatcaatcctgtaggtgattgggcagccatttaagtattattatagacattttcactatcccattaaaaccctttatgcccatacatcataacactacttcctacccataagctccttttaacttgttaaagtcttgcttgaattaaagacttgtttaaacacaaaatttagacttttactcaacaaaagtgattgattgattgattgattgattgatggtttacagtaggacttcattctagtcattatagctgctggcagtataactggccagcctttaatacattgctgcttagagtcaaagcatgtacttagagttggtatgatttatctttttggtcttctatagcctccttccccatccccatcagtcttaatcagtcttgttacgttatgactaatctttggggatttgtgcagaatgttattttagataagcaaaaacgagcaaaataggggagtttaactttaatattttcttttaaaaagcatttcatgttataagatcaattctgagtggtagaaatgctttgacattttatttccattttctacttttagtttttttcctatttgtttaagatcttagaggattattaagctgaactcctcaactgataaaaagcatgacatcttaaacataagcaaagcatatttttaggttaattttcacatagaaaacagtttattttatgtgaaattctatgtagatatactatttttttggtatttattgatatgtttattttattttattttattttattttattttattttattttatttatttatttttttttttgagacagagtctcactctgttgcccaggctggagtgcagtggcatgatcgtagctcactgcaacctccacctcccgggttcaagcaattcttctgtctcagcctcccgagtagctgggactacaggtgcctgccactatgcccggctaatttttgtgtttttagtagagatggggtttcaccttgttggtcaggctggtctcgaacccctgacctcaggtgatccacccacctcagcctcccaaagtgctgggattataggcatgagccaccgtgcccggccgacatgttaattttttaaaaaaggctttactggggtatattttatataatataataatcacatgttttaactatacaattccaagctttttagtatatttatagggctatgcaaggaagatatactgttaaacagtagaaattgagaaagctcttctgataatatctcttgatttgatgatggctcatgcctgtaatctcagtgctttggaaggccaagacagcagaatcacttgaggccaggggttcgagaccagcctgggcaacacagcaataccctatctttacaaataataaaaatatctgttgatttgaagtaaagtttttttttaaagacaaggtctcattctgtcacccaggctggaatgcagtagcaagatcacagctcactgtggccttgaccttctgggctcaagtgattctcccacttcggcctcccgagtagctgggactaacaggtgtgcaccaccatggctggctaatttttttttatgtttgtagagattgggtcttactgtgttgcccaggctgatcccgaactcctgggctcaagcagtcttcctgcctcagcctctaaaattgctgggattacaggcttgagtcaccatgcccagcctgaagtagcatttctaccctgtttaataattcagcagcttgtcatgtaagatattcatatatgcatataaaacattaggcagcttaatttggtaaaactgtaaaatggaaattttaaattgtttgcagcatcaataacattgatgtcagtatgatttttacatgctgatcttgaccaatttgaaacagtgagttaaaatctggctgatccgtactaatcctaaagaaatattctatgaactattaaatgtttccagaatatataaagaaacattatgatgtcaacacacccatctatttttttttggaaataaaaactccatttttcttattaaagaaaacatgcttattagaaaacatacggctgggtgcagtggcacacatgtaattccagtgctttgggagatcgaggtgggagaatcacttgaggccaggagtttgagaccagcctagacaacataatgagaccccctctctacacaaaaagaattagttgtgcatggtggcgtgcacctgtagtcccagctacttgggaggcagaggcaggagcatcccttgagcctaggagtttgagactgcaggagttcgagactgagtggaatgcagtggaactgcattccagcctgagtgacagagggagaccctgtcttaaaaaaataagaaagaaaacacaactgcagaaaattataaaggatttaagtcattccaaatatcactgccactttttatttagaatattctaaagaattctctctctgtgtacacacacacatatgcgtactcttaatccaagtagcttggtaggattttatttacctagtgcctagatgggaaattgcctggggattccaaatacctatttcattaaattaaagatgtcactgattttaagacttaacactatttttcatactgccaagaaagaaaacactaccagttataaatgtaaattgccatcaattgtaatacatcaattttagagctattattaataaaatgtgaatgtgcatcttagagcaatgaaatatagtactatatatttgatgaccttttctgccctgtgatattcagaaagtgaaagttaaatatgggctgagcatggtggctcacacctgtaatcccagtactttgggaagtcaagacgggaggctggcttgaacccaggagttcaagaccagcctaggcaatgtagcgagacgccatctcaaaatattaaaaataagtaaataagtaaataaaaagaaggttaagtatacaaatgtatttcctttgttgtgaatttatttcaattttatagtgattttttttttttgagacgaagtctcactcttgtcccccaggctggagtgcgatggcgtgatctcagctcactgcaacctctgcctcccaggttcaagctatactcctgccttggccccccgagtagctgggattacaggcgcctgctaccatgcctggctaatttttgtatttttagttgagatggggtttcaccatgttggccaggctggtctagaactcttgacctctggtgatccacccgcctcggactcccaaaatgctgggattacaggcgtgagccaccgtgcctggccagtggttttttgttgttgttgttgttgttgttttgtttttgtttttgtttttgttttgagacaggatcttgctctgtcacccaggctggagtgcagtggtgccatcttggttcactgcaacctctgcgtgggctcaagcaatcctcccacctccctttccagagtagcggggaccacaggtgtgtgccaccacacctgactaatttttgcatttttttttgtagaaacagggttttgccatgttgcccaggttggtctgaaactcctgagctcaaacaatccaactgccttggcttccctaagtgaaattacaggcatgggccactgtacccagtctagtgatttttttatttttatttttattttattttattttatttttttaccaaaaaaacaacaaagcctcaggaggaaaagttgatacacaagtaaattttattggaaatgtttttgtgtggaccttaagcagagggaaaattagtctgcattatggtgtatccagactaaatgactgatattaaaatgaaattattcttaggatttgcaatcttagagaaaactttttcatttttatttttttgagttacaaattatcttcatttacatttgagaacagtgagtcacagagggattaagtaacttactcaagatcatacaagtctttgatttgaacccaatcttttaactctgcagaactcagagtcactcttatttggaaaaactttttaactgatgtggatcctctaatatgggcttcctattattcattctctattagtcagaagttttgcaagcagacagaattcattttgccaattacgggattttccctcagttgcagtcaaggttcataaaactataactctttatctttaattagaaatgtttttttttttgagacaaggtcttgctctgttgcccagactggaatgcagtggcatagtggcccattgcagctttgaactcctgggctcaagggatcctctgcctcagcctcccaagtatctgagactacaagtgcgtgccatcacccatggctattttaaaaaaaaaaaaaattgtagagatagggtcttgctgtgttgcccaggctggtctcaaactcctggtctcaagcaatccttctgccttggtctcccaaagtgctgagattacaggtgtcagccgttgcacctggccaaaacgataacttaaaatacacacacacacacacacacacaaacacatatgtgtatttgtgtgtgtgtgtgtgtgtgtgtgtctcaaaaggtatcaaaagagaatagctataactttagtgttgatcttgatagtgacttgattaggctctgtttaacatcaaagatgcaaattaatactttctttgaacatattaaaaatgcagaaaatattggagtattttattttaaataaattgtattctgtatatttaaggtatacaacatgatgttatgggatacatataggtggttaaaagattactgcagtgaagcaaattaacgtatccctcaactcacatagttacccattttttttttgttttggtggcaagaggagcttaaaatctcatttagtgtgaatcccaaatacagcacaattttattacctatatacttcatgttgtacattatatttctagacttgttcatcctacatatctgctactttgtatcctctgagctacatctccccattttctcacttgccccccaagtagtttcttaaagtgtctcatgtaagagggcagtagctttcagcttaaactttttctctgtatgtagtcgatttctttgaggtatacttttctctccagaatagttagatgtaggtataccactttgatgttgacactagtttacctagaacttatcttctgtaaatctgtctctatttccatctctgtctccatctttgtctctatctctatctgtctatctctatctatctatctatctatctatctatctatctatctatctatctatctatctaaagcaaattcatgcccttctcctatttattgaatcgagaccatagacaggggtgagagaaagaatttggcaggaatggggatgtgtattatctgtggcataaggaaactttacagaactaggttcaaaagtatactttctagttctttcccatggcttttcactttgatgtagtccttatcaggtaactgaggttttatataagtcccctgattcttagaacatgaaggtgtagtagtcaaggttggtcccttgaaaccacaaattttgtgaaaaaaaattaagaaaattgaataatttcctcagcaaatacatattgatcatctgttatacagccatgagaagtggttctgttgcacacgtttattttatcagatcctaatcccaaaccaggcataaaatggaaaccatgaagataggatgaaataacttctgaatgtttgaatgtttgaaaatagtgtacttaaaaataccaggtggtttttgtttgttttttgtttttttctttttttgagacagggtctcactctgtcacccaggctggagtgtagtggtgcaatctcatctcattgcagtcttgacctcccaggctcaggttatctcccacctcagcctcccaagtagctgggactacaggcacatgccaccacgcccagctaattttttgtattttttgtagagacggggtttcaccctgttgcccaggctggtctagaactcctgggcttaagcgatcctcccacctcagcctcccaaagtgctaggattacaggcatgagccaccatgcctggcagaaaataccaggtttttaagtatcagcacttactcttcaatcttttctattactatgttgtgctaaatggtattttttatttaattagagcaatgctgttcaatagaactttctttgaggatggaaatcttttatgtttctgctatgtggtacagagccactagtgacatgtggcttttgagcgcttgacacatcttgtgcaacacaggaactgaatttttaagtaatttatattgccacatgtggctaccgtatgggacagtgtagtactagatgatctgtaagggctgtgcttcatcagtgtcgttttttaactgacaaaaacctttagttttttttttagtaatgtgtttatttaaaagaattcataaaatacaagtaaacaaattaacttgttacctgagcatatgtcctttcatacttattttttctgcatacatattttggaaaatggaatatctgccctttttttttatctgagatacagtctacctctaaaaatacatgattctaacattctcacttttgttggcatttgatcagggtatagaaaaacagttaaaaggacagagaatggttgagagattatgatatgaagagaaaatgtgattgagtgtggtagacttggggcctgcttgaatgttgagagaatgactgttttccgataaaaaaaaaaagtccattctaggatcctaaaagaagggtctgaagttcactgcagaaagcaagctacatagtactaagccactaaggggacatggagcccttagtaattcctaccttagtaatagtctcatcatgccctcttgggaacccagccttgttgattagcctctctgctttctctccttatagttcaacctccctgtttgttccaagcagttcttttcctgcccatttattatgcatttctatacagctttcctcctctttttctataccatgctgcagttcttattgctacctagaggttttcaaaattcctaggggcggataagtaggcataaacaaagttcttccctattatccttcctattttttcacctagactgaagaggtagacaaaatagaaataaagacattaagggtatgtgtttgtagtcccaaagagcttctctggcaattttatgtagttgacagtgacgctctgagttcaggacagattggactccttggctgagaggagtgaggagataggacggtagaggagagggtagagcaactctggaggaagctttcccctcacctttgccagtcctgttatcctagacttaaccataattaaagatgagggaggcactcagtaaagggatctagtgggaagcttgttccagacagccaaggagggaggttcgcgcagttcctttggccacccaggtggggtaattgatccatgtatgccattcatgtacaatgtaggcacttatacctgtattccaatgtagtgaactataccattactcttaaattaatattctttattagcttccatggtggctataggccaggcaagagagttaagaaaaaataaatagccaggtatggtgactcaagcctgtaatctcggcactttaggaggccgaggcaggaggatcgcttgagtccaggagttcaagaccagcctgagcaaaatagtgagatcctgtctctattttttaaaaaagccttggggcaaacaggagtatggaggtttggatgctaatagaacagcagtgtcttactgcttggagttctcttgtttcttgtcctatcaccgtagcctttggatcacagcaatttttccatgactccatacttttcagttcttgaatattttttcctttattcctcttgtctctgtaaagacatcaactggagttggactgtaataccaggtatctccagaagatggcactatttaacagattttataaataatttgatgtgagtcactgtcatctgaagcttgttgccttttctttctttcttctttcttttttttccccatcaattctgtatgtttgaaatgctgggttttaagttagttagaataagggatgtctgtaatttccctaaattgagaagtaatatgcaaaggttgatatcagaagtcatatgctcaccttgcaacaccaaataatactggcccatttgtgatttttgaaagtaacactccataataaatggatgtatatatagaagcataacaaaaatagaagcacataaaagtgaaaagtctcataaacgccattgtcactactcatgtaattgctgttacaaatttgtttaaatgttgaataaaaatggtgtcataggcaacacagtgttccactacttggtgtttttaatagcattattctgtctcagtgtgctttggattatcaggtgctttttaatagttgcatggtattacattgtgtagatgaacttgattaatttaaatggttccctgttaatggacatgttggtttgtttttgtgaacaactgatacagtgaacatttattttttaaataaaaaaaagagagacagggtcttgctgtgtttctcgggctggccttgaactcctggggtcaagcgatcgtcttgcctctgcctccctgggattacaggcatgaagccaccgcacccggcccagtgaacactcttgaatgtatctttgtatacttgtcagtgtttttgtagcattgattcccagaagtgggattactggattaagtgacatgcatgtttgcaattttaacaggtattgctatgtcattttcaaaagaagctatgccaattaatactctcaccaacaagagtgcttatttcccctcagcatattatcaggcttaagttttgccagtatgggtgggagaacagtagaatcacattgttttagtgtttgtttctcagatagatataattttacaccttataaccttctcttctataaattgtctatttgtgttcattctccattttcctatgggttcttattgttggagcccaatatataaaagggggtatttgttacagaacctcttcagttttggttcatgtcatgcctgggtttttaccctttctacggatgttaaaaaaaattctctattttcttccagtccacttatggctttattttttacatttagattttaatccgtctggaatttatttttgtgtatgctgtgaggtagggaccatacttttattttttcccaaatgggttactagttggccaaacatcatttattgaataattcatcttttccctactgactcgaaataccatctttattgtatactaaatcctcatatagttctgggtctgtttctgggctctactttgttcatttactgtgctggtactgcaccgttgtaattgctgtggctttgtggtatggtatggcttgctctctgctagggcaagtcgaagctcttttgttcacctgctctttcacccaaattttctgtcctgaatccagcacagccaaattatggtcattgtcaccaccaactacagtgggtgttgagcatttcccattgaatctcctgtaagggttttattggattctgtgatagcagtaaaatgggagcctaagaggtattccttaaaggactactaatcagacctggtttcccagatgatgctgaagatgacggggcctgggctagacttttgagggacatatccttggggttgggtgtgatatagaccagcccttacaatttgcttgactcatgggaatcgtacagggccagaaccagacacctgtcatgctaataacttccctcacaattcagaaatcactgtgattgaagatgggtggctgttataatactacccacttaaaaatggatgtaacccattttttaggactcttaaaaacatcaaatcagtaatggccgattaggactttttaatttttactaatctctacttgaaagttttctagtcattcatttcaggaaacctaattcttataattcatatcatttagaatatcataatgctatggatattagctagctaacttctcaaatcttctagttctcatttaatttgaagtttgtgtgtgtacataaggatatacatatacatatgtgtgtgtagatatatatatatatagttttttttttttttaactagaatgaccagtcaacaggggacataaaagtaattggtggagatgatctctcaactttaactggaaaggtatgtatcttgaaagggaagaaaaaaaagcacttcataccgagtcaattagtaacagtgtgctttcaatcaatcactaagagataatttacatagtataactaaatgggttatttaacccttggaagcagtctaggttaattatcgttccctaggtcatgtagtaaaaagacagtagaatccaacattaaccttaaatgtccatattgtcaagtactgctgtctgcctctgtgggactctaatttgggatccttcaaaaaacattgatgggggaaaagatagcctttaaaaaaaaaaaaaaaacaaacctatgtgagtctatgtgaggtagactcacatagtttcctaaaagatagcaaagcagtattatgtagtggctgaaagtgtgagttccggagcctgacaactgattcaaagcatggcttagtacttcctaactctgaccttgggcaagttacttaacctctctgtgtcccatatgtgattagggtgaggttgataatagcagccatagagttaagaggattaagtgctataatgcaagtagagctcttacaacagtttctggtaaatcactcaataaattcagacatactattattttaagaaatctcaaagagttttcttgtaccttaaaattctcctagtgtgaaccattggttttggtatattgtgcttccatgtagtttaatatcaagatgtttttagatttcccttttaatttatttgttgacccattggttgttcaggagcatgctgtttacctgaaaataatggagatattaaggtatttgaatatttatcttctagtacattgaaaaactttttgagagtaaccaataataaatgatggaatgctactgctttttttttttgaagctgccagttattgtttacttacactatgccaaatataaaggcattaatctcataaaagtttcacaacaatcctgtgagggagacgatatccccattttacaaatcaggaaattaagacttaataaggttaaaagacttgcccaaagtcacagaaccagtaagtggtagagcttgaatttgaatacagacctgactctaaagctcttttctttctttagattttagtgttcattgcttacttgaatgagtatctataagaaaactttaacatgtaaaacttctgtgaaattatcttgtcccatatcagggtcatgtcaaactaatgtcctcctcagcatctttggaaaacttcagaggagaaatgagctttgcccctcctgttcatttcatataccactgttagacctgtccttccctttcagcatgctttgtccatatttagaagctgttgaagccattacttgtctggtcagtttttagtgctggaatggacctagccttttaggccttctgagatttagtttgatctcgtctttcccacctaatggctctgttctactacatagatttgatctgaaacagttctctgtttctaaaataactttcttttcatgatagtcacagtaaagtacatttattatggaaaaatcaataagtataacgagtgaaagttatttcttggtggtaagattatgggattatttgaactttctgtttcattgtattttatttatttatttatttttgtgatggagtctcactctgctgcccaggctggagtgcagtagtacgatcttggctcactgcaacctccccttcccagttcaagtgattctcctgcctcagactcccaagtagctgggattacaggcgcacgccaccatgcctggctaatttttttatctttagtagagacagggtttcaccatgttgaccaggctgatctccaactcctgatctcaggtatccacctgcctcagcctcccaaagtaccgggattacgggtgtgagccaccctgcctggcctcattttgtcttttgggggtatttttgtgtgcagatatatatgtatataaatatttttccctcttttccccagttagtatttgagcagatgaactttggacccgaatacctgtattcaagtctctaataccacttcttggctattttcattttatcaaatggcctcttatcctcgtttttctcatttattaagtagagatgtaactacttgatataattcaaaaactcaataatggcattcttttgttttttagactctagtgtctgtactcgttgtaccatgctgggattcatttgaacaattgcatggcttttttagtgtattattaaatttgcagtttacttagaatttactgggacctcatacaaatgggaaaaaaacataactgtgttactcatttgctgtgtgcctttggattgaccctattttttgtattcattttctccccatgtcctgagttccactttgaataaaaagtaatttttttcctgcctgtaaaataggctaccaataggctgcagttgtctatagtagctgcttcactgaggagagctcagcatgagagaaatagtatgaattgcttgccacaagttatgggctagccttacttcattctgtacttggacctgtttaggcttctaagagatcttacctccaacaataaactgctttgagacatgaaaaggtggaagctttacttggttataactttacttttaatacctagaacagtgagtcttcaaacttgtatttgcatgcccaatttataaaaagtttcctgagcatttacccctaatatatgcattttaaattatatatgatttatggtaataataatatatatgttacaaaatacatacaaaaatatagattaaacaaggtgaggtaaaaaatttaaaagttctaatctttcttgcaaaccagtggatcttttgtgccttactctggtaaacactgtcttagaagaatatatagaacattaaaatcttaatgctatagttatatgacagagtatgatgagagctacagataaacaacacatcatgaatcttcttgtggcagtgtttataaccattatgtgaaatgctgcctcattcttataactagcataagaacagataggactttctcgattttgaggggtaattattagatggtattttctgttaaggactcttccagctataaaattcttaaatgtagaaagcgaagtgagggtttatggtgagaggaagcattggtatcatgttttagtgtagtccaagaatatggacacatccagaaaatgcagatcaagtttagcctaatgagaaaatatattttggagtccatatggtaaattaaattatgtgatttttgagttattgtacaaatataattcttagaatgttagagtcaggagactataagagaccaactgcttcaagtttcatttaacacatgggaaactaaggccagagaaatttcaagacttgcccaagattagacctcttgttaagtaatgaaagtgttttaaaaacaggtgggtcaaattctgtttttaaaatttccattatgatgaaaatttcagtattacaggcttccaaatcccagcagatgggccacttgtttaaaggagagtttgatataataaagcatctaaaaacaagagtttggataattccttagggttgttatgatgtgatttgacttataattggaaataccgttttattcattgtactgattttcatttctctttttcttctagaatgtcttgattgtggaagtaagttcacatttacttttaatataacatttatgacttttctaacttagtatgcaccatcctaaaggtaagccagggagagaaattcctctgcatcagttttaatggtgggcttgtgttctaaaggagtgagattggttttttgtaaagactacttagtaatttgtttttaccaataatggaatggtatacttcctacctctctttttttagtttgaagtattttctttctaaacataactctctctctctatttatctatatataatatatacatatatatcttatattttatgtatatatatatatatcttgcttagattttgtcttatgtaatatttggtacataaaaaataatatttataatttatagactattttccatgtgttattatgtgctaaagtattttgtatcttagcaccgagaggctaagcagtttcctagggttaccagctagtaaactaagggaaacctttacttcctttagctcagtggttctcaaaatgtggttccctagaccaaaagtattaatatcagacaagaacctaccgaatcaaaatatctgtgatgaggcccagcaagctatgctttaacaagtttccgagtgattctgatgcatgctaaggtttaggatcccttgtttttactcataagtcactttctcattaaggccttccctggccatcctatataaaatctcatgttttcacaccgtcaacttcgtattcctcctcaatacttttattttcctgatcacttatcactaacagcctctctctctctctctctctctctctatgtatatatatatatatatcacttatcactgtctaacagcctctctttatatatatataatctatagattatatatatatgcagcattgtgcaatcattatcacgctcaattttaaaacattttcattgccccacaaagaaacccaatccccttagccatcactccccatttccccttcccccagcacctagcaaactgatcatctacctacttgctgtctataagatttgcctattctggacattttgtataaatagaatcatacaatatgtggccttttgtatctggcttctctcacttaatgttttcaaggttcattcatgttgtggagtatatctgcactcatttcctttttattgccaaattgtatggatagacaggtgttcctcaactgtgtcctgataaacccatctgaagttgaaaatatcataagttgaaaatggatttactactttgataaatctatcctaaagtcagaaaaatctcatgttgaaccatcgtaagttggataccatctgaattacatttttgttatccattcactggttgacagacgttaggttgtttccactgtttgctccttatttctcgtacctgaaatgtccttattccctcccttcttatcccatgtttaagtcatttaagacccagctcaaacgtcacctccacaaaaccttccttgatacccctttcctcttcaattcacttggaccttttgcatttaattttaatttttattttttttaagacagagtctcactctgtcaccaggctggagtgcagtggtatgatctcagctcactaactactctgcctcccaggttcaagcaattctcatgtctcagcctcccaagtagctgggactacaggtgtgcgccaccatgcctggctaattgtgtgtgtgtgtgtgtgtatgtatgtatgtatatatgtgtgtgtgtgtatatatatatatacacacacatatataaatatatatacatatatatatatacacacatatataaatatatatacatatatatatatacacacacacacacatatatatatatatagttttttttttttttaagtagagatggggttttgccatgttggccaggctggtctggcctcaagccatcctcccacctcggcctcgcaaagtgctggtattataggcatgagccactgtgcctggcctgcatttcattttaattataaaatattttgaactcagaaaaaagggtatgctgaatacctacgtacccacaaaagtattaacattttgccatatttgcttctgatcttattttttttgagaaattaaagatcataatacaactaaagccccatttctttcccttcattcccagaagtatgacaattatccttaaagttgatatatatcattcccatgcatgttttttatacttccctagtacaagttagctgtatcctctgctcaggggctcatcaagctgaatcaagggactcatgatcctcttcaaagttccttcaggttgttggcagaatttagttccttgtgattgtaggactgagggcccgttttctcactggctgctggccaggggttgctcccagatatttaaaggctcatgccctagcccatgacagtctcacaacatggcagctgacttcttcaaaaccagcaggagaatcttgctctagtctaccacataacctaatcacaggagcggctatcccgttattttcacagatcctggtcacattcaaggggagggaacccttctgtgtgtgtacaccaggaggcaggaattttttttttctttttcttttttgttaaaaagtcttaaagtcttttatccctaaaggaggcaggaattttgagagccatcagaattctgcctaccacagcccagaaatctgcatttttcacaagtctccagccatgatgtttctgatggctcacactgctttattccatttttaaagagtatttttattgaaaagcattagggttatggtttaaaaaatattttccctaacaaagatgggtttgtttagagtcctacttttgactaaatagctgagattcacttttatgtaaagtcattttatagcgttattaatttgggtgcctttaaaaatagtataaagcatgtttctcgagtgtagtctgttagccacctatattggagagttgggaggagagagtctctatcttgaatttatgggaaaaattctaaaatactttttataatgaaggacaacatcataactccctaataaaatgtgcatgtatatattcaaatttgctgtcattgatcctgcacctacaaaatccagtcctgggggctggcattcttactgcttgctgagggccagatgatatagattccagaatatctccatgtagattttggtgagaattactgtgctgaaaagaatgacagtattgcagttatacatgggggttttggtactttatattgtgactctgaatttaaagctatgcaatgtcttcttttttgaaaggatataattgacactggcaaaacaatgcagactttgctttccttggtcaggcagtataatccaaagatggtcaaggtcgcaaggtatgtatgacattttgacacagaatattttcctcatttgaagggggattaagtgattgcttctttttaaggataaatgttttcaactgtcattttatcttcgaaaagtaatgtaatctcatataagacttaagatataatccttttaaataattttgtcatgtgttaataaagctcataattacagtcacttccttgcctaatattaacatttggtttttcagcatgctaattatatcagtttgtcctgaatagcatggcagaggattttgggcccccttgcaaaattaagaataaggattccaaagcgggtgaggaagtgataggaaggggtgggccctgaagatctggacctcctggaattgagtgatgaatgctgcatcttctttgtgtctgtagtgaaattttataatgcctgcttccttttttattaagtcggcctcacctcctcaccttacctatgctgttttacttttgcttttatagttctacctgtgtttatttctcattttcgtttcatctctcaacaactctggggtggcattattattcccacttttcagataaggttactgaggcatagggaattgtccaaaggtacagagctagtccgctatagagatgagatttgaacccagggaacctggctcacagtttatgcttttgctaccttaagtttttaatagagtgacatcaaacaaacatttaagaatatgtttttcttttccttttataatttcattaaaaacattaagtctctgatcagtctgcagtttttatgtaggggtcaggtaatgttctaacttctgctttttcctaagtgattaacaggtttttataagcccttttgaaaaaatcacggtatctgtcgagcatctttgaatcagagtaagccttctagtgagtcatatgtcagcagtttgactgtatgggcttttctaatatccagttcaagtgtttatcagtgagtttttcttttaaatagatttgggacaggtactatgagagtatataagtgatacgttataggacactaactagtatcctatgaaatggcaaaaactgcaatcacttttgcaccaaccaaatagaaactaatcagtgcacttgcttatttttctacatgctctttagggttttaaatgtcaacctactgtggcatagactttaatcctctgggtattcttttgttgttctttcctggtatatgctgtggaattgagatagactggttcgtgagcgagagattttgtgttgccacaggtaggacatgctcaaacaatacttgggtcatttcttgacccaagtcatctattcaccatagttttgtagcaccgatcttgcatacatttcatgtatcttctttgaaccccacgtcagtgctgcttatatgatactcagaaattaaacactaaggaataagattttcaggtaggattgagttttggagggtcacaaatcttgtaatgtctaatatttccactctccctgctgagaattagttttggcttccttggaggtgatatcgcctctgttgagtataagtggcctactgtgatcacaccactgcactccagcctgggtgacagagtgagaccctgtctcagaaaaaaaaaaaaaaaaaaagaatgcatggcctagatgacttctaaggtttttcccacccagttccagttttcatgttctaggcagagcagtaaagtgagaaacacatggacttgggagtttagtctcgcatttcactgccacttaatctgagcgactattccatatttaatctctctgaatgtatttactcatctttaaaggggaatgattattaacatctttttctcagggaaactatatgagtcaaggagataatatatttgaaaatctttttaactgcaaagcgctgtttcactgttggttataatgtgattgatctcattgtagtgagcagctgcttaattgcgttttagaatgtagggaagatagtaatatttttcacattatatatgtagctggttctggaactgtaaacatactccttttttatggagatctgagtcacgtaccataaaattcactcttttaaagttgtacaatccagtggtttttgatatattcagagttgtgcatctgctaccactatttcattttggaacccaaagaaaccttgtacccattagcagtcattctcccttctcccagcccctggcaactactaatctactttctacagaaagtccgtacagatttgtgtattatggacattccatataaatggactcatgcaatatcctgtcttctttcacttagcatagtgttttcaaggttcatctaggttggggcatgtatcagtacttcatcccttgttttggctgaataatatttcattgtacaaatatatcacattttgcttatccatctgttggtgaacatttgagtttctacctgttggcttttatgaataatgttgatttgaatgtttgtgtacaagtatgaatacctgttttcaggtctcttgagtatatagttgctaggtcatatagtaactctgtgtttaacattttgaggaattgcccgactatttaacaaggtatatgtactgttttacaccagtaacatatgagggttccaatatctccacatccttgacaacacttgttactgtcctttttattgtagccatcctagtggctatgatgtggtatctcattgtggttttgatttgtgtttctctgatgctgatgatgttgaacatgttttcatctgcttattggccatttacatatatcttcttaagaacggttacccatttacagtatggaaaatgcttcagatgcaactctagtcatgccttagagatggagctttattaaacattcagatctctaggcatatgaagtgctgagttctcttgaactcctaatacagattgcactgagtttagtgataccttttctggagcattcctgagttcaggtagggagaagggtttttgctgtgattggcttgttatgttctttctaaatggaaatagaattgaagtgtctcctctctccatttattggaagagtcatgagggacataattagatgatcccttggagtctccggcttaggtcagtggttatctacttaggctgcacattggaatcacctgagagttaaaaaaccaggataacctctgcctgtgtctcatctccagcaattctgatgtaattggtcagggctgtggcccgagtaggtgagttctggttttttaaagctcccaggtgattctgatgtgcaatccaggttgagatcactttgggccctttccagctctttaaacatatatatttatctaggaaggtatgaaagcataagttttcttgagactgcctttaacatctgtaaaggctttcaaagcagcttctgtagttttttttaaatggctgaatatttttcaacaggcagcatttgggttataaaattagcttttggtagagttgacttataccacctccagcttttgttccaaaaataaatactggttcttttggcacactagttgttttaccctaaagttcctctttgtaagccagttattaaaagttgtgatgcagccagggcgaagtggtacacatctgtagtcccagctactcggaaggctgaggggggaggatcgctagagcccaagaagtcaaggctgcagtgaactgtgattacaccactgcactgcagcctgggccacagagcgagactcatctctttaaaaaaaagaatgttgtgaggccgggcgcagtggctcacgcctgtgatcccagcactttgggaggccgaggtggacggatcacctgaggttgggagttcgagaccagcctgaccaacatggagaaaccctgtctctactaaaaaaaatacaaaattagccgggcgtggtggcacatgcctgtagtcccagctactcggcaggctgaggcaggagaatcgcttgaacctgggaggcagaggttgtggtgagttgggcgagccattgcactccagcctgggcaacaagagcaaaactccatctcaaaaaaaagaaaagaaaagaaaagaatgttgtggccaggcgcggtggcttacgcctgtaatttcagcactttgggagaccgaggtgggcggatcacgaggtcaggagatcaagaccatcctggctaacacagtaaaaccccatctctactaaatacaaaaaaaaattagccgggagtgctggcgggtgcctgtagtcccagctactcaggaggctgaggcgggagaatggcgtgaacccaggaggcagagcttgcagtgagcggagatcgcgccactgcactccagcctgggcaacagagcgagattccgtctaaaaaaaaaaaaaaagaatgttgtgataaaaggtgatgctcacctctcccacacccttttatagtttagggattgtatttccaaggtttctagactgagagcccttttcatctttgctcattgacactctgtacccattaatcctccttattagctccccttcaatggacacatgggtagtcagggtgcaggtctcagaactgtccttcaggttccaggtgatcaaccaagtgccttgtctgtagtgtcaactcattgctgccccttcctagtaatccccataatttagctctccatttcatagtctttccttgggtgtgttaaaagtgaccatggtacactcagcacggatgaaatgaaacagtgtttagaaacgtcagtcttctcttttgtaatgccctgtagtctctctgtatgttatatgtcacattttgtaattaacagcttgctggtgaaaaggaccccacgaagtgttggatataagccagactgtaagtgaattactttttttgtcaatcatttaaccatctttaacctaaaagagttttatgtgaaatggcttataattgcttagagaatatttgtagagaggcacatttgccagtattagatttaaaagtgatgttttctttatctaaatgatgaattatgattctttttagttgttggatttgaaattccagacaagtttgttgtaggatatgcccttgactataatgaatacttcagggatttgaatgtaagtaattgcttctttttctcactcatttttcaaaacacgcataaaaatttaggaaagagaattgttttctccttccagcacctcataatttgaacagactgatggttcccattagtcacataaagctgtagtctagtacagacgtccttagaactggaacctggccaggctagggtgacacttcttgttggctgaaatagttgaacagctttaatatacaataattgttgcattattatttcagatgataaatgtggtcataagtaagaaataaatgatcgagtttagtcttttaattcactgtcctttgaatacctgcctcttactctggaggcagaagtcccatggatgtgtttatgaacatggttgaggaagatttaggaagactgcaacagtacactacctaaagcaggttttttactccatctttttttgccacgtacactggcctcccactttgatatgcttgaaattatctccttgatttgtctttcaaaactacatattgaggctggttgcggtggctcacacctgtaatcctagcactttgggaggccaagccggacagatcacttgaggtcaggagttcgagaccagcctggcaaacatgatgaaaccccacctttactaaaaatacaaaaattagccaggcgtagtggtgtgtgcctgtaacccagctacctgggaggctgaggcaggagaatcactggaacccgggaggcagaggctacagtgagccaacatcacgccactgcactccagcctgggtgacagagcaagactctgtctcaaaacaaaacaaaaaacaaaaaactacgtattaagacaagaaacagactgggcgcggtggctcacgcctgtaatcccagcactttgggaggctgaggcgggcggatcacaaggtcaggagatcgagaccatcctggctaacacggtgaaaccccgtctctactaaaaaatagaaaaaattagctggggtggtggcgggcgcctatagtctcagctactcgggaggctgaggcaggagaatggcgtgaacccgggaggcagagcttgcagtgagcagagatcgtgccactgcactccagtctgggtgacagagcaagactccgtctcaaaaaaaaaaacaaaaacaagaaacaaattaaactaatgtgatagactactgctttgttttcaaaagatacactccccaaaagttactgatctaaaatacagtagtactatctctgtttagtaagaaccctgacaactaatagtgttcttatatgtaaaatgctattcttgcctttcatttcagaatatactttttaaatgtgaatttctggatttttttttatagcatgtttgtgtcattagtgaaactggaaaagcaaaatacaaagcctaagatgagagttcaagttgagtttggaaacatctggagtcctattgacatcgccagtaaaattatcaatgttctagttctgtggccatctgcttagtagagctttttgcatgtatcttctaagaattttatctgttttgtactttagaaatgtcagttgctgcattcctaaactgtttatttgcactatgagcctatagactatcagttccctttgggcggattgttgtttaacttgtaaatgaaaaaattctcttaaaccacagcactattgagtgaaacattgaactcatatctgtaagaaataaagagaagatatattagttttttaattggtattttaatttttatatatgcaggaaagaatagaagtgattgaatattgttaattataccaccgtgtgttagaaaagtaagaagcagtcaattttcacatcaaagacagcatctaagaagttttgttctgtcctggaattattttagtagtgtttcagtaatgttgactgtattttccaacttgttcaaattattaccagtgaatctttgtcagcagttcccttttaaatgcaaatcaataaattcccaaaaatttaactgctttatgaattcaatttaaaaatccttaaaataagtcctgtctctttaaaaaaacctatgcatagttatcatttctctacaaattaacctagtttagttttctgttggttccattttccttgtttgttaagttttagtagctagtttaattgtaatctcaatgattatgtggtagaatgggttggcggagctacaaaaattcctagctacttcagagacattaaatttcagacacatggtacactttatattacattttactatgctaaaataacacggctttcttttggaattctgttcagtttttcagattgtaatctcagctacatctcaacagattgttctcagatatgtcctattaccttctttgtgtagatagtgctttattgactaagaacaatgacaacaacaccttttgttttctgggaataggagaaaagttttaagccaaaactcttaattgcttatctgctccacgtgaggtatgaactatcaaacttaggagccatctagcttacacgtgttccttaaaaagtttgctgtaggccgggcacagtggctcgtacctgtagtcccagcacttttgggagcccagggtgggggatcacttgagctcaggagttcaagaccagcctgggcaacatggcaaaacgccatctctacaaaaatacaaaaaaaaaaaaaaacgctgggtgtggtggcgcacaactgtagtcccagctacttgggaggctgaggtgggaggattgcttgagcttgggaggtgaaggctgcagtgagccttgacagtgccactacactccagcctggatgacagagtgagaccctgtctcaaaaaaaagagtttgctgtaattcccagcaacaaagtaggagactcaaactaaataattttctatagtcctagaacttcttagtttacaaaacatttttacttctgttatctcatttgatcttcatacccatgtaaggttgaggtagatgttaccacatgtgagtgcaatatccagaactcctgaatccccttcttcccctaaaatgtcagcccgctgaggtccacttggctaccctcttgaatactgcatccagcttcccactgctgaacctctttactctttttttttcagttgcacttaccaccttctagtaagttgaaccatatgaaattaccatttttgcaggtaaaaaatggccggtgataggcagtttggcgtcgtataacccaataacatgttatataatttacccacaagtggtgggttgctatgtcctggaggagtcagcttcagactctagctaaatgattgtataaccttgcagctctcccctaagtgaggaggcaatgttgaaagtcccatgtcttatcagaaccagggaggcagatgagaaactgccttatggcagctcccacaacatagggaggtgggtgacaaatggccttgggacagcttcttcccaagactggttatgttacagtgttcctgggaggatcacatggcattcctccaagatgggtcagactgctgttggccttgtctgtgtggcgtatgtgaagacattcatggcagagctgttcccttagaagcatctactaaattgatcttttcctttcttacttactgtctgtctcccttagtaggctgtcagctccgtgagtgcaggaccttgccagtcctggtcactgctatatccccagcacctacaagagtgcctggaaaattgtagtgctcaataaatatttgttggataaatgatagaatgataggaagttaaaaagcaattaaaatacttgaaaagaagcaaaacatttttcatgttaagcaaaaaaaaaaaaaaaacttattaaggatagctaacatgtattgaattctatatgcaatggaatgatacttagcgcctttgaatccttatgataaccctataaggtaggttgtttgggtttttttaattgtcccaactttacagatgaagaagtgcaggtccagagaggtcacataatttgcccaggatcacacagctagtaagtagcagatgaggaatttgaacccaggcagttgtattccaccatctgccctcttagttcattgccacttaacctataatgcccagctcttgtgtagaaattaatacactgataacatagaggaaaacattaagctcattgaatgtaataagtccagatgacttgtacattaaacacagctttttgaggtcacagctgatctctaagaatgtaaactgatttcctctggcactaaaaagcattttcaaagactgttaagagagtttctccaacattctcttcagatttttctgctggcttattttatgattctgtggacagcttcagacaaaataactttctggtatgaaggattgtgtttactctgcttttttttttgttgttttttgggttttttgttttgttttgttttgtttttgagacagtgccttgctctgctgctgcccaggctgagtgcaatggcatgatctcggctcactgcaacctctgcctccctgggctcaggccaggtgtatgctaccactctcagctaatttttaatttatttttttagagatacggtcccactctgtttcccaggctggtctcagaactcctgggctcagacagtcccccgccatggcctcccacagtgctgggattacaggcatcagccaccatgctcagcttgttctgccattttcaaatgtgaattttatagacactttaaaccacttgaaagagtgatgatgttttaatgattttcattattatttgcaacttcaagcattaaacactgccaaattaagtttcaagttttctctttacacaatatggatgtacttcataatggacttcctcatcatgattaatgagtgaagtgacattcaaacttggtagcttttcagtagaacttcctttcccaacattttttctgttcctttaattatggcaatatctgagagctctgaacataagtcaaaggtttgattatttttcatgtggcttcctctgcttggaactttctgccccgcatcttcccgttgccccctgtgtcctcttgtcatgcccctacccttttttgagtgtgtctattttctggcactacaagacataacaggctcatcttgtgttttccctaccctgacccagaatcagccattacttcaaggagccctggttccattattggagaatactattagaaaccaggatctggtgctaggcatgctcatttctattggagtgtcatacaaacaatttgtaaattgtttgtaggtcctcccagtggataggattaggaaataaaacatgcatactaaccatgcatacacacacatctacgtctatttctgtatctgtctgtatacatattaaaataaacatgggttgataactaatgtttctgctgtaatccacagccttcatcctagcctgccactcttcttctttttagctttttcaacagtgggaaatgtggctcttgttatgtacactttattcacttatttgtttgaccctagtatcataaagtagttccgtatgcctgtaacagatcgactaactagagtccattatttgcggaaagatctttttgtccgaagcgttaccgcaggggtgtccaatcttttggcttccctgggccacactagaaaaagaagaattgtcttgggccacacgtaaaatacactaacactaacgatagctgataagctaaaaaaaaaaaatcaaaaaaatttcatgatgttttaagaaagtttactaatttgtgttgggccacgtttaaagccatcccgggtcgcaggttggacaagcttgccttacagtatccagtcaaaataatgttttccaaaattacttcttttctttttcatccctttcagtgtggccgttatttataatgcagtttggttcattagtgtttttattacaaatacaccctcagccttcatatcctagttttaatgaattattacggtgaaacataataagagtcagagctatacagaaaggtctactcagaggtgctttgttccctcctattctgttcccactactcctactttccactgaccctgtaagcatcatatttatttttaatggcagttacatttttaccaagtgcttactatctgtaggcacttggtgtgtattgcttcttttggtgttcacagcaacctcttgaggtaagcactattattatcccccctttttcttttttctttctttctttcttttttttttttttttttttgacagtcttactctgttgcccaggcaggagtgcagtggcgcaatctcggctcactgcaacctctgcctcccaggttcaagtgattctcctgcctcagcctcctgagtagctgcgagtacaggcacaagccaccacgcccggctaatttttgtatttttagtagggatgaggttttgccatgttggccagggtggtctcgaactcctgacctcaggtgatctgcccgcctcgacctcccaaagtgctgggattacaggcacgaaccactgcacccggctattatccccattttttagatgagaaagctgaatcccagagagcataagaagcttgtccagagtgacatctctgatgcataaccagtactcaaacctatttttctgacaccaaggcctgtgtgtaaactgtaaaggggctgcttggcacctactttcctaaagttgtcctatcccttctctgtctgggtcttcctgaagcttggcacttctgaagtcacctctctgaaaacattctggtaactgttaaatcccttgttctagctattcatgtgttctgtgtggttaaacaaggttcacaatgggccacctggcctttggaacttgggtgaagaggctgccttcagttgatcctccccactcccattttcaaaacatgggtttacatgagttatttgtgaattaggaaacataaccatgttttgagccttcatagaaaacaaacgtctggggtcatacaggttaaaaggagtaaccaaattcggcactatcattgttctattcagtagacaattctggggcctttctgtgtctcaggttctgtactagttgtttcaggactttgggataaatacaaactatccctgccctcagggggcttaaggtcaggtgtacaagtgactctaatgtgaggcaaggctggattcagtgctgcatatctaatgctatgggaattcaaagaggaagtgatcagaatgagaagggagggatggatcattccaggagaagcttcagggaaaagcaacatttaaaatgagacttttgagagtgagggaaatttggacaggtggatatagaggatgcaaggctagaggaaaggttttagccagaaagtctgcttgggcaaatgcctgggtaaaaaaagaaaatccactttgggaggacaaggcgggcaatcgcctgaggtcaggagttcgagaccagcctggccaacatggtgaaaccccgtctctactaaaaatacaaaaattagctgggcgtggtggtgggtgcctgtaatcccagctacttggaaggctgaggcaggagaatcacttgaacccaggaggcagaggtttcagtgagccgagattgcgccactgcactccagcctgggcaacaagagtgaaacatctaaaaaaaaaaaaaagaaaatcacagggcagtgtggggaatggtgagtattctaatttggttgtggcagagaggatgtagaaggaagtgataagagagaaagccggataggagggcctttgtgccagttaggatgttctagacttccagccaggttgcccagctcaaactggcttaaacaatgagggggtttattggctatgtaattgggaagtgcagaggtagctcaggccagatcagtttgatccactgctccattatgatgtcaaagacccatgcgatttccacctcattattctgctgtccatagagccaacttcatcctaaggccagtccttgtggtcagacaagggctgccaatagtaatctgggtgcaagtttctttgagaaaatctttctgtgtcaactctcttaaaaggggtgaaaaatctctccttaagtcccactggccagaatgggcccatgcacccatttcttaaccagtcactggcaactgggggtgggattgccgtttgcccaatcaggtccatttctggagctaagattaaactccatttcccttgggacacattgaacagaatcagaattcgatgaagaaggaagaagcggagaattggtttggtgttgggtaggcaaccaaaaataacctctgttgcctcaagtgccaagaaagtggtgttttgtgcttgttagggtaaaaatggggatcatggaaaatattttaagtttcatagaccaaaaaatattccagtgtttcatcaaatctaagaggctatcaattataagatataccattattttatgtaccaccaaggaagaaaaaatgctgccagtgaagttaggatgtattgcaggttgggttctctgggaagcaggctgaaaaggaggtgagaatgcaggacatttatgggagaacacccttgggattaatactggaggaggagaaccaagcagggttggtggggcacagggagaagttgggatgccatgcagtcacaacaaaggcctcagccaaccccacggggagctcgagaagctgagatggcccttcagtgttgccctgccttgtggtgagtgaattgggtcttcatatccccatgttgactggtcattggatgtgggctcccttaggaatgggcatctcttcagcagaggtagctttcttcaaaagaggtgattccaaagagtcacccactcactgagggctgtctgctggcagcattctcagccactactcaaagatgacctgtccaggaaggggaacctaggtggcatgacacattgtctattacaacatgctactgattataagagccgggaggtggggggcaacacaatgtctgagatattaaaatggaagtctcttagaagaaatggataattctataattatagttaatcagaaaggggaagaagtggggaaatggaccaagggcctgagagagaaaacagacgcaacaggccactagaaagataggacactggagggtgggaagccctagcagtttcttccagggtgggctgggcacggtggctcattcctgtaatcccagaactttgggaggccgaggcgggcagatcatttgaagtcaggagttggagaccagcctggccaactcctgtttcaccctgtctctgccaaaaatataaaaaattagccgggtgtggttgcatgcgcctgtaatcccagctacttgggaagctgaggcaggagaatcgcttgaacccaggaggcagaggttgcagcgaggaaaaatcgtgccactgcacttgagcctgggtgacagagtgagactgtctcaaaaaaaaaaaaagtttcttccagggtggcttctgtgccagagtcaggtgccccagctacctctaatttatggtcctcctgcactgggaaacagattttctacttttggtttcatgataaataacatttccccctgattttaaaagttatggatttggctgggcatggtggctcatgcctgtaatcctagcactttgggaggtcaaggcaggcagatcacttaaggtcaggagttccagaccagactgggcaacatggtgaaaacccgtgtctaccaaaaaaaaaaaaaaaaaaaaaattagccaagtgtggtggtacatgccagtagccctagctactcaggagactgaggtgggaggattacctgagcccaggagatcaggcctgcagtgagctgtgattgtgccattttactccagcctgggtgacagagtaagaccctgtctcaaaaataatagtaataggctgggcgcggtggctcaagcctgtaatcccaacactttgggaggccaaggcgggcgatcaattgaggtcaggaactcaagaacagccttgccaaaatggtgaaactccgtctctactaaaaatacaaaaatgagccgggtgtggtggcgcatgcctgcattcccagctactcaggaggctgaggcaggagaatcgcttgaactcgggaggcagaggttgcagtgagccgagattgcaccactgcactccagcctgggtgacagagtgagactccatcttaataataataaaataataaaaattttaaaaagttatggatctggatggagggaaatggaatgtataaaagaagtaaacatacacaagaagatacaaatacagaataaaagtaaaatgcaaccatcatcccactaccccgataccagggtatccgtttttacatcttttctttcattctttctgtctttatataattgtataaatgctgcataaacctcctcttgcctgctgcctcctcaaagacctccctccctccttcactgcccttctgctcctggagagccaccctctctccatttatccttcctatcagcttcaggttcttaccatgttaacaaaaagaaaatcttataagcctgtcactctctacatacgccgcacctcctttcattcatagcctttaaaacatatatatagcagttattgtggttatttttctgttcacaaaataaaaaaacactctttctagaaaactggaatatagaggcaagctttttttttttttcagacggagtttcgttctgtcgcccaggctggagtgcagtaacgaaattacagcttactgtaacctctgcctcctgggttcaagatattctcttgcctcagcctcctgagtagctgggattataggtgcctgccaccacacccggctaatttttgtatttttagtggaaatggggtttcgccatgttggtcaggctggtctcgaactcctgaccttgtgatctgcccatctcggccttccaaagtgctgggattacaggtgtgagccactgcaccctgccgaggcaagatttttttttttttttttaagaaaacccagttattccattacccaatgaaactctaaacatgttgatgtacatccttccaaaatttctttttatgacaacatgctttttatttttaattatttttattttattttaaggtccggggtacatgtgaaggatgtgcaggtttgttacataggtaaacgtgtgccttggtggtttgctgcacctgtcaacccatcacctacgtattaagccccacatgcattagctattgatcctgatgctctctctccctgctggctccccagcaggccccggtgtgtgttgttcccctccctgtttatgagaacactttcttgacataaagatttcatttattcccatggaattctaaaggcttttcatacttgtgaaggaataatagtttagaaataaactgaactttaaaagataccattttgaaaaataatatacagccatcaaaaattatatttatgggaactatgcaataatattaaactctatcatctgttgactgcctcctatattccagaaactttacatacaccaattctaatccttacaagaacgctgtgtaggctttagcattagatggaccaggtttcaccaactgtatggtcttggataagtacccaacctcctgtccctaagtttcctcacctgtgaaaacacggtttctaccagctttcaaataagatgatcaatataaggcacttggaacagaacctgacacatcataagcactctataaatgtctattatcaccaaataattccaggtgccttgaaaatttaaatgaaaaacaaaatcaaaccatgacaatactagaagcaaatttaggtgaacacttttctaatccgggggtgggcgggggctggggggaggcagggagaagaccttttttttttctttttgagatggagtcttgctctgtccccaagctggagtgcagaggcgtgatctcagctcactgcaacctctgcctcctggattcaagtgattctcctgcctcagcctcccgagtagctgggactatacaggtgcacaccaccacggccagctaatttttgtatttttagtagagatggggtttacaccctgttagccaggatggtctcaatttcttgacctcgtgatcccatccgcgttggccttccaaagtgctgggattaccagcatgagccaccgtgcccggctgggagaagacctttctaagcatgataccaaaggcagagacaataaaggcaaagaattgacagaattcactatccgataaaaatcacttctgtggccgggcgcggtggctcacacctgtaatcccagcactgggaagccgaggtgggcggattgcttgaggccaggagttcaagaccagcctggccaacatggcaaacctcctgtctctactaaaaatacaaaaaattagctaggcatggtggcatgcctgtagtcccagctactcaggaagctgaggcatgagaatcacttgaacctgggaggtagaggttgcagtgagccaagatcatgccactgcactccaacctgggtgacaaagtgagactctgtctcaaaaaaaataacaattaaaataaaatcacttctgaatggtggaaagcaccacaaagttagaggtcaagcaataatttggagaaaagaattagtaatttgttggacagacaaaagacttttttaatataacaaaaactttaaaaattaaaaaaatacacattcgaggacattttcctaaaaacacaggcaaaggacataaacagcaaagcaagaagacagcttgatgtggccattttatccagggggacattttggtgagccctatggacacagctgccatgatgccaacaatgtgacagctgtccccttcaaaatgcgttagccccagctcttcctctcccccaacctccagtccaaaggacttgcactttctactttactcctttctgcattgtttaattttcttttacaaatatgttacttgtcatcagaaaaaataaagaaataaataaactgttagagtgttagccccttaaaggggagcaagaatcacctttctaaaagaaagtttatgttaaatataatattagcatatgtgaatcctgagagaaaagttaacagtttagttgagttatttcctctgtagtctggagctaaaaatagggaatcttattctgtcctaaatcttttccttcctccacccagtgtctgtctggatcgaattcattcattcactcagtaggcactcactcagccaggcatggtgctaggcctcaggacctcgctgtgaaccagaaactgtccctacccccatggtgcaggcattctgcttgggagttggaggaggaacaggtaaaaaataattaaatattcaggttaacgatatattgtcaggtttgaggattgaggaaagggcgcagagagtggcaagggctgctgttttagatacagtggccaggaggcctccgatgaggtgacctttgaggagagacatgcaggagatgaggggacagtgaagaggatttctaagaacactccaggcagacagaacagcgacagccaaggccctgaagtgggtaggggcctggtgtgtgtgaggaacctcaggattgccatcatggctggagcagagacatgaagcaagaaggccatggagatgagggcagggagatcccggagtggggagatcagatggggctctgtgtatcatgcaaaggactttgcattctgttccaagagctgggaaggttgacataattaggaaaaaagcccagaaaagcagaggtatccatttttcatggtaaagatgataatttcaattaaaacacgattcctggatatatgtaatttgtaggccaaatggtgcccaatccctacctccctcaccccctcacttccctatccctaaaacctgtacctcaactcccgttcgtaagtgatgggagttaggaatagagaaatctcccggttgggttttctgagcaaagaggtaacatagcagct

SEQ ID NO: 42 - DNA, 64524 bp, Homo sapiens
agctgctatgttacctctttgctcagaaaacccaaccgggagatttctctattcctaactcccatcacttacgaacgggagttgaggtacaggttttagggatagggaagtgagggggtgagggaggtagggattgggcaccatttggcctacaaattacatatatccaggaatcgtgttttaattgaaattatcatctttaccatgaaaaatggatacctctgcttttctgggcttttttcctaattatgtcaaccttcccagctcttggaacagaatgcaaagtcctttgcatgatacacagagccccatctgatctccccactccgggatctccctgccctcatctccatggccttcttgcttcatgtctctgctccagccatgatggcaatcctgaggttcctcacacacaccaggcccctacccacttcagggccttggctgtcgctgttctgtctgcctggagtgttcttagaaatcctcttcactgtcccctcatctcctgcatgtctctcctcaaaggtcacctcatcggaggcctcctggccactgtatctaaaacagcagcccttgccactctctgcgccctttcctcaatcctcaaacctgacaatatatcgttaacctgaatatttaattattttttacctgttcctcctccaactcccaagcagaatgcctgcaccatgggggtagggacagtttctggttcacagcgaggtcctgaggcctagcaccatgcctggctgagtgagtgcctactgagtgaatgaatgaattcgatccagacagacactgggtggaggaaggaaaagatttaggacagaataagattccctatttttagctccagactacagaggaaataactcaactaaactgttaacttttctctcaggattcacatatgctaatattatatttaacataaactttcttttagaaaggtgattcttgctcccctttaaggggctaacactctaacagtttatttatttctttattttttctgatgacaagtaacatatttgtaaaagaaaattaaacaatgcagaaaggagtaaagtagaaagtgcaagtcctttggactggaggttgggggagaggaagagctggggctaacgcattttgaaggggacagctgtcacattgttggcatcatggcagctgtgtccatagggctcaccaaaatgtccccctggataaaatggccacatcaagctgtcttcttgctttgctgtttatgtcctttgcctgtgtttttaggaaaatgtcctcgaatgtgtatttttttaatttttaaagtttttgttatattaaaaaagtcttttgtctgtccaacaaattactaattcttttctccaaattattgcttgacctctaactttgtggtgctttccaccattcagaagtgattttattttaattgttattttttttgagacagagtctcactttgtcacccaggttggagtgcagtggcatgatcttggctcactgcaacctctacctcccaggttcaagtgattctcatgcctcagcttcctgagtagctgggactacaggcatgccaccatgcctagctaattttttgtatttttagtagagacaggaggtttgccatgttggccaggctggtcttgaactcctggcctcaagcaatccgcccacctcggcttcccagtgctgggattacaggtgtgagccaccgcgcccggccacagaagtgatttttatcggatagtgaattctgtcaattctttgcctttattgtctctgcctttggtatcatgcttagaaaggtcttctcccagccgggcacggtggctcatgctggtaatcccagcactttggaaggccaacgcggatgggatcacgaggtcaagaaattgagaccatcctggctaacagggtgtaaaccccatctctactaaaaatacaaaaattagctggccgtggtggtgtgcacctgtatagtcccagctactcgggaggctgaggcaggagaatcacttgaatccaggaggcagaggttgcagtgagctgagatcacgcctctgcactccagcttggggacagagcaagactccatctcaaaaagaaaaaaaaaaggtcttctccctgcctccccccagcccccgcccacccccggattagaaaagtgttcacctaaatttgcttctagtattgtcatggtttgattttgtttttcatttaaattttcaaggcacctggaattatttggtgataatagacatttatagagtgcttatgatgtgtcaggttctgttccaagtgccttatattgatcatcttatttgaaagctggtagaaaccgtgttttcacaggtgaggaaacttagggacaggaggttgggtacttatccaagaccatacagttggtgaaacctggtccatctaatgctaaagcctacacagcgttcttgtaaggattagaattggtgtatgtaaagtttctggaatataggaggcagtcaacagatgatagagtttaatattattgcatagttcccataaatataatttttgatggctgtatattatttttcaaaatggtatcttttaaagttcagtttatttctaaactattattccttcacaagtatgaaaagcctttagaattccatgggaataaatgaaatctttatgtcaagaaagtgttctcataaacagggaggggaacaacacacaccggggcctgctggggagccagcagggagagagagcatcaggatcaatagctaatgcatgtggggcttaatacgtaggtgatgggttgacaggtgcagcaaaccaccaaggcacacgtttacctatgtaacaaacctgcacatccttcacatgtaccccggaccttaaaataaaataaaaataattaaaaataaaaagcatgttgtcataaaaagaaattttggaaggatgtacatcaacatgtttagagtttcattgggtaatggaataactgggttttcttaaaaaaaaaaaaaaaaatcttgcctcggcagggtgcagtggctcacacctgtaatcccagcactttggaaggccgagatgggcagatcacaaggtcaggagttcgagaccagcctgaccaacatggcgaaaccccatttccactaaaaatacaaaaattagccgggtgtggtggcaggcacctataatcccagctactcaggaggctgaggcaagagaatatcttgaacccaggaggcagaggttacagtaagctgtaatttcgttactgcactccagcctgggcgacagaacgaaactccgtctgaaaaaaaaaaaaagcttgcctctatattccagttttctagaaagagtgtttttttattttgtgaacagaaaaataaccacaataactgctatatatatgttttaaaggctatgaatgaaaggaggtgcggcgtatgtagagagtgacaggcttataagattttctttttgttaacatggtaagaacctgaagctgataggaaggataaatggagagagggtggctctccaggagcagaagggcagtgaaggagggagggaggtctttgaggaggcagcaggcaagaggaggtttatgcagcatttatacaattatataaagacagaaagaatgaaagaaaagatgtaaaaacggataccctggtatcggggtagtgggatgatggttgcattttacttttattctgtatttgtatcttcttgtgtatgtttacttcttttatacattccatttccctccatccagatccataactttttaaaatttttattattttattattattaagatggagtctcactctgtcacccaggctggagtgcagtggtgcaatctcggctcactgcaacctctgcctcccgagttcaagcgattctcctgcctcagcctcctgagtagctgggaatgcaggcatgcgccaccacacccggctcatttttgtatttttagtagagacggagtttcaccattttggcaaggctgttcttgagttcctgacctcaattgatcgcccgccttggcctcccaaagtgttgggattacaggcttgagccaccgcgcccagcctattactattatttttgagacagggtcttactctgtcacccaggctggagtaaaatggcacaatcacagctcactgcaggcctgatctcctgggctcaggtaatcctcccacctcagtctcctgagtagctagggctactggcatgtaccaccacacttggctaattttttttttttttttttttttggtagacacgggttttcaccatgttgcccagtctggtctggaactcctgaccttaagtgatctgcctgccttgacctcccaaagtgctaggattacaggcatgagccaccatgcccagccaaatccataacttttaaaatcagggggaaatgttatttatcatgaaaccaaaagtagaaaatctgtttcccagtgcaggaggaccataaattagaggtagctggggcacctgactctggcacagaagccaccctggaagaaactttttttttttttgagacagtctcactctgtcacccaggctcaagtgcagtggcacgatttttcctcgctgcaacctctgcctcctgggttcaagcgattctcctgcctcagcttcccaagtagctgggattacaggcgcatgcaaccacacccggctaattttttatatttttggcagagacagggtgaaacaggagttggccaggctggtctccaactcctgacttcaaatgatctgcccgcctcggcctcccaaagttctgggattacaggaatgagccaccgtgcccagcccaccctggaagaaactgctagggcttcccaccctccagtgtcctatctttctagtggcctgttgcgtctgttttctctctcaggcccttggtccatttccccacttcttcccctttctgattaactataattatagaattatccatttcttctaagagacttccattttaatatctcagacattgtgttgccccccacctcccggctcttataatcagtagcatgttgtaatagacaatgtgtcatgccacctaggttccccttcctggacaggtcatctttgagtagtggctgagaatgctgccagcagacagccctcagtgagtgggtgactctttggaatcacctcttttgaagaaagctacctctgctgaagagatgcccattcctaagggagcccacatccaatgaccagtcaacatggggatatgaagacccaattcactcaccacaaggcagggcaacactgaagggccatctcagcttctcgagctccccgtggggttggctgaggcctttgttgtgactgcatggcatcccaacttctccctgtgccccaccaaccctgcttggttctcctcctccagtattaatcccaagggtgttctcccataaatgtcctgcattctcacctccttttcagcctgcttcccagagaacccaacctgcaatacatcctaacttcactggcagcattttttcttccttggtggtacataaaataatggtatatcttataattgatagcctcttagatttgatgaaacactggaatattttttggtctatgaaacttaaaatattttccatgatccccatttttaccctaacaagcacaaaacaccactttcttggcacttgaggcaacagaggttatttttggttgcctacccaacaccaaaccaattctccgcttcttccttcttcatcgaattctgattctgttcaatgtgtcccaagggaaatggagtttaatcttagctccagaaatggacctgattgggcaaacggcaatcccacccccagttgccagtgactggttaagaaatgggtgcatgggcccattctggccagtgggacttaaggagagatttttcaccccttttaagagagttgacacagaaagattttctcaaagaaacttgcacccagattactattggcagcccttgtctgaccacaaggactggccttaggatgaagttggctctatggacagcagaataatgaggtggaaatcgcatgggtctttgacatcataatggagcagtggatcaaactgatctggcctgagctacctctgcacttcccaattacatagccaataaaccccctcattgtttaagccagtttgagctgggcaacctggctggaagtctagaacatcctaactggcacaaaggccctcctatccggctttctctcttatcacttccttctacatcctctctgccacaaccaaattagaatactcaccattccccacactgccctgtgattttcttttttttttttttagatgtttcactcttgttgcccaggctggagtgcagtggcgcaatctcggctcactgaaacctctgcctcctgggttcaagtgattctcctgcctcagccttccaagtagctgggattacaggcacccaccaccacgcccagctaatttttgtatttttagtagagacggggtttcaccatgttggccaggctggtctcgaactcctgacctcaggcgattgcccgccttgtcctcccaaagtggattttctttttttacccaggcatttgcccaagcagactttctggctaaaacctttcctctagccttgcatcctctatatccacctgtccaaatttccctcactctcaaaagtctcattttaaatgttgcttttccctgaagcttctcctggaatgatccatccctcccttctcattctgatcacttcctctttgaattcccatagcattagatatgcagcactgaatccagccttgcctcacattagagtcacttgtacacctgaccttaagccccctgagggcagggatagtttgtatttatcccaaagtcctgaaacaactagtacagaacctgagacacagaaaggccccagaattgtctactgaatagaacaatgatagtgccgaatttggttactccttttaacctgtatgaccccagacgtttgttttctatgaaggctcaaaacatggttatgtttcctaattcacaaataactcatgtaaacccatgttttgaaaatgggagtggggaggatcaactgaaggcagcctcttcacccaagttccaaaggccaggtggcccattgtgaaccttgtttaaccacacagaacacatgaatagctagaacaagggatttaacagttaccagaatgttttcagagaggtgacttcagaagtgccaagcttcaggaagacccagacagagaagggataggacaactttaggaaagtaggtgccaagcagcccctttacagtttacacacaggccttggtgtcagaaaaataggtttgagtactggttatgcatcagagatgtcactctggacaagcttcttatgctctctgggattcagctttctcatctaaaaaatggggataatagccgggtgcagtggttcgtgcctgtaatcccagcactttgggaggtcgaggcgggcagatcacctgaggtcaggagttcgagaccaccctggccaacatggcaaaacctcatccctactaaaaatacaaaaattagccgggcgtggtggcttgtgcctgtactcgcagctactcaggaggctgaggcaggagaatcacttgaacctgggaggcagaggttgcagtgagccgagattgcgccactgcactcctgcctgggcaacagagtaagactgtcaaaaaaaaaaaaaaaaaaaagaaagaaagaaagaaaaaagaaaaaggggggataataatagtgcttacctcaagaggttgctgtgaacaccaaaagaagcaatacacaccaagtgcctacagatagtaagcacttggtaaaaatgtaactgccattaaaaataaatatgatgcttacagggtcagtggaaagtaggagtagtgggaacagaataggagggaacaaagcacctctgagtagacctttctgtatagctctgactcttattatgtttcaccgtaataattcattaaaactaggatatgaaggctgagggtgtatttgtaataaaaacactaatgaaccaaactgcattataaataacggccacactgaaagggatgaaaaagaaaagaagtaattttggaaaacattattttgactggatactgtaaggcaagcttgtccaacctgcgacccgggatggctttaaacgtggcccaacacaaattagtaaactttcttaaaacatcatgaaatttttttgattttttttttttagcttatcagctatcgttagtgttagtgtattttacgtgtggcccaagacaattcttctttttctagtgtggcccagggaagccaaaagattggacacccctgcggtaacgcttcggacaaaaagatctttccgcaaataatggactctagttagtcgatctgttacaggcatacggaactactttatgatactagggtcaaacaaataagtgaataaagtgtacataacaagagccacatttcccactgttgaaaaagctaaaaagaagaagagtggcaggctaggatgaaggctgtggattacagcagaaacattagttatcaacccatgtttattttaatatgtatacagacagatacagaaatagacgtagatgtgtgtgtatgcatggttagtatgcatgttttatttcctaatcctatccactgggaggacctacaaacaatttacaaattgtttgtatgacactccaatagaaatgagcatgcctagcaccagatcctggtttctaatagtattctccaataatggaaccagggctccttgaagtaatggctgattctgggtcagggtagggaaaacacaagatgagcctgttatgtcttgtagtgccagaaaatagacacactcaaaaaagggtaggggcatgacaagaggacacagggggcaacgggaagatgcggggcagaaagttccaagcagaggaagccacatgaaaaataatcaaacctttgacttatgttcagagctctcagatattgccataattaaaggaacagaaaaaatgttgggaaaggaagttctactgaaaagctaccaagtttgaatgtcacttcactcattaatcatgatgaggaagtccattatgaagtacatccatattgtgtaaagagaaaacttgaaacttaatttggcagtgtttaatgcttgaagttgcaaataataatgaaaatcattaaaacatcatcactctttcaagtggtttaaagtgtctataaaattcacatttgaaaatggcagaacaagctgagcatggtggctgatgcctgtaatcccagcactgtgggaggccatggcgggggactgtctgagcccaggagttctgagaccagcctgggaaacagagtgggaccgtatctctaaaaaaataaattaaaaattagctgagagtggtagcatacacctggcctgagcccagggaggcagaggttgcagtgagccgagatcatgccattgcactcagcctgggcagcagcagagcaaggcactgtctcaaaaacaaaacaaaacaaaacaaaaaacccaaaaaacaacaaaaaaaaaagcagagtaaacacaatccttcataccagaaagttattttgtctgaagctgtccacagaatcataaaataagccagcagaaaaatctgaagagaatgttggagaaactctcttaacagtctttgaaaatgctttttagtgccagaggaaatcagtttacattcttagagatcagctgtgacctcaaaaagctgtgtttaatgtacaagtcatctggacttattacattcaatgagcttaatgttttcctctatgttatcagtgtattaatttctacacaagagctgggcattataggttaagtggcaatgaactaagagggcagatggtggaatacaactgcctgggttcaaattcctcatctgctacttactagctgtgtgatcctgggcaaattatgtgacctctctggacctgcacttcttcatctgtaaagttgggacaattaaaaaaacccaaacaacctaccttatagggttatcataaggattcaaaggcgctaagtatcattccattgcatatagaattcaatacatgttagctatccttaataagttttttttttttttttgcttaacatgaaaaatgttttgcttcttttcaagtattttaattgctttttaacttcctatcattctatcatttatccaacaaatatttattgagcactacaattttccaggcactcttgtaggtgctggggatatagcagtgaccaggactggcaaggtcctgcactcacggagctgacagcctactaagggagacagacagtaagtaagaaaggaaaagatcaatttagtagatgcttctaagggaacagctctgccatgaatgtcttcacatacgccacacagacaaggccaacagcagtctgacccatcttggaggaatgccatgtgatcctcccaggaacactgtaacataaccagtcttgggaagaagctgtcccaaggccatttgtcacccacctccctatgttgtgggagctgccataaggcagtttctcatctgcctccctggttctgataagacatgggactttcaacattgcctcctcacttaggggagagctgcaaggttatacaatcatttagctagagtctgaagctgactcctccaggacatagcaacccaccacttgtgggtaaattatataacatgttattgggttatacgacgccaaactgcctatcaccggccattttttacctgcaaaaatggtaatttcatatggttcaacttactagaaggtggtaagtgcaactgaaaaaaaaagagtaaagaggttcagcagtgggaagctggatgcagtattcaagagggtagccaagtggacctcagcgggctgacattttaggggaagaaggggattcaggagttctggatattgcactcacatgtggtaacatctacctcaaccttacatgggtatgaagatcaaatgagataacagaagtaaaaatgttttgtaaactaagaagttctaggactatagaaaattatttagtttgagtctcctactttgttgctgggaattacagcaaactcttttttttgagacagggtctcactctgtcatccaggctggagtgtagtggcactgtcaaggctcactgcagccttcacctcccaagctcaagcaatcctcccacctcagcctcccaagtagctgggactacagttgtgcgccaccacacccagcgtttttttttttttttgtatttttgtagagatggcgttttgccatgttgcccaggctggtcttgaactcctgagctcaagtgatcccccaccctgggctcccaaaagtgctgggactacaggtacgagccactgtgcccggcctacagcaaactttttaaggaacacgtgtaagctagatggctcctaagtttgatagttcatacctcacgtggagcagataagcaattaagagttttggcttaaaacttttctcctattcccagaaaacaaaaggtgttgttgtcattgttcttagtcaataaagcactatctacacaaagaaggtaataggacatatctgagaacaatctgttgagatgtagctgagattacaatctgaaaaactgaacagaattccaaaagaaagccgtgttattttagcatagtaaaatgtaatataaagtgtaccatgtgtctgaaatttaatgtctctgaagtagctaggaatttttgtagctccgccaacccattctaccacataatcattgagattacaattaaactagctactaaaacttaacaaacaaggaaaatggaaccaacagaaaactaaactaggttaatttgtagagaaatgataactatgcataggtttttttaaagagacaggacttattttaaggatttttaaattgaattcataaagcagttaaatttttgggaatttattgatttgcatttaaaagggaactgctgacaaagattcactggtaataatttgaacaagttggaaaatacagtcaacattactgaaacactactaaaataattccaggacagaacaaaacttcttagatgctgtctttgatgtgaaaattgactgcttcttacttttctaacacacggtggtataattaacaatattcaatcacttctattctttcctgcatatataaaaattaaaataccaattaaaaaactaatatatcttctctttatttcttacagatatgagttcaatgtttcactcaatagtgctgtggtttaagagaattttttcatttacaagttaaacaacaatccgcccaaagggaactgatagtctataggctcatagtgcaaataaacagtttaggaatgcagcaactgacatttctaaagtacaaaacagataaaattcttagaagatacatgcaaaaagctctactaagcagatggccacagaactagaacattgataattttactggcgatgtcaataggactccagatgtttccaaactcaacttgaactctcatcttaggctttgtattttgcttttccagtttcactaatgacacaaacatgctataaaaaaaaatccagaaattcacatttaaaaagtatattctgaaatgaaaggcaagaatagcattttacatataagaacactattagttgtcagggttcttactaaacagagatagtactactgtattttagatcagtaacttttggggagtgtatcttttgaaaacaaagcagtagtctatcacattagtttaatttgtttcttgtttttgtttttttttttgagacggagtcttgctctgtcacccagactggagtgcagtggcacgatctctgctcactgcaagctctgcctcccgggttcacgccattctcctgcctcagcctcccgagtagctgagactataggcgcccgccaccaccccagctaattttttctattttttagtagagacggggtttcaccgtgttagccaggatggtctcgatctcctgaccttgtgatccgcccgcctcagcctcccaaagtgctgggattacaggcgtgagccaccgcgcccagtctgtttcttgtcttaatacgtagttttttgttttttgttttgttttgagacagagtcttgctctgtcacccaggctggagtgcagtggcgtgatgttggctcactgtagcctctgcctcccgggttccagtgattctcctgcctcagcctcccaggtagctgggttacaggcacacaccactacgcctggctaatttttgtatttttagtaaaggtggggtttcatcatgtttgccaggctggtctcgaactcctgacctcaagtgatctgtccggcttggcctcccaaagtgctaggattacaggtgtgagccaccgcaaccagcctcaatatgtagttttgaaagacaaatcaaggagataatttcaagcatatcaaagtgggaggccagtgtacgtggcaaaaaaagatggagtaaaaaacctgctttaggtagtgtactgttgcagtcttcctaaatcttcctcaaccatgttcataaacacatccatgggacttctgcctccagagtaagaggcaggtattcaaaggacagtgaattaaaagactaaactcgatcatttatttcttacttatgaccacatttatcatctgaaataataatgcaacaattattgtatattaaagctgttcaactatttcagccaacaagaagtgtcaccctagcctggccaggttccagttctaaggacgtctgtactagactacagctttatgtgactaatgggaaccatcagtctgttcaaattatgaggtgctggaaggagaaaacaattctctttcctaaatttttatgcgtgttttgaaaaatgagtgagaaaaagaagcaattacttacattcaaatccctgaagtattcattatagtcaagggcatatcctacaacaaacttgtctggaatttcaaatccaacaactaaaaagaatcataattcatcatttagataaagaaaacatcacttttaaatctaatactggcaaatgtgcctctctacaaatattctctaagcaattataagccatttcacataaaactcttttaggttaaagatggttaaatgattgacaaaaaaagtaattcacttacagtctggcttatatccaacacttcgtggggtccttttcaccagcaagctgttaattacaaaatgtgacatataacatacagagagactacagggcattacaaaagagaagactgacgtttctaaacactgtttcatttcatccgtgctgagtgtaccatggtcacttttaacacacccaaggaaagactatgaaatggagagctaaattatggggattactaggaaggggcagcaatgagttgacactacagacaaggcacttggttgatcacctggaacctgaaggacagttctgagacctgcaccctgactacccatgtgtccattgaaggggagctaataaggaggattaatgggtacagagtgtcaatgagcaaagatgaaaagggctctcagtctagaaaccttggaaatacaatccctaaactataaaagggtgtgggagaggtgagcatcaccttttatcacaacattctttttttttttttttagacggaatctcgctctgttgcccaggctggagtgcagtggcgcgatctccgctcactgcaagctctgcctcctgggttcacgccattctcccgcctcagcctcctgagtagctgggactacaggcacccgccagcactcccggctaatttttttttgtatttagtagagatggggttttactgtgttagccaggatggtcttgatctcctgacctcgtgatccgcccacctcggtctcccaaagtgctgaaattacaggcgtaagccaccgcgcctggccacaacattcttttcttttcttttcttttttttgagatggagttttgctcttgttgcccaggctggagtgcaatggctcgcccaactcaccacaacctctgcctcccaggttcaagcgattctcctgcctcagcctgccgagtagctgggactacaggcatgtgccaccacgcccggctaattttgtattttttttagtagagacagggtttctccatgttggtcaggctggtctcgaactcccaacctcaggtgatccgtccacctcggcctcccaaagtgctgggatcacaggcgtgagccactgcgcccggcctcacaacattcttttttttaaagagatgagtctcgctctgtggcccaggctgcagtgcagtggtgtaatcacagttcactgcagccttgacttcttgggctctagcgatcctcccccctcagccttccgagtagctgggactacagatgtgtaccacttcgccctggctgcatcacaacttttaataactggcttacaaagaggaactttagggtaaaacaactagtgtgccaaaagaaccagtatttatttttggaacaaaagctggaggtggtataagtcaactctaccaaaagctaattttataacccaaatgctgcctgttgaaaaatattcagccatttaaaaaaaactacagaagctgctttgaaagcctttacagatgttaaaggcagtctcaagaaaacttatgctttcataccttcctagataaatatatatgtttaaagagctggaaagggcccaaagtgatctcaacctggattgcacatcagaatcacctgggagctttaaaaaaccagaactcacctactcgggccacagccctgaccaattacatcagaattgctggagatgagacacaggcagaggttatcctggttttttaactctcaggtgattccaatgtgcagcctaagtagataaccactgacctaagccggagactccaagggatcatctaattatgtccctcatgactcttccaataaatggagagaggagacacttcaattctatttccatttagaaagaacataacaagccaatcacagcaaaaacccttctccctacctgaactcaggaatgctccagaaaaggtatcactaaactcagtgcaatctgtattaggagttcaagagaactcagcacttcatatgcctagagatctgaatgtttaataaagctccatctctaaggcatgactagagttgcatctgaagcattttccatactgtaaatgggtaaccgttcttaagaagatatatgtaaatggccaataagcagatgaaaacatgttcaacatcatcagcatcagagaaacacaaatcaaaaccacaatgagataccacatcatagccactaggatggctacaataaaaaggacagtaacaagtgttgtcaaggatgtggagatattggaaccctcatatgttactggtgtaaaacagtacatataccttgttaaatagtcgggcaattcctcaaaatgttaaacacagagttactatatgacctagcaactatatactcaagagacctgaaaacaggtattcatacttgtacacaaacattcaaatcaacattattcataaaagccaacaggtagaaactcaaatgttcaccaacagatggataagcaaaatgtgatatatttgtacaatgaaatattattcagccaaaacaagggatgaagtactgatacatgccccaacctagatgaaccttgaaaacactatgctaagtgaaagaagacaggatattgcatgagtccatttatatggaatgtccataatacacaaatctgtacggactttctgtagaaagtagattagtagttgccaggggctgggagaagggagaatgactgctaatgggtacaaggtttctttgggttccaaaatgaaatagtggtagcagatgcacaactctgaatatatcaaaaaccactggattgtacaactttaaaagagtgaattttatggtacgtgactcagatctccataaaaaaggagtatgtttacagttccagaaccagctacatatataatgtgaaaaatattactatcttccctacattctaaaacgcaattaagcagctgctcactacaatgagatcaatcacattataaccaacagtgaaacagcgctttgcagttaaaaagattttcaaatatattatctccttgactcatatagtttccctgagaaaaagatgttaataatcattcccctttaaagatgagtaaatacattcagagagattaaatatggaatagtcgctcagattaagtggcagtgaaatgcgagactaaactcccaagtccatgtgtttctcactttactgctctgcctagaacatgaaaactggaactgggtgggaaaaaccttagaagtcatctaggccatgcattctttttttttttttttttttctgagacagggtctcactctgtcacccaggctggagtgcagtggtgtgatcacagtaggccacttatactcaacagaggcgatatcacctccaaggaagccaaaactaattctcagcagggagagtggaaatattagacattacaagatttgtgaccctccaaaactcaatcctacctgaaaatcttattccttagtgtttaatttctgagtatcatataagcagcactgacgtggggttcaaagaagatacatgaaatgtatgcaagatcggtgctacaaaactatggtgaatagatgacttgggtcaagaaatgacccaagtattgtttgagcatgtcctacctgtggcaacacaaaatctctcgctcacgaaccagtctatctcaattccacagcatataccaggaaagaacaacaaaagaatacccagaggattaaagtctatgccacagtaggttgacatttaaaaccctaaagagcatgtagaaaaataagcaagtgcactgattagtttctatttggttggtgcaaaagtgattgcagtttttgccatttcataggatactagttagtgtcctataacgtatcacttatatactctcatagtacctgtcccaaatctatttaaaagaaaaactcactgataaacacttgaactggatattagaaaagcccatacagtcaaactgctgacatatgactcactagaaggcttactctgattcaaagatgctcgacagataccgtgattttttcaaaagggcttataaaaacctgttaatcacttaggaaaaagcagaagttagaacattacctgacccctacataaaaactgcagactgatcagagacttaatgtttttaatgaaattataaaaggaaaagaaaaacatattcttaaatgtttgtttgatgtcactctattaaaaacttaaggtagcaaaagcataaactgtgagccaggttccctgggttcaaatctcatctctatagcggactagctctgtacctttggacaattccctatgcctcagtaaccttatctgaaaagtgggaataataatgccaccccagagttgttgagagatgaaacgaaaatgagaaataaacacaggtagaactataaaagcaaaagtaaaacagcataggtaaggtgaggaggtgaggccgacttaataaaaaaggaagcaggcattataaaatttcactacagacacaaagaagatgcagcattcatcactcaattccaggaggtccagatcttcagggcccaccccttcctatcacttcctcacccgctttggaatccttattcttaattttgcaagggggcccaaaatcctctgccatgctattcaggacaaactgatataattagcatgctgaaaaaccaaatgttaatattaggcaaggaagtgactgtaattatgagctttattaacacatgacaaaattatttaaaaggattatatcttaagtcttatatgagattacattacttttcgaagataaaatgacagttgaaaacatttatccttaaaaagaagcaatcacttaatcccccttcaaatgaggaaaatattctgtgtcaaaatgtcatacataccttgcgaccttgaccatctttggattatactgcctgaccaaggaaagcaaagtctgcattgttttgccagtgtcaattatatcctttcaaaaaagaagacattgcatagctttaaattcagagtcacaatataaagtaccaaaacccccatgtataactgcaatactgtcattcttttcagcacagtaattctcaccaaaatctacatggagatattctggaatctatatcatctggccctcagcaagcagtaagaatgccagcccccaggactggattttgtaggtgcaggatcaatgacagcaaatttgaatatatacatgcacattttattagggagttatgatgttgtccttcattataaaaagtattttagaatttttcccataaattcaagatagagactctctcctcccaactctccaatataggtggctaacagactacactcgagaaacatgctttatactatttttaaaggcacccaaattaataacgctataaaatgactttacataaaagtgaatctcagctatttagtcaaaagtaggactctaaacaaacccatctttgttagggaaaatattttttaaaccataaccctaatgcttttcaataaaaatactctttaaaaatggaataaagcagtgtgagccatcagaaacatcatggctggagacttgtgaaaaatgcagatttctgggctgtggtaggcagaattctgatggctctcaaaattcctgcctcctttagggataaaagactttaagactttttaacaaaaaagaaaaagaaaaaaaaaattcctgcctcctggtgtacacacacagaagggttccctccccttgaatgtgaccaggatctgtgaaaataacgggatagccgctcctgtgattaggttatgtggtagactagagcaagattctcctgctggttttgaagaagtcagctgccatgttgtgagactgtcatgggctagggcatgagcctttaaatatctgggagcaacccctggccagcagccagtgagaaaacgggccctcagtcctacaatcacaaggaactaaattctgccaacaacctgaaggaactttgaagaggatcatgagtcccttgattcagcttgatgagcccctgagcagaggatacagctaacttgtactagggaagtataaaaaacatgcatgggaatgatatatatcaactttaaggataattgtcatacttctgggaatgaagggaaagaaatggggctttagttgtattatgatctttaatttctcaaaaaaaataagatcagaagcaaatatggcaaaatgttaatacttttgtgggtacgtaggtattcagcatacccttttttctgagttcaaaatattttataattaaaatgaaatgcaggccaggcacagtggctcatgcctataataccagcactttgcgaggccgaggtgggaggatggcttgaggccagaccagcctggccaacatggcaaaaccccatctctacttaaaaaaaaaaaaaactatatatatatatatgtgtgtgtgtgtgtatatatatatatgtatatatatttatatatgtgtgtatatatatatatgtatatatatttatatatgtgtgtgtatatatatatatacacacacacacatatatacatacatacatacacacacacacacacacaattagccaggcatggtggcgcacacctgtagtcccagctacttgggaggctgagacatgagaattgcttgaacctgggaggcagagtagttagtgagctgagatcataccactgcactccagcctggtgacagagtgagactctgtcttaaaaaaaataaaaattaaaattaaatgcaaaaggtccaagtgaattgaagaggaaaggggtatcaaggaaggttttgtggaggtgacgtttgagctgggtcttaaatgacttaaacatgggataagaagggagggaataaggacatttcaggtacgagaaataaggagcaaacagtggaaacaacctaacgtctgtcaaccagtgaatggataacaaaaatgtaattcagatggtatccaacttacgatggttcaacatgagatttttctgactttaggatagatttatcaaagtagtaaatccattttcaacttatgatattttcaacttcagatgggtttatcaggacacagttgaggaacacctgtctatccatacaatttggcaataaaaaggaaatgagtgcagatatactccacaacatgaatgaaccttgaaaacattaagtgagagaagccagatacaaaaggccacatattgtatgattctatttatacaaaatgtccagaataggcaaatcttatagacagcaagtaggtagatgatcagtttgctaggtgctgggggaaggggaaatggggagtgatggctaaggggattgggtttctttgtggggcaatgaaaatgttttaaaattgagcgtgataatgattgcacaatgctgcatatatatataatctatagattatatatatataaagagaggctgttagacagtgataagtgatatatatatatatatacatagagagagagagagagagagagagaggctgttagtgataagtgatcaggaaaataaaagtattgaggaggaatacgaagttgacggtgtgaaaacatgagattttatataggatggccagggaaggccttaatgagaaagtgacttatgagtaaaaacaagggatcctaaaccttagcatgcatcagaatcactcggaaacttgttaaagcatagcttgctgggcctcatcacagatattttgattcggtaggttcttgtctgatattaatacttttggtctagggaaccacattttgagaaccactgagctaaaggaagtaaaggtttcccttagtttactagctggtaaccctaggaaactgcttagcctctcggtgctaagatacaaaatactttagcacataataacacatggaaaatagtctataaattataaatattattttttatgtaccaaatattacataagacaaaatctaagcaagatatatatatatatacataaaatataagatatatatgtatatattatatatagataaatagagagagagagttatgtttagaaagaaaatacttcaaactaaaaaaagagaggtaggaagtataccattccattattggtaaaaacaaattactaagtagtctttacaaaaaaccaatctcactcctttagaacacaagcccaccattaaaactgatgcagaggaatttctctccctggcttacctttaggatggtgcatactaagttagaaaagtcataaatgttatattaaaagtaaatgtgaacttacttccacaatcaagacattctagaagaaaaagagaaatgaaaatcagtacaatgaataaaacggtatttccaattataagtcaaatcacatcataacaaccctaaggaattatccaaactcttgtttttagatgctttattatatcaaactctcctttaaacaagtggcccatctgctgggatttggaagcctgtaatactgaaattttcatcataatggaaattttaaaaacagaatttgacccacctgtttttaaaacactttcattacttaacaagaggtctaatcttgggcaagtcttgaaatttctctggccttagtttcccatgtgttaaatgaaacttgaagcagttggtctcttatagtctcctgactctaacattctaagaattatatttgtacaataactcaaaaatcacataatttaatttaccatatggactccaaaatatattttctcattaggctaaacttgatctgcattttctggatgtgtccatattcttggactacactaaaacatgataccaatgcttcctctcaccataaaccctcacttcgctttctacatttaagaattttatagctggaagagtccttaacagaaaataccatctaataattacccctcaaaatcgagaaagtcctatctgttcttatgctagttataagaatgaggcagcatttcacataatggttataaacactgccacaagaagattcatgatgtgttgtttatctgtagctctcatcatactctgtcatataactatagcattaagattttaatgttctatatattcttctaagacagtgtttaccagagtaaggcacaaaagatccactggtttgcaagaaagattagaacttttaaattttttacctcaccttgtttaatctatatttttgtatgtattttgtaacatatatattattattaccataaatcatatataatttaaaatgcatatattaggggtaaatgctcaggaaactttttataaattgggcatgcaaatacaagtttgaagactcactgttctaggtattaaaagtaaagttataaccaagtaaagcttccaccttttcatgtctcaaagcagtttattgttggaggtaagatctcttagaagcctaaacaggtccaagtacagaatgaagtaaggctagcccataacttgtggcaagcaattcatactatttctctcatgctgagctctcctcagtgaagcagctactatagacaactgcagcctattggtagcctattttacaggcaggaaaaaaattactttttattcaaagtggaactcaggacatggggagaaaatgaatacaaaaaatagggtcaatccaaaggcacacagcaaatgagtaacacagttatgtttttttcccatttgtatgaggtcccagtaaattctaagtaaactgcaaatttaataatacactaaaaaagccatgcaattgttcaaatgaatcccagcatggtacaacgagtacagacactagagtctaaaaaacaaaagaatgccattattgagtttttgaattatatcaagtagttacatctctacttaataaatgagaaaaacgaggataagaggccatttgataaaatgaaaatagccaagaagtggtattagagacttgaatacaggtattcgggtccaaagttcatctgctcaaatactaactggggaaaagagggaaaaatatttatatacatatatatctgcacacaaaaatacccccaaaagacaaaatgaggccaggcagggtggctcacacccgtaatcccggtactttgggaggctgaggcaggtggatacctgagatcaggagttggagatcagcctggtcaacatggtgaaaccctgtctctactaaagataaaaaaattagccaggcatggtggcgtgcgcctgtaatcccagctacttgggagtctgaggcaggagaatcacttgaactgggaaggggaggttgcagtgagccaagatcgtactactgcactccagcctgggcagcagagtgagactccatcacaaaaataaataaataaataaaatacaatgaaacagaaagttcaaataatcccataatcttaccaccaagaaataactttcactcgttatacttattgatttttccataataaatgtactttactgtgactatcatgaaaagaaagttattttagaaacagagaactgtttcagatcaaatctatgtagtagaacagagccattaggtgggaaagacgagatcaaactaaatctcagaaggcctaaaaggctaggtccattccagcactaaaaactgaccagacaagtaatggcttcaacagcttctaaatatggacaaagcatgctgaaagggaaggacaggtctaacagtggtatatgaaatgaacaggaggggcaaagctcatttctcctctgaagttttccaaagatgctgaggaggacattagtttgacatgaccctgatatgggacaagataatttcacagaagttttacatgttaaagttttcttatagatactcattcaagtaagcaatgaacactaaaatctaaagaaagaaaagagctttagagtcaggtctgtattcaaattcaagctctaccacttactggttctgtgactttgggcaagtcttttaaccttattaagtcttaatttcctgatttgtaaaatggggatatcgtctccctcacaggattgttgtgaaacttttatgagattaatgcctttatatttggcatagtgtaagtaaacaataactggcagcttcaaaaaaaaaaagcagtagcattccatcatttattattggttactctcaaaaagtttttcaatgtactagaagataaatattcaaataccttaatatctccattattttcaggtaaacagcatgctcctgaacaaccaatgggtcaacaaataaattaaaagggaaatctaaaaacatcttgatattaaactacatggaagcacaatataccaaaaccaatggttcacactaggagaattttaaggtacaagaaaactctttgagatttcttaaaataatagtatgtctgaatttattgagtgatttaccagaaactgttgtaagagctctacttgcattatagcacttaatcctcttaactctatggctgctattatcaacctcaccctaatcacatatgggacacagagaggttaagtaacttgcccaaggtcagagttaggaagtactaagccatgctttgaatcagttgtcaggctccggaactcacactttcagccactacataatactgctttgctatcttttaggaaactatgtgagtctacctcacatagactcacataggtttgttttttttttttttttaaaggctatcttttcccccatcaatgttttttgaaggatcccaaattagagtcccacagaggcagacagcagtacttgacaatatggacatttaaggttaatgttggattctactgtctttttactacatgacctagggaacgataattaacctagactgcttccaagggttaaataacccatttagttatactatgtaaattatctcttagtgattgattgaaagcacactgttactaattgactcggtatgaagtgcttttttttcttccctttcaagatacatacctttccagttaaagttgagagatcatctccaccaattacttttatgtcccctgttgactggtcattctagttaaaaaaaaaaaaaactatatatatatatatctacacacacatatgtatatgtatatccttatgtacacacacaaacttcaaattaaatgagaactagaagatttgagaagttagctagctaatatccatagcattatgatattctaaatgatatgaattataagaattaggtttcctgaaatgaatgactagaaaactttcaagtagagattagtaaaaattaaaaagtcctaatcggccattactgatttgatgtttttaagagtcctaaaaaatgggttacatccatttttaagtgggtagtattataacagccacccatcttcaatcacagtgatttctgaattgtgagggaagttattagcatgacaggtgtctggttctggccctgtacgattcccatgagtcaagcaaattgtaagggctggtctatatcacacccaaccccaaggatatgtccctcaaaagtctagcccaggccccgtcatcttcagcatcatctgggaaaccaggtctgattagtagtcctttaaggaatacctcttaggctcccattttactgctatcacagaatccaataaaacccttacaggagattcaatgggaaatgctcaacacccactgtagttggtggtgacaatgaccataatttggctgtgctggattcaggacagaaaatttgggtgaaagagcaggtgaacaaaagagcttcgacttgccctagcagagagcaagccataccataccacaaagccacagcaattacaacggtgcagtaccagcacagtaaatgaacaaagtagagcccagaaacagacccagaactatatgaggatttagtatacaataaagatggtatttcgagtcagtagggaaaagatgaattattcaataaatgatgtttggccaactagtaacccatttgggaaaaaataaaagtatggtccctacctcacagcatacacaaaaataaattccagacggattaaaatctaaatgtaaaaaataaagccataagtggactggaagaaaatagagaattttttttaacatccgtagaaagggtaaaaacccaggcatgacatgaaccaaaactgaagaggttctgtaacaaatacccccttttatatattgggctccaacaataagaacccataggaaaatggagaatgaacacaaatagacaatttatagaagagaaggttataaggtgtaaaattatatctatctgagaaacaaacactaaaacaatgtgattctactgttctcccacccatactggcaaaacttaagcctgataatatgctgaggggaaataagcactcttgttggtgagagtattaattggcatagcttcttttgaaaatgacatagcaatacctgttaaaattgcaaacatgcatgtcacttaatccagtaatcccacttctgggaatcaatgctacaaaaacactgacaagtatacaaagatacattcaagagtgttcactgggccgggtgcggtggcttcatgcctgtaatcccagggaggcagaggcaagacgatcgcttgaccccaggagttcaaggccagcccgagaaacacagcaagaccctgtctctcttttttttatttaaaaaataaatgttcactgtatcagttgttcacaaaaacaaaccaacatgtccattaacagggaaccatttaaattaatcaagttcatctacacaatgtaataccatgcaactattaaaaagcacctgataatccaaagcacactgagacagaataatgctattaaaaacaccaagtagtggaacactgtgttgcctatgacaccatttttattcaacatttaaacaaatttgtaacagcaattacatgagtagtgacaatggcgtttatgagacttttcacttttatgtgcttctatttttgttatgcttctatatatacatccatttattatggagtgttactttcaaaaatcacaaatgggccagtattatttggtgttgcaaggtgagcatatgacttctgatatcaacctttgcatattacttctcaatttagggaaattacagacatcccttattctaactaacttaaaacccagcatttcaaacatacagaattgatggggaaaaaaaagaaagaagaaagaaagaaaaggcaacaagcttcagatgacagtgactcacatcaaattatttataaaatctgttaaatagtgccatcttctggagatacctggtattacagtccaactccagttgatgtctttacagagacaagaggaataaaggaaaaaatattcaagaactgaaaagtatggagtcatggaaaaattgctgtgatccaaaggctacggtgataggacaagaaacaagagaactccaagcagtaagacactgctgttctattagcatccaaacctccatactcctgtttgccccaaggcttttttaaaaaatagagacaggatctcactattttgctcaggctggtcttgaactcctggactcaagcgatcctcctgcctcggcctcctaaagtgccgagattacaggcttgagtcaccatacctggctatttattttttcttaactctcttgcctggcctatagccaccatggaagctaataaagaatattaatttaagagtaatggtatagttcactacattggaatacaggtataagtgcctacattgtacatgaatggcatacatggatcaattaccccacctgggtggccaaaggaactgcgcgaacctccctccttggctgtctggaacaagcttcccactagatccctttactgagtgcctccctcatctttaattatggttaagtctaggataacaggactggcaaaggtgaggggaaagcttcctccagagttgctctaccctctcctctaccgtcctatctcctcactcctctcagccaaggagtccaatctgtcctgaactcagagcgtcactgtcaactacataaaattgccagagaagctctttgggactacaaacacatacccttaatgtctttatttctattttgtctacctcttcagtctaggtgaaaaaataggaaggataatagggaagaactttgtttatgcctacttatccgcccctaggaattttgaaaacctctaggtagcaataagaactgcagcatggtatagaaaaagaggaggaaagctgtatagaaatgcataataaatgggcaggaaaagaactgcttggaacaaacagggaggttgaactataaggagagaaagcagagaggctaatcaacaaggctgggttcccaagagggcatgatgagactattactaaggtaggaattactaagggctccatgtccccttagtggcttagtactatgtagcttgctttctgcagtgaacttcagacccttcttttaggatcctagaatggactttttttttttatcggaaaacagtcattctctcaacattcaagcaggccccaagtctaccacactcaatcacattttctcttcatatcataatctctcaaccattctctgtccttttaactgtttttctataccctgatcaaatgccaacaaaagtgagaatgttagaatcatgtatttttagaggtagactgtatctcagataaaaaaaaagggcagatattccattttccaaaatatgtatgcagaaaaaataagtatgaaaggacatatgctcaggtaacaagttaatttgtttacttgtattttatgaattcttttaaataaacacattactaaaaaaaaaactaaaggtttttgtcagttaaaaaacgacactgatgaagcacagcccttacagatcatctagtactacactgtcccatacggtagccacatgtggcaatataaattacttaaaaattcagttcctgtgttgcacaagatgtgtcaagcgctcaaaagccacatgtcactagtggctctgtaccacatagcagaaacataaaagatttccatcctcaaagaaagttctattgaacagcattgctctaattaaataaaaaataccatttagcacaacatagtaatagaaaagattgaagagtaagtgctgatacttaaaaacctggtattttctgccaggcatggtggctcatgcctgtaatcctagcactttgggaggctgaggtgggaggatcgcttaagcccaggagttctagaccagcctgggcaacagggtgaaaccccgtctctacaaaaaatacaaaaaattagctgggcgtggtggcatgtgcctgtagtcccagctacttgggaggctgaggtgggagataacctgagcctgggaggtcaagactgcaatgagatgagattgcaccactacactccagcctgggtgacagagtgagaccctgtctcaaaaaaagaaaaaaacaaaaaacaaacaaaaaccacctggtatttttaagtacactattttcaaacattcaaacattcagaagttatttcatcctatcttcatggtttccattttatgcctggtttgggattaggatctgataaaataaacgtgtgcaacagaaccacttctcatggctgtataacagatgatcaatatgtatttgctgaggaaattattcaattttcttaattttttttcacaaaatttgtggtttcaagggaccaaccttgactactacaccttcatgttctaagaatcaggggacttatataaaacctcagttacctgataaggactacatcaaagtgaaaagccatgggaaagaactagaaagtatacttttgaacctagttctgtaaagtttccttatgccacagataatacacatccccattcctgccaaattctttctctcacccctgtctatggtctcgattcaataaataggagaagggcatgaatttgctttagatagatagatagatagatagatagatagatagatagatagatagatagatagagatagacagatagagatagagacaaagatggagacagagatggaaatagagacagatttacagaagataagttctaggtaaactagtgtcaacatcaaagtggtatacctacatctaactattctggagagaaaagtatacctcaaagaaatcgactacatacagagaaaaagtttaagctgaaagctactgccctcttacatgagacactttaagaaactacttggggggcaagtgagaaaatggggagatgtagctcagaggatacaaagtagcagatatgtaggatgaacaagtctagaaatataatgtacaacatgaagtatataggtaataaaattgtgctgtatttgggattcacactaaatgagattttaagctcctcttgccaccaaaacaaaaaaaaaatgggtaactatgtgagttgagggatacgttaatttgcttcactgcagtaatcttttaaccacctatatgtatcccataacatcatgttgtataccttaaatatacagaatacaatttatttaaaataaaatactccaatattttctgcatttttaatatgttcaaagaaagtattaatttgcatctttgatgttaaacagagcctaatcaagtcactatcaagatcaacactaaagttatagctattctcttttgataccttttgagacacacacacacacacacacacacaaatacacatatgtgtttgtgtgtgtgtgtgtgtgtgtgtattttaagttatcgttttggccaggtgcaacggctgacacctgtaatctcagcactttgggagaccaaggcagaaggattgcttgagaccaggagtttgagaccagcctgggcaacacagcaagaccctatctctacaattttttttttttttaaaatagccatgggtgatggcacgcacttgtagtctcagatacttgggaggctgaggcagaggatcccttgagcccaggagttcaaagctgcaatgggccactatgccactgcattccagtctgggcaacagagcaagaccttgtctcaaaaaaaaaaacatttctaattaaagataaagagttatagttttatgaaccttgactgcaactgagggaaaatcccgtaattggcaaaatgaattctgtctgcttgcaaaacttctgactaatagagaatgaataataggaagcccatattagaggatccacatcagttaaaaagtttttccaaataagagtgactctgagttctgcagagttaaaagattgggttcaaatcaaagacttgtatgatcttgagtaagttacttaatccctctgtgactcactgttctcaaatgtaaatgaagataatttgtaactcaaaaaaataaaaatgaaaaagttttctctaagattgcaaatcctaagaataatttcattttaatatcagtcatttagtctggatacaccataatgcagactaattttccctctgcttaaggtccacacaaaaacatttccaataaaatttacttgtgtatcaacttttcctcctgaggctttgttgtttttttggtaaaaaaataaaataaaataaaataaaaataaaaataaaaaaatcactagactgggtacagtggcccatgcctgtaatttcacttagggaagccaaggcagttggattgtttgagctcaggagtttcagaccaacctgggcaacatggcaaaaccctgtttctacaaaaaaaaatgcaaaaattagtcaggtgtggtggcacacacctgtggtccccgctactctggaaagggaggtgggaggattgcttgagcccacgcagaggttgcagtgaaccaagatggcaccactgcactccagcctgggtgacagagcaagatcctgtctcaaaacaaaaacaaaaacaaaaacaaaacaacaacaacaacaacaacaaaaaaccactggccaggcacggtggctcacgcctgtaatcccagcattttgggagtccgaggcgggtggatcaccagaggtcaagagttctagaccagcctggccaacatggtgaaaccccatctcaactaaaaatacaaaaattagccaggcatggtagcaggcgcctgtaatcccagctactcggggggccaaggcaggagtatagcttgaacctgggaggcagaggttgcagtgagctgagatcacgccatcgcactccagcctgggggacaagagtgagacttcgtctcaaaaaaaaaaaatcactataaaattgaaataaattcacaacaaaggaaatacatttgtatacttaaccttctttttatttacttatttacttatttttaatattttgagatggcgtctcgctacattgcctaggctggtcttgaactcctgggttcaagccagcctcccgtcttgacttcccaaagtactgggattacaggtgtgagccaccatgctcagcccatatttaactttcactttctgaatatcacagggcagaaaaggtcatcaaatatatagtactatatttcattgctctaagatgcacattcacattttattaataatagctctaaaattgatgtattacaattgatggcaatttacatttataactggtagtgttttctttcttggcagtatgaaaaatagtgttaagtcttaaaatcagtgacatctttaatttaatgaaataggtatttggaatccccaggcaatttcccatctaggcactaggtaaataaaatcctaccaagctacttggattaagagtacgcatatgtgtgtgtgtacacagagagagaattctttagaatattctaaataaaaagtggcagtgatatttggaatgacttaaatcctttataattttctgcagttgtgttttctttcttatttttttaagacagggtctccctctgtcactcaggctggaatgcagttccactgcattccactcagtctcgaactcctgcagtctcaaactcctaggctcaagggatgctcctgcctctgcctcccaagtagctgggactacaggtgcacgccaccatgcacaactaattctttttgtgtagagagggggtctcattatgttgtctaggctggtctcaaactcctggcctcaagtgattctcccacctcgatctcccaaagcactggaattacatgtgtgccactgcacccagccgtatgttttctaataagcatgttttctttaataagaaaaatggagtttttatttccaaaaaaaaatagatgggtgtgttgacatcataatgtttctttatatattctggaaacatttaatagttcatagaatatttctttaggattagtacggatcagccagattttaactcactgtttcaaattggtcaagatcagcatgtaaaaatcatactgacatcaatgttattgatgctgcaaacaatttaaaatttccattttacagttttaccaaattaagctgcctaatgttttatatgcatatatgaatatcttacatgacaagctgctgaattattaaacagggtagaaatgctacttcaggctgggcatggtgactcaagcctgtaatcccagcaattttagaggctgaggcaggaagactgcttgagcccaggagttcgggatcagcctgggcaacacagtaagacccaatctctacaaacataaaaaaaaattagccagccatggtggtgcacacctgttagtcccagctactcgggaggccgaagtgggagaatcacttgagcccagaaggtcaaggccacagtgagctgtgatcttgctactgcattccagcctgggtgacagaatgagaccttgtctttaaaaaaaaactttacttcaaatcaacagatatttttattatttgtaaagatagggtattgctgtgttgcccaggctggtctcgaacccctggcctcaagtgattctgctgtcttggccttccaaagcactgagattacaggcatgagccatcatcaaatcaagagatattatcagaagagctttctcaatttctactgtttaacagtatatcttccttgcatagccctataaatatactaaaaagcttggaattgtatagttaaaacatgtgattattatattatataaaatataccccagtaaagccttttttaaaaaattaacatgtcggccgggcacggtggctcatgcctataatcccagcactttgggaggctgaggtgggtggatcacctgaggtcaggggttcgagaccagcctgaccaacaaggtgaaaccccatctctactaaaaacacaaaaattagccgggcatagtggcaggcacctgtagtcccagctactcgggaggctgagacagaagaattgcttgaacccgggaggtggaggttgcagtgagctacgatcatgccactgcactccagcctgggcaacagagtgagactctgtctcaaaaaaaaaaataaataaataaaataaaataaaataaaataaaataaaataaaataaaataaacatatcaataaataccaaaaaaatagtatatctacatagaatttcacataaaataaactgttttctatgtgaaaattaacctaaaaatatgctttgcttatgtttaagatgtcatgctttttatcagttgaggagttcagcttaataatcctctaagatcttaaacaaataggaaaaaaactaaaagtagaaaatggaaataaaatgtcaaagcatttctaccactcagaattgatcttataacatgaaatgctttttaaaagaaaatattaaagttaaactcccctattttgctcgtttttgcttatctaaaataacattctgcacaaatccccaaagattagtcataacgtaacaagactgattaagactgatggggatggggaaggaggctatagaagaccaaaaagataaatcataccaactctaagtacatgctttgactctaagcagcaatgtattaaaggctggccagttatactgccagcagctataatgactagaatgaagtcctactgtaaaccatcaatcaatcaatcaatcaatcaatcacttttgttgagtaaaagtctaaattttgtgtttaaacaagtctttaattcaagcaagactttaacaagttaaaaggagcttatgggtaggaagtagtgttatgatgtatgggcataaagggttttaatgggatagtgaaaatgtctataataatacttaaatggctgcccaatcacctacaggattgatgtaaacatggaaaaggtcaaaaacttgggtcactaaaatagatgattaatggagaggatgaggttgatagttaaatgtagataagtggtcttattctcaataaaaatgtgaacataaggcgagtttctacaaagatggacaggactcattcatgaaacagcaaaaactggacatttgttctaatctttgaagagtatgaaaaattcctattttaaaggaaaacagtaactcacaggaaataccaacccaacataaaatcagaaacaatagtctaaagtaataaaaatcaaacgtttgcacgatcaaattatgaatgaaattcactactaaaattcacactgattttgtttcatccacagtgtcaatgttgtgatgcatttcaattgtgtgacacaggcagactgtggatcaaaagtggtttctggtgcgacttactctcttgagtatacctgcagtcccctttcttaagtgtgttaaaaaaaaagggggatttcttcaattcgccaatactctagctctccatgtgctttctaggaaacaagtgttaacccaccttatttgtcaaacctagctccaaaggacttttgactccccacaaaccgatgtagctcaagagagggtatctgtcaccagtatgtatagtgaaaaaagtatcccaagtcccaacagcaattcctaaaaggagtttatttaaaaaaccacacacacctgtaaaataagtatatatcctccaaggtgactagttttaaaaaaacagtattggctttgatgtaaagtactagtgaatatgttagaaaaatctcactgtaaccaagtgaaatgaaagcaagtatggtttgcagagattcaaagaaaatataagaaaacctactgttgccactaaaaagaatcatatattaaatatactcacacaatagctcttcagtctgataaaatctacagtcataggaatggatctatcactatttctattcagtgctttgatgtaatccagcaggtcagcaaagaatttatagccccccttgagcacacagagggctacaatgtgatggcctcccatctccttcatcacatctcgagcaagacgttcagtcctacagaaataaaatcaggaatttaatagaaagtttcatacattaaactttataacaaacacctcttagtcattaaacttccacaccaacctgggcaatacagtgagaccccatgcctgcaaaaaaaaaaaaattagccaggcatggtagcatgtacctgtagtcccagctacttgagaggtgaggtgggaaaatcactttagtgcaggatgttgaggctggagtgaactgtgattgtgccactgcactccagcctggacaatagagcaagaccttgtctcaaaaaaatgcattaaaaattttttttaaatcttccacgtaacacatcctttgccctcatgtttcataaggtaaaaaatttgataccttcaaaaaaaccaagcataccactatcataattttttttaaatgcaaataaaaacaagataccattttcacctatcagactggcaggttctgattaaatgaaatttcttggataatatacaatattaagagagactgtagaaactgggccagtggctcatgcctgtaatcccagcactttgggaggctgggtaacatggcgaaccctgtttctacaaaataaaaatattagctgggagtggtggcgcacacctatagtcccagctactcaggaggctgaggtggaaggatcgcttgaacccaggaggttgagactgcagtgaactgtgatcattctgctgcactgcaccccagcctgggcaacagagaccttgtctcaaaaaaaaaaaaaaaagagacaaattgtgaagagaaaggtactctcatataacatcaggagtataaaatgattcaacttcttagaggaaaatttggcaataccaaaatattcaataaactctttccccttgacccagaaattccacttgaataaagctgaacaagtaccaaacatgtaaaagaatgtttcttctagtacagtcggtaagaacaaaatagtgtctatcaatagtggactggttaaatcagttatggtatctccataagacagaatgctatgcaacctttaaaatatattagatagctctagacacactaatattaaaagtgtccaataacatttaaaactatactcatacgttaaaatataaatgtatatatgtacttttgcatatagtatacatgcatagccagtgcttgagaagaaatgtgtacagaaggctgaaaggagagaactttagtcttcttgtttatggcctccatagttagaatattttataacacaaatattttgatattataattttaaaataaaaacacagaatagccagacatacaatgcaagcattcaataccaggtaaggtttttcactgtaattgacttaacagaaaattttcaagctagatgtgcataataataaaaatctgaccttgccttcatgtgattcagccccagtccattaccctgtttaggactgagaaatgcaagactctggctagagttccttcttccatctcccttcaatgtttactttgttctggtccctacagagtcccactataccacaactgatactaagtaattagtaaggccctcctcttttatttttaataaagaagattttagaaagcatcagttatttaataagttggcctagtttatgttcaaatagcaagtactcagaacagctgctgatgtttgaaattaacacaagaaaaagtaaaaaacctcattttaagatcttacttacctgtccataattagtccatgaggaataaacaccctttccaaatcctcagcataatgattaggtatgcaaaataaatcaaggtcataacctggttcatcatcactaatctgaaaaagaaatatagctgtttcaatgagagcattacaggatacaaacatttgattggattaagatgttaaaaaataaccttagtctatcagagaaatttaggtgtaagatgatattagtaactgttaactttgtaggtatgataatgaattatgtaagaaaacaacaggccgggcgggttggttcacacgtgtaatcccagcactttgggaggctgaggcaggcagactgcctgagctcaggagttcgagaccagcctgggcaacacggtgaaatcccgtctctactaaaaatacaaaaaaattagccgggtgtggtgacacatgcctgtagtcccagctacttgggaggctgaggcaggagaatcacttgaacctgggaggtgaaggttgcagtgagccaagaatgcgccacttcactccagcctgggaaacagagcaagactctgtctcaaaaaaaacaaaacaaacaaacaaaaaaacaggctgggcgcggtggctcacgcctgtaatcccagcactttgggaggccgaggcgggtggatcacctgaggtcaggagttccagaccagccttgtcaacatggtgaaacctccccccgccgtctctactaaaaatacaaaaattagccaggcgtggtggcaggagcctgtaatcccagctacttgggaggctgaggcaggagaatcgcttgtacccagaaggcagaggttgcactgagctgagatggcaccattgcactccagcctgggggacaagagcgagatttcgtctttaaaaaacaaaaaacaaaacaaaaaaccatgtaactatatgtcttagtcatcttagtcaagaatgtagaagtaaagtgataagatatggaatttcctttaggtcacaaagagaaaaagaaaaattttaaagagctaagacaaacgcagcaaaatctttatatttaataatattctaaacatgggtgatgaacatacgggtattcattatactattctctccacttttgagtatgtttgaaaatttagtaaaacaagttttaacacactgtagtctaacaagataaaatatcacactgaacaggaaaaactggcatggtgtggtggctcacacttgtaatcccagtgctttgggaggctgagacaggagagttgcttgaggccaggagttcaagaccgacatggggaatgtagcaagaccccgtccctacaaaaaactttgtaaaaatttgccaggtatggtggtgcatacctgtagtcccagctactcgggaggcggaggcagaaggaatcacttgagcccaggagtttgaggctgcagtgagctacgatcataccacagcactccagcgtggacaacagagtaagaccctatctcaaaaacaaaacaaaacaaaacaaacaaaaaaaaccacaagaaaaactgctggctgatgcagcggctcatgcctgtaatcccagtattttgggaggcccaggtgggcgtatcacctgaggtcaggagttagagaccagcctggccaacatggtgaaaccccatctctactaaaaatacaaaattagccaggcatgtggcacgcgcctgtagtcccagttactggggaggctgaagcaggaggatcacctgagcccgggaggtggaggttgcagtgagccgagatcacaccactgcactccagcctgggtgacacagcaataccctacctcaaaataaaaaagaaaaagaaaagaaaagttgctgtccccgctaccccaatcccaaatccaaacagcctctctcatctcacagtaagggggaaaaatcacccaaaaaagctaagtgatcttttgaaaacccaaactcttagaagtctaagattattatagtcaactcatgaagtgtcatcataaaagatactctaatattatttaagtagaaccacatattggttgtcttggtatgtctagcccctggcatacaaaatatttaataacactgatatggtacctgtgatgtgaaaatgtactatgagtacagctttataaatactatatatgtacctatatacagaaaaaaatacaacaaaatcataaaagcacttatctttgaaagaggagttacagcaattttatttagttctttattgctttgctatatattctaaatttttttcaatgaatatatatcacttttaaaaaaattcaatggtctttcttataaattatctttggcagcatgcgtttttatatatacatataaaatgtatgggaaatttttaaaggatacattaaattaaagcaaaatatacaaacaaaaaatcagaatacaaaaagataaaaagattgggaagggagggagggagtaaggaggaagggtgggtgggtatagagaaatataccaaataatggtaagaagtggggtcttgacactttctacactttttttaaataaaaaaaatttttttctctctcttttttttttttagagacgaagtctcgctatgttgcccaggctggtcttgaactcctgggatcaagagatcctcctgcctcagcctcccaaggtgcttggattacaggtgtgagccaccacgcctggtcactttctacactttaatatatatattttttcattttcaatgtcatttttattagttaatttataatacccattcaccattatattcaaagtctatttgaagaaataaaccagaaagaatgaaatactctagctcacatgctattcaatactaaattacctttcaaatcacattcaagaagctgatgatttaagctttggcggtttccaataaatattggtcaaaccataattaaatctcaatatatcagttagtacctattgagcatctccttttacaacctaagcattgtattaggtgcttaaatacaagcagcttgacttttaatacatttaaaaatacatatttaagacttaaaatcttatttatggaattcagttatattttgaggtttccagtgctgagaaatttgaggtttgtgctgtctttcagtccccaaagctcagttctgagttctcagactttggtggaacttcatgtattgtcaggttggcccgtaatacctgtgggacaacttcagcccctgtgcacatggccaggaggctggttgcaaacattttcaggtaggtggaccaggacatgcccctggtcatggccaggtggaggcatagtgctatacagcaggcagaagtcaatattgatttgtttttaaagaaacatgtactactttcataagcagaaaaaatttctattcttgggggaaaagattatgccagatcctctaggattaaatgctgatgcatctgctaaaccttcacatatcagaacatatttactatagaaagaatgaaaatgggacatttgtgtgtcacctatgtgaacattccaaaaatattttacaacaactaagtattttataaattttatgaactgaaatttagttcaagttctaggaaaatacaaaccttgctagatattataaaaatgatacaatatatattcatttcaggctcatcagaatatatctgttatcacttgacaagaatgaaaatgcaccattttgtagtgctttaaaatcaggaagatccagagtactaaaaatgacttcttccttgaagcttactcaccaacttcctcccagttactcactgcttctgccacaagcataaactaggacccagccagaactccttgaaatatacacttgcaacgattactgcatctatcaaaatggttcagtgcctggctacaggttctgcagatcgactaagaatttgaaaagtcttgtttatttcaaaggaagcccatgtgaattctgcccagagttcatcccagatatgcagtctaagaatacagacagatcagcagagatgtattctaaaacaggaattctggcaatataacaaattgatttccaatcaaaacagatttacataccatacttatgtcaagaagttgttttgttttattgcatcctagattttatttttttgatttatggtttactttaagcataaaaaatttgtcaatacaactcttcccaaaaggcataaacaaaaattcataaaacttgcatcacttgagatacttcaggtatgaattcacaactttgttacaacttactatatatatgcacacatatatatatatttgggtatattgggggggttctaatttaagaaatgcataattggctatagacagacagttgtcagaacttggcaatgggtacgtgcaggttcattataccaagtctacttgtagttgttcaaaatgtatcataatacaaggccgggcgaggtggctcacgcctgtaatcccagcattttgggaggctaaggcaggaggattgcttgaggtcaggagtttgtgaccagcctgggcaacagagcaagaccctgtctccaaaaagaaaaaaaataattttttacaaaataaaaacaaaatgtatcatcagacgaaattaaataagaggcaattcatttaaatgacaacttttcccagcttgacatttaacaaaaagtctaagtcctcttaattcatatttaatgatcaaatatcaaatactaattttttttttttttttttttttgagacggagtctcgctctgtcgcccaggctggagtgcagtggcgcgatcctggctcactgcaagctccgcctcccgggttcacgccattctcctgcctcagcctcccgagtagctgggattacagacatgcgccaccacgcccggctaattttgtatttttagtagagatggggtttctccatgttggtcaggctggtcttgaatttcccacctcaggtgatctgcctgcctcagcctcacaaagcagtagctgggactacaggcacccaccaccacacttggttaattcttttgtattttttttgtaaagacgggatttcaccatgttagccaggatggtctcgatctcctgatctcatgatccgcccgcctcagcctcccaaagtgctgggattacaggcgtgagccaccccgcccggccatcaaatactaattcttaaatggtaaggacccactattcagaacctgtatccttatcactaatatgcaaatatttattgaatacttactatgtcatgcatactagagagagttagataaatttgatacagctaccctcacagaacttacagtgtaatagatggcatgacatgtacatgagtaactgtgaacagtgttaaattgctatttaaaaaaaaagacggctgggcgctgtggctcatgcctgtaatcccagcactttgggaggccaaggcaagttgatcgctcgaggtcaagagttcgagaccagcctggccaacgtggtaaaaccccgtctctactaaaaatacaaaaaaaaaattagccaggcatggtggcacaggcctgtaatcccagctactagggaggctgagacatggagaactgcttgaatccaggaggcagaggttacagtgagccgagatcataccactacactccagcctgagtgacagagcgagactccgtctaaaaaaaaaaaaaaaaaaaaagatacaggttaagtgttatggtagttgaagagagaactcaaactctgtctcagaagcctcacttgcatgtggaccactgatatgaaataatataaataggtataattcaataaataggaacttcagttttaatcatcccaaacaccaaaacttcctatcaaacaggtccaataaactcaatctctataagagctagacagaaatctacttggtggcctataatcttattagcccttacttgtcccatctgatattaattaaccccatctaatatggattagttaacaatccagtggctgctttgacaggaacagttggagagagttggggattgcaacatattcaattatacaaaaatgcattcagcatctaccttgattaaggcagtgtgcaacagaatttgcaggagagtaaaagaatgattataaatttacaacccttaaagagcttatagctgggcgtggtggctcatgcctgtaaatcccagcactttgggaggctgaggcgggtggatcacctgaggccagaagttcaagaccagcctagccaacatggcgaaaccctgtctctacaaaaaatacaaaaattagccgggtgtggtggcacgtgcctgtagtcccagttacttgggaggccgaggcaggagaatcgcttgaacctaggaggtggaggctgcagtgagccgagattgtgccactgcactccacttcagcctgggcgacaagagcaagactccgtcacaaaaaaaaaaaaaaaaaaaaagcttaaaatctagtgggaaaggcatatatacatacaactaactgtatagcataataaagctcataatctgtaacaaaatctaattcgacaagcccagaaacttgtgatttaccaaaaacagttatatatacacaaaaagtaaacctagaacccaaagttacccagcaccaatgattctctccctaagcagtatcaagtttaaagcagtgattacattctactgcctagattgtaaactgagtaaaggagaccagcacctttctgctactgaactagcacagccgtgtaaaccaacaaggcaatggcagtgcccaactttctgtatgaatataagttacatctgttttattatttgtgacttggtgttgcatgtggttattatcaacaccttctgaaagaacaactacctgctcaggctgccataacaaaataccacagactgagtgacttaacagaaacttatttctcacagttttggaggctgggaagtccaaaattaaggtacctgcaaggtaggtttcaatctcaggcctcttctttggcttgaaggtcttctaactgtgtgctcacatgacctcttctaacaagctctctggtgtctctttttttttttttttcttttttgagacagagtctcactctgtcacccaggctggagtacagtggcacaatctgggctcactgcaacctccaactcccgggttcaagtgattctcatgcctcaccctcccgagtagcttggatgacaggagcccgctaccacacccagctaatttttgtatttttagtagagatggtgtttcactacattggccaggctggtctcaaactcctgacctcgtgatccacccaccttggcctcccaaagtgctgggattacaggtgtgagccactgcgcccgtcctggtgtcttttcatataagggcactaatccaatcagacctgggcccaaccctcccgacttcttctaactgtaattaccttccaaaggccctgtctccaaataccatcacactgggggttaggacttcaaaaaaggtatggggggggtgtgggaggacataaatgctcagtccataacaagcacccaacataaaaatggctagaacagatcacaaaaaaaaggtcctgtatggctttggggaagggctcaaccccaaaatatctgagagctctggaggggcctagaagtggtaaatgaatgaaaacgtggttactctccagatctgcctttcccaaatatggccattcttggctgaatcagaaatcaaaggacaggttattaattactagctctaagttacttaccatttgctgagacagttcagaaatctgactgcatctcctcagagatctagaacacagttctcaaattctaacttacttgtgatatacttgtgaatgataaaaatcgctacaggtacttttattaatctgaaagagtattgagaaattacctttcattctgacttttgtctggaatgaaaatcaatacttttgctataatcgattactgaaataattttactttccagtaaaactggcattataattttttttaatttttaaaacttcataattttttgccagactgacccatgtaaacatacaaattactaataattatgcacgtcacatctgtaataatggccttcatgtaaacatttttgtggtttacacataaaatctctaattacaaagctatattatctaaaattacagtaagcaagaaaattaatccaagctaagacaatacttgcaacatcaattcatcatctgtgacaaggactgcttaagtctctttgtggttaaaaaggaaaaaaaaaaaaaagacatgttggccagatgcggtggctcacacctgtaatcccagcactttgggaggctgaggtgggcggatcacccctggcctgcccaacatggtgaaaccccgtctctactaaaaacacaaaaattagctgggcgtggtggcgggcgcctgtaattccagctactcgggaggctgaggcaggagaattgctagaacccaggaggcagagattgcagtgagctgagattgcaccattgcactacagtctgggcaacaaaagtgaaactccatcttaaaaaaaaaaagacaatgttcgtgggtccaaacaagacttaatggaagtgagtctaaaaatgagctatgtgggccaggcgtagtggctcccacctgtaatcccagcactttgggaggccgaagcaggcagatcatgaggtcaggagatggagaccatcctggccaacacggtgaaatcctgtctctacaaaaattagctgggcgtggtggtgcctgcctgtaatcccagctactcagaaggctcaggcaggagaatcgcttgaaccagggagtcggtggctagagtgagccgagattgcatcactgcactcctgcctggtgacagagcaagactccatctcaaaaaaaacaaacaaaaataaaagataaaaatgagctatgtgaattaaaagaggtataacaatagataaaccatattttatttaattcctagtaatgagtaatatttccaaacttctggaatgggcagaaattgctagttggcatatttttaccttttatattcagatacattaaaattctcaaaaaaaaacacctcaaagcagatgatccgccatctccttggataatttgtgttaactcaggataacagaaaaccaaaattatgagttactgatgcaatattcctaaatgtaaaaataattaaagctaatagtagattcatcttccaatttcatatcagtcttacaaataaactacatatataacttgcttgccttcccttctgagggataaagctgttagaagaattaaaatcagcattcttgactattcaaccaagggagggataaattattactcattctagggacatgggctcataactactacatgtgtaaggacatgaatttacccaatattacaatttttccttttattagtgtgtacagtggaagaatagacatgttcactctggacaaaaaaaaaattatacttatcagttatcagaagcacaatgctgaagacagtagttccataacaatttgaagtatgtgatcgaactagtagattatcttagtagtagtgaattattgtaaatgttagtaatttggcagccactgggcagaaaaataagaattgaggctcaatattgatattaatggtggtgattgacacataaattttatcaagtctacacaatataaaattacagaaaggtagaagagtataccagtacaacttcaacatatcttcactacaagggagtaaaatgacatggcctagttactatctaatgaactgcagaaaactaaaagaaaactccaaggcaactcttctctgctgatctggttggtccttttcctaccttttgcaatacccagatacaaacaatggatagaaaacaaagtagacttgtagtatgcaggtcacagtgctaaattcacagaaagaaacccctgaactgaactgctctatttcctggtggtcacaaagagtaattctggtttacacctacagattgatgtcaatctacaccctgttgataacagtgtggccaaggacaaaaaaaaggtgctccgttttaccaattctgtaaaaaattattggcagggtaagctcggctagggcaggattacatttctaggactaccatccccgaaatttagaagatattatatccacataaagcatatctttcacattaatttgcaaaaatctaaaagctttttcttagctcaagtgtgtccaagtttaccctggcagtttaaaacgatagttacaagcagcatgggttgtatcagacacatttgagggccaatttcatgtaagtgatattgggcaagttacttcaactatctgtgcctccaaggtcatactagtgtttatttacctaaagggtacctgttatgtaactttagggtgtttacattagataatgcctgcaaaatatttacttcaacgcctaaaacatagttaagtattcaataaatacctactattgtcactactaacttaaaagtttagagattaagagcagaatctggggtgagacaaacttaggttcaaatcctagtattgttgggtaatcttgggcaagttacttaacctctctgatttgtgtaatttaaaaaattagttaatatacataacagggcttagaagagtatctagcacatagcaccatttaagcatttgttattgctaacatgcaaacaatttaagggaaagaaattttttaaaaaggaagagggatttgcaaactaaaaacaatgagtatcttatgttcaaagaaaactaacaaacagccagctctagcaataattaaattcactatatactggggcaggcatcacaccccaaagctaaaagcgtctacctaggccaggcacggtggctcatgcctgtaatcccagcactttgggaagcagaggcgggcagatcgcttgagctcaggagttcaagaccagcctggacaacatggcaaaacaccatctctacaaaaaatacaaatattaggccgggcgcagtggctcacgcctgtaatcccagcactttgggaggccaaggcgggtggatcacctgagatcaggagttcgagagtagcctggccaacatggtgaaacctcgtctctattaaaaatacaaaaaattagccaggcatggtggcaggcgcctgtaatcccagctactcagggggatgaggtaggagaatcgcttgaacccgggaggcagaggttgcactgagccgagatcatgccactgtactccagcccgggcaacaagagcgaaactccatctcaaaaaataaataaataaataaataaaataaagtacaaatattagccagggatggtggtgcgcacctgtagtcccagctacttgggaggctgaagtgggagaatcccctgagcctggggagaatcacccgagcccgggaagtcgaggctgcagtgagcagtgattgtgccactgcactccatcctaggtgacagagtgagaccctgtctcaaaaaaaagaaattggcagaattaagtaagttgatgtttagagatgaaaaatcaacattttttcctcagcaactgaataaaaacaacagccactaccatttttttgagtacctatttgtagcctattttttaactggtattactcgagagagagagagctaggttcgagacagagctccttctcttaataactgtatgacctagggtatgtctgttagcctctctgaggcttcaaaggttcctcatctgtaaaatggtaataatcataccattgctacagggctgttttgaagactaattaggactatgtaagtaaacatgatgatggctattattactgttccccgccaggggccatgcaagggttgctgattcacatagactgtcttataatcctctcaataactccaagaggtagccagcacctcagatatacataaaatgacttaagcccagagaggtgaagtaagttgcccacagccacacaactagtaaatagcccaaacaagctggattcccagttagactccgttaatagcactgctctttaccttaagtcattacaatgcctaatatgaaatagaatcgcttctttcttagggttcaagtggttaattatttaatgtattcattcaacaaaccatcatcgaggacctcttacaagccaagtactgtgctaagtgctagagttacggcggtgattcctgcccttaaaaagttttagtgggagaaacaacaggtaaccaggtcattgccaaaacaacaaaaataatcataataaagcaggctaaagcatatttaactggccggggttttgactattttagcaagcatgatcagaacggttgaggagggaggccagcagcttggccggttcaacaaacaagaaaaaaccagtgagggtggagctaagataccagaggctgattacggttaagaatgttcttgaaggtaaggaccagattctcattttctatatcctggggcatcggtcagcatggaatctggattctagcacatgtgaatttcggcttgaaatgacctaatgccttttccctagttccttcgtgtgtcaaatacgcatggttaccgctaccagagctgtagtggggcttcaatgaggccatgagcatctccataaagatgaactacagtgtgtgcaaaactaaaggcaaaacctggtccccacacgccctcccaggtggtcgctttccgtgccgaggcccctccagaggtgccccgagaacctcaccatcgcaccccaaacttccagggaagggcctctcccgagaaagcccccacgcccccaccccgcgccatcattcccgaatctgccctcggcccctccccgcagcacgctcgcaggcggcacatgtcaaccaaaacgccatttccaccttctcttcccacacgcagtcctcttttcccagggctcccccgaggagggacccaccccaaaccccgccattccgtcctccctgccgccctcgcgtgacgtaaagccgaacccgggaaactggccgcccccgcctgcggggttccctgggcccggccgcccgagcccgcactgcggatcccgcgcctcagggcccggccgccacctgccgcgtgggcctgaaccggccagggccggcaggccgagctgctcaccacgacgccagggctgcgggtcgccataacggagccggccggcgcgcgggctgactgctcaggaggaggaagccggtggcggagcagaggaggaggcggaggcgcagcaagaggcggcgccgcgcgggaaagccgagaggttcgcctgagggctcgtcgcagccgcctgaagctgaggagaagcaggccccgccctctgcccgccccgccacgccccgcaggccccgcccccggccccgcccgcgcgcctacgccggcgcctaccagtttgcaggctcactaggtagccgtgggaattttctcccagaagaagccgaggctcccccagcgaagcccctttccctcccaactcagtctcctattcagagggctccctgattcccaaacctaccggcgcgcgttgcttcatggcggccgtaaaccgggccccggctcttcgggttccagtcatcgcgtgaatccttggaccagacgtcccattcccaagaccttgcactacctgtggcttccattttcctgactcttggcccagtgcttccccaaacccttaactggttgtaacagttgagacctagagtcctagagtcacccagatcagggtacacatctgagaggacacttaactgctctgtagttttgtacaaatcagactctgagcctctatttttgcctcactaaaatgagcatattagcccggcgcggtggctcatgcctgtaatcccagcactttgggaggccgaggcaggtggatcactcaaggtcaggagtacgagaccagcctggccaacatggcgaaaccccatctctactaaaaatacaaaaattagctgggcgtggaggcgggcgcctgtaatcccagctagtccggaggctgaggcaggagaatcacttgaacccgggaggcggaggtcgcactgagctgagatcgcaccactgcacttcagcctccgcgacagaatgagactccgtctcaaaaataaataaaaataaaaataaataaaaatttaaaaataaaatgagcatattaacaatacataaacaggatcattttgagtattagaggagtataggtatgcgtgtgtgtatgtatatatatatgcacttaggacagtacagtcagcaaatgggaactactgttattactactgatctttatttttgcccacacaagttcttatattgaatctgaaaacaaaaatatgttcccctgctaattaattctcagataggtcaggtaagcaagcaacagttgctccagcaacaccatttcttatatactcaaccctatagctccagcatccaccacagtgcccagcacatagttggtggcctccctcttattaaggacgctgaggggtatgtgatggcaggagatttgtaaaactaggcaagtcattgagcttctctggacctcagtctcttcatctaaaaaatgagaataataaacctgggtaacatggtgagactcagtctctacaaaaatgaaaaattatctgggcctggtggccatgtgcctgtagccccagctacttgggaggctgaggtgggaggatggcttgagcccaggaggtccaggctgcagtgagccaagactgtgccactgcactccagcctgggcaacagagaaatatcctgtctcaagaaaaaagaaaaagagagagagagagaataataactactgccatgaagagttttacgagaattctaaaaatcatttatgtaaagtacctcatatagtatttgccacataataggtgctcaagaaacagtagctgttataattttagcatgtatgaatttgtgaagtccatacttccctactttccctgtcttccctctttatcctggagaggcagcaggctgtaatggaaaagggatgtatgggctttggactgagttcaaatcctgggttccccactattatagcattttgactttgggcaagatccttggtccctgcgtgcttggtttcttatacgtcaaatgaggttaatatctctgtcacagagtgtggtgaagattaaacaaaataatatatgcaaaagtgcctagcatagagcttggctcaatacatgatgataccaatgttacgtgttccataataattttgccttaaacagttcactttcttctagcctctaagacttttttttttttttttgagacagagtctcgctctgctgctctgctggagtgcagttgaatgatctcagctcactgcaacctctgcctcccgggttcaagcaattctcctgcctcagcttcccgagtagctgggactacaggcgtgtgacaccagacctggctaatgtttgtatttttagtagaaaatggggtttcaccatgttggccaggctggtcttgaactcctgaccccaggtgatccgcccattttggcttcccaaagtggtgagattacagatgtgagccaccacgcccagcctgcctctaagacttcttatccattcccctgttgatggacatttgggcagtttccaggtttgggctattagaaataatgctactatgaacattttgtacatatcttttggtgaatatatgaatgcatttctatttggcatagaacttgaaattcatattagaacattttcattacttatccttttaacaaacattgtgttctatcaggaagttaattcagagaacttccggttatatattcgtcccctgacacatgtggtctcagctactcaaatttgtttctaaattaggtacccaacaattcagaatccttccagcttgcctctggcttgcagttcctttctccaaatcctgcagtaccagatactcctgtattttaatagtggatttgaaacaaataatgatagccagatgattgtaaaaacaaagaaacagtactgttctttcaatcttgtcattctgtgtgacaatttggactttttatttgtatttaaaatggaaaacagcaaacactgcaatctgcaagatgtaagactttttcttggtaagtgaaaatctggttcacatatgaaatggtttactgaatttccacattatatttaaagtggaaatgtattcttctaaaatattgttttcccactacagacaaaagcaagaaaataattattcctaattattatatgattattattgaaaatgattttgtcatagaggtgaaaaatgttaaaaaattatctactctggacgtcctatatgctaggtatgtcactgttctttactggaatatctgcatgcaggaagaaataaggaaagcatgagtgtaacctaagattcctcttcccgatgcctttccagaaacaatttttttttttttgagatggagtcttgctctgtcacccaggctggagtccagcggtgtgatctcagctcactgcaacctctgccttccaggttcaagcaattctcctttctcagcctcccgaatagctgggactacagttgcacgccaccacacccggctaatttttgtatctttaatagagacagggtttcaccatattgatcaggctggtctcgaactcctgacctcaggtgatccgcctgcctcggcctcccaaagtggtgggattacaggcatgaaccactgcacccagccagaaacaattttgtaatcgacttgtttgaacacaattatgaattatttgtgcgccacaaccaagtccaactgtatttcttctctagaaatttctttattaagaagtctgtttttaaccatggtgctgtgctccgccaaaatttgtatttctatgaaaaacaatcatcacaaaaatatttatactaaatgtttactttttcaatgagttgataatggttttctcaataatgccagatgtttcactttcatcagaataactttccataagctttactttttttttttttttttttttgatacggagtctcgctctgtcacccaggctggagtgcagtggcgcgatctcggctcactgcaagctctgcctcccgggttcacgccattctcctacctcagcctcccgagtagctgggactacaggcacctgccaccacgcctggctaattttttttgtattttttagtagagacggggtttcaccgtgttagccagaatggtctcgatctcctgaccttaggtgatctgcccgcctcggcctcccaaaatgctgggattacagacatgagccaccgtgcccggcctccataaactttacttttattccataaatggggtgtaaaattgaaccataattggaattaactaacatgatggttaatttctttctttttctttttttttgagacaaagtcttgccctgtgacccaggctggagtgcaatggcgcgatctgggctcactgcaacctccacctcccgggttcaagcaattctcctgccttagcctcctgagtagctggaattacaggtgtgtgccaccacgtcgggctaatttttgtatttttagtagagatggggtttcaccatgttggccaggccggtctgaaactcctgacctcgtgatctgcctgcctcagtctcccaaagcgctgggattacaggcgtgagccaccgtgcctggccatgatggttagttttatgtgtcaacttggcccatatatttggtcaaacattcttctggatgtttctgtgaaggtgttttttgtatgagattaatatttaaatcggtgggttttgagaaagcatattaccctccataatgtgagtgggcctcatcagctaaaggccttaatagaacaaacactgacctcccctgatcaagaaggcattctccagcacattgcctttggattggaactgcaactcctccctgagtcttcagaccgcaggcctacaccttcagattttggactcaacaagcctccacaattgcgtgagccaattccttaaaataaatgaatctctcccaacctcgcatatagacatatagatagatcgagatagatccaggtacatcctgttgcttctgtttttgtggagaaccccgactaatacaactgattttctattggaaccatctaaagatatcaacattaaactggcatcatttaactgtgaagttctgctaatagagctacgcattacaagtagtgcttcacttttcatcatgtacaaggcaacataaaatggaaaatgagccaatgaattttgatctaaataagtcatttgatctaaacaaaagtccttcacagagcagtatgtaaatacctctctgcagctgtacctctttggccacagtcttaaaataactacaaaccggcctggcgcggtggctcacgcctgaaatcccagcactttgggaggccaaggcaggtgaatcacgaggtcaggagttcgaaaccagcctggccaacatggcgaaaccctgactctaactaaaaatacaaaaaattagctgggcgtggtggcgggcgcctgtaatcccaggtacttgggaagctggggcaggagaattgcttgaacccgggaggcagaggttgcagtgagccgggattgcgccactgcactccagcctgggcgacagtgcgagactctgtctcaaaaaacaaaacaaacaaaaaaaaccgacaaacttttgaggtagatactgatgctttctctgcagatttatgtcttctgattttcatgtggtcagtgacatcattgtgccctgtgagtggctgataaatgcggacaaatgatttatgcatgttatacatttatcatcaactttcttgagaaagagattcagtatttactttttcattaattatgcactttagtttttgaacttatatgctggaaaagttgtttccaaaatttaaaaaagcattatcaaacaataaaataggccaggcacagtggctcacacctgtaatcccagtgttgggaggccaaggcagtaggatcgcttgaggccaagagttcaagaccagcctgggcaacaatgtgatactctgtttctagaaaaaaaaattattataaacgtgagttgggccaggtgtggtggctcactcctataatcccagcactttgggaggccgaggtgggtggatcatctgaggtcaggagtttgagaccagcctggccaacatggtgaaaccccatctctactaaaaatatgaaaattaactgggcgtggtggcgggcacctgtaatctcagctactcaggaggctgagacaggagaataacttgaacccaggaggcagaggttgcagtgagtcgagatgataccattgcactccagcctgggtggagagtgaaaccccatctcagaaaaaaaaataaaaataaaaaaataaaaacatgagttgtagatacacattgtataatgaataactgttataccaaaagtattcagactactcgatatatgttctatggcaggactcctctgcctttatttccggaatatattttacatacatgtaaatgtataatttcctgcatccactgacttaccaactggtggcctggcagcttcctgtatcttgcaggctttggcatggggacagctggctggtacaccacatattcagcaaggcgcacaatggtgaatactcctctcacttcccacctgggaataaaatgagttcgttgtccctaacccctagtgcctgattgcacttgctttgttatcagtgaacgccctacatgctatccttgagcgggaggtgttagttatattgtatttggaaaagattagagaaagggagaagggttatcactggttgtcttttaggtttaaccctgtgttaaagtgagaacttggttctctgtatatgcatctcacaaactagtagatgagaccaaggcagaagttggaattaaaaagttgtggtcctaggctgggcaaggtggctcacccctgtaatcccaacactttgggaggctgtggtgagaggatcgtttgaggccaggaattccagaccagagtgggcaacatggcgagaccttgtctctacaaaaaaataaaaaaaatagccatgcatggtggtgcgtgcctgtagtcttagctgcttgggaggttgaggtgggaggatcgcttgagcccaggaattctaggttacagtgattgcaccactgcactctagcttgggtgatagagcgagacgctgtctctaaaaataaaaatatggtggcccaacagactcatcctggcttatttaaatgcaactattaatacttaaactttgttagaaaatgaagtttgggacaaatgctaaattagacaaaatgttagaataacatgtaaactgggactgtctcagggaaactagaatgtatagcctcctacagtggtataaggtatggggacgctttccagtgctgctcatggcagcccttaaactgtagtatcctaatctctgactgcgatttgcttcctctccggttctctctagccaccctaattgtgcttcagattcatggagatctccaattctacggtctcccaccctgttcctgacttcctttacttaccagttctgtttggatcccacctgaatcactctccctgactcctggaagccctttgtaccctatgattcagctctgccaagatggctaagccacaccctggctcaaaacacaccccattttctctgtccatatactaggctgctgagtactgctggagaaaaccccacaaccatggagactggtacagattcatgggctcagatctcaacttggctctaaacacccctccacggtcctgtataaatcctcggtcagctccctttgttattcccaccagtaacgttctgaatagtctaaggccatacctccctgaaggaaaaaaaaaaggttaaaaaaggcaaaaatgttttgagacagggtcttgctctgttacctaggctggagtccagtgggcataatgatagctcacttcactgcagccttgacatcctgggctcaagtgatcctgcttagcctggctaatttttttttttagagacagggtcttgctatgttgcccaggctggtcttgtactcctggcctcaatggatcctcccaccttggcctcccagtgtgttgggattaccaggtgtgaatcaccatgcctggaccaaaccatgaccttccctccctccctcccttcttgccttccttccttccttctttcctccctccctccctctttcctttcttccctctctccctccctttttcctcttcctccctccctccccctcttctctctctctctctctctctctctctctctctctctctctctctctcccctttttctttcaagacatggtcttgctctgtcgcccaggctggagtacagtggcacaatcatagctcactgcagcctcgacttcctgggctcaggtgcctcccacctcagcctcctgagtggctgaaactataggcgtgtgccaccatgcctggctaattttttaaaaaaattttatagagggccaggtgcagtggctcatgcctgtaatcccagcactttgggaggccaagcatggagaaaccctgtctctactaaaaatacaaaattagccgggcgtgatggcacatgcctgtaatcccagctactcgggaggctgaggcaggagaattgcttgaacccgggaggcggaggttgcagtgagccgagattgcaccattgcactccagcctgggcaacaagagggaaattccgtctcaaaaaaaaaaattatagagacggaatctcactgtgttgcccaagctggtcttgaactcctgggctcaagtgatcctcctgcctcagcctcccaaagtgctggcattacagatgtgaagactttttaaaaagtaatgtaaacatgcatccccattcaacctccaccatcctcactgtagaaaaatagactcaacccattagtttatgaagagattgaaggattcaagtgtgaaccacatccatttctttccatccacatctacactgcttcttccccgctttcctccaggcctaggggtgaggtgtcccttctctggccagcagatccatctgtgccctgcattccatcacctttggtacttgcctctatcaaatgctgattttattctcccatagcttttgtttatccttccttctagtttttccccttaggtttgtaaacactcaagtttttcctatcctaaaaataaggtaagtaaacaaataattgaatgaatgaacatgtttaaagccctctcttgacgatgcatcttcctctggttacagctggctttttgagttgtccttacttgctctatccaattcctcattttccattttctcctcaaactctttgtgatctgtcttctgcacccaccattgtacaaaactgttggcaaaagacatcattgactgcgtgactgctttcttgccaaatccagtggacacttttttggccttatataactgtcctttctattgcatttgataaaatttaccactttgattttgaatctgtttctttggcttctggaatgccaccttcctgatcctccttctgtacttccctatttcttcctgctcatgagttcgcacgctcactcgctctcagacttttcagtttatccttcttcagtgttgttaacatccagtgtaaacgggccgggtgcggtggctcacacctgtaatcccagcactttgggaggccgaggcaggaagataatctgaggtcaggagttcgagaccagcctggccaacatggtaaagccccatctctactgaaaatacaaaaaattagccaggcatggtggcacatgtctgtaatcccagctactcgggaggctgaggcaggagaattgcttgaacccaggagacagaggctgcagtgagccaagattgtgcgactgcactccagcctgggcgacagagagatactccatctaaaaaacaaaacaaaacaaataaaacaacaaaatttcatgtgttccattttgggccagaaatacaacagtagtaatagtgtgcctgtccttcacagtgcttcatattaggaggcccgagatgtcaatttgtttcattaatgatgatgttaatctggattactttgtcaagacagcctctgccagatctccagtataaacatactatttttccctttgtaattaatacgaggaatgatagtttgagactgtgtaaatattctgttcctcatcaaactttgacccactaattttagcatccattgatgattcttcttgtgtgtgtacttttcaatttaagaagtgaattataggccgggcacagtggctcattcctgtaatcctagcactttgggaggccaaggcaggcagatcatctgaggtcaggagttcgagaccagcctggccaacatgataaggccccgtctctactaaaaataaaaaaaattagccagacattgtggcacatgtctgtaatcccagctactcgggaggctgaggcaggagaatcgcttgaacccgggaggcagaggttgcagtgagctgatcttgcgccactgcaccactgcactccagcctgggcaacagagtgagactctgtctaaaaaaaaaagaagaagaagtgaattataagcaagttgaattctgaagctgtggtcatgcatttgagaggagaaattgagaaacaatggaatggaccttttttgtttttgttgttttgtttttttggaatgcacccttaatcattacatttagaatcctttgggatcacacacctgtaatcccaattacatgtagaatcctttctgcatttagaactctactgtgtaccaggtagtttactagaaagtattttaaatattttatttttacttttattttttattttcccataagtcttttgcacttgtatttttaatatttgaagccagaagttatcccctaatctttatatctatgctcactgttattttccatgaaaattcatttttttcaattttattttgacaaataattgtatatatatttatggggtgcaatgtgatgttttggtatatgttgtggaatgattaaaccagtctaacaaatccatcaactcacatacttaacatttccattgatgattcttgcctgaaataactattaccgaagtgttgaatgttgatttttccattatcatcattctttcttcatttattagatgtaatgttactgcaatgaagcgaattcccttctccccgtgtatttatttatttattcatttttgagatggagtctcgttcttgttgtccagggtcgagtgcagtggtgcaatctcggctcactgcaatctctgcctcctgggttcaagcaattcttctgcctcagcctcccgagtagctgcgattacaggcacgcaccaccatgcctggctaatttttatatttttagcagagatagggtctcaccatgttggccaggctggtctcgaactcctgacctcgtgatctgccctgcctcggcctcccaaagtgctggtattacaggccttttttttttttttttttttttttttagttttagtagagacagggtttcaccatgttagacaggatggtctcgatctccttacctcgtgatccacccgcctcggcctcccaaagtgctgggattacacgcgtgagccaccgcgcccggccaacaggcctcatttttttaaatgaaattatttacatcatcatgaactcagggattctgattttatcctatagggaatgatccattagtagtacttaatactttgttgcccaggttgtccaagatttggctactgggcgtccctccatgttggctcctgtgtcctttcaatatgtcctcatcactctttgagcacttacttaatttctggcaccacaagatattccagtctcatcttttacttttcctgccttagccttggagtcagccatttttacaaagagctctgttttttttttctgtttttgttgttgttgttgttgtttaaattataaaccctgatgctattataaaaaatggtggcacggcactttttattttctttaatcagaaaaataagccctgagcttctgggatggaggccccaggtgagctccggaggaaggggcctgggtgggtggggagcgaggggaccaggggccagagcagatgctgcaccaggagctctggtttcttatattggaaaatggtattattagaaaccaagctctgggcagtagttataacatttaaattatgatgtaaaaaaaattttttttttgagatggagtcttgctcagtcgcccagtctggagt

SEQ ID NO: 43 - DNA, 57583 bp, Mus musculus
agaaggagggagggagagagagagggagagagggagagagagagagagagagagagagagaagtgtgcatgtgcatgtgtactgtactggctggttttgtgtgtcaacttgacacaaggtagagttatcacagagaaaggagcctcccttagggaaatgcctccattagatccaactgtaaggcattttctcaattagtgatcaaggggggaagggccccttgtgggtggtgccatctctgggctgatagtcctgggttctataagagaacaggctgagtaagccagtggaagcaagacagtaagtaacatccctccatggcctctgcatcaattcctgcttcctgacctgcttgaattccagtcgtgacttccttggtgatgaacagcaatgtgaaagtgtaagctgaataaaccctttcctccccaacttgcatcttggtcatgatgttttgtgcaggaatagaaaccctgactaagacctgtgccatgacagctatgtggaggtcagagaacaactttcaggggctggttctctcctttcactgtggattctgggcgttggacgcaggtcattatgcttgtatggcaagcacattcaccaactgctatcaccatggctctacattttaaatgagttttaattaattcagacctacgtttatgaaattgtcacctgcagttggtgtcttctatactggatggtgtggctctatctcatttgcagcagggatctttaggcagttgtgagggaaacaatagtgagcacctgtgaagtgaccaaatcattatggcttgttcattaataatggccaaatgaaggaattctctgctgaggaacagagccggagatggtgccacctgttactatcgagcctgtgacaaccacgtggttaagagcatattttgaaagaacaggttatgaccagagaggcctcatacacatgtccaggatgtgaaaatccgtccttgtcatatacatcctagccacagtttgcccctttgtatttttcagacactaaagggattgtaaatatagccagaaaatctttagaggtggacagttttaaaagtcaccttggaagccatttacatgggaatttgagtttggcactgcctggcaggaaaagatataatttcattacaaaaacactttacctatttaaaagtaacctactgtgagtcaagcttcttactcacttcagtacatttgatggggagcttgagagatggctcagtggttaagagcacagcctgttctttcagaggacctggggtcaattgccagcccccacatgctggctcacaattgcctatacctccagttccaggtaatctgaagtccttttctggcttctgtgggtatcaggtgcctacatggtacatagacatacatgtaaagtaaaacacaaaataataaaaaccaaacgatataaataattgaaattataaattaataataaataaaattataatgagtaaataatacaatcattttaaaataaaaacacaaactaattttttttctgagacagggtttctctgtgtacttgaactcactctgtagaccaggctgtcctcgaactcagaaatccgcctgcctctgcctcccaagtgctgggattaaaggcgtgcaccaccaatgcccggctacaaactaattttttaagaattattttacttatatgactacaccatagctgtcttcttcagacacaccagaaaagggcatcagatcccattccagatagttgtgagccaccatgtggtttctgggaattgaactcatgacctctggaagagcaaccagttctcttaactgctcagccatctctcaagcccaaacattagctaattttgttacacttagtgcatgtgggtgtacttgtgccactgtacatgtgtggagatcagagaacaattcagaggaattggttctctccttccactgcatggatctggagggtggaactcaggttaccaggcttggtgggaaattcccttaccatatgagccatcttcctagccattctttgtcttctattttatttttatttatttttctttatgtttgtatctcccaccctgtacaaaaatctatttaaaatggataaaagaccttaatataaaaccctaaacactgaaactactcaaggaaaacacttttaagatatgggaaagaattttcaggaaatgttacaataacccagtaagtaatgccaaacaaggctgggcagtggtggtgcacgcctttaatctcagcacttgggaacttaggaagcagaggcaggcggatttctgagttccaggacagccagggctacagagaaaccctgtctcgaaaaaaaaaacaaaaacaaaaacaaaacaaaaaataatgccaaataatccaaaacctaccgcattgcaaggaaaacactgaacatagaggagacatcctacaaaatgggcgaaaatctttgccagctacatgttagaggtataatatctaaaacataggaagaatgccttttcattgtcttcacactctttgtctacactgtgaatctaaactataaaacgtttgcaatatgctattgcatacattaagtatatatgatgttctcaggcctccaatatatacagcagagactacctggcctggcctcagtgagagaagaagcacctaatctttgagagacatgaggccccaagggagtggggaggacttgcaggagtgggagggacaacctcttagatacagggggggaggaggaatgggatgaggaactgtgggagggtggactgggagtggggtaatgactgggctgtaaaaataataataataataataataataatgataatatatgatatagggccagatatggtggttcataccatcaatcccagcacttgggaggcagaggtatgcagatctctgagtttgagcccagcctggtctacagagcaagttctaggacaccagggttacattgagaaatcttgcctcaaaaaaacaaaaagaagatcaagacatgatgtagggctgaagagatgactcaaaggctgtgagcacaaactactgctgaagaagatccaagtttagctcccagggatcacatcggacaacacagctgcctataatcccagttcacaggcatctgacacctctgatttaattacataaacaactaaaaataaaaaaccatctttctttaaaaattatttatgagtacactgtagtgccttcagacacaccagaagagggcattggatcccattacagatggttgtgagccaccatgtggttgctgggaattgaactcaggacctctggaagaacagtcagtgctcttaaccactgagccatctctccagccctgtttggttggtttttgaaacaaggtttttctgtgtagccctggctgtcctagaacttgctctctagaccaggtgaccctggaactcagagatctacctgcctctgcctcctgagtgctaggattaaaggtgtgcaccaccactgccaggctactatgaaaaataaaatggtacatgagccaggtttggtagctcacacctgcactcctagcactcagaaggaggattgttgcaagtctgaggcgagcttaggttggttacacagtaaatcctgggctacatagcaaaagcttgtctcaaaaggcatgttatcatagctaatgtttcttctattgtagtgataaagttggaacctaggaccttgtaaatgctcagtactgacctaccccttgagctcctagttaattatgcctactgtcctgctctattgtttttgcttgtgatgcgccaacatttgggtcatgagatgaagaagcgagcctttggtaatagtaataatctaggtgaactgggaagatgagcggagcatgaggtaccataactcaagttcatcctagcctacaattttaaaaatttatatgtttgaaaatgtaaataggggttttgcctgcatgtatgtctgtgttctatatgtgtgaagtgttcttggagcgcagaagagaggtttggattccatggaacttaagttacagatgatgatatagatattgcgaatcaaacctgtagcccctgtaagagtgtttttaaccactgagcaatctcgtcagccccatagtttgtactcttacttaacattgcacaatgtatgcttgtggccagacatgtgagaaaatccccacatacctagaaagtctgcaaaaggtaacattgggatgccctgtaactggaaaaagcaactgacctcacagatctcagagggtagagagatcagtaactacaggttagagatagcatcagagcctacaggttgagggctctgtcttacaagactctttcccacttcaggtgcccattacatgttccaggctgtgatttgtacttctgaccaaccagcaattaaacagaggttctcatgataccctcctcagattcagttcttattagaacagttgtagtcccgggaaacccttaatgcttagcagtgtactctaaagactatttaaaaagatgcagataaacacccgcgtggatgagaagtagggtggggtatgggtggggtcatggagtgctcatgctgtctctcataacactattcccctaggatgaccatgtgttcagcatcccagaaaacgcatgacatcttattgttcaagagtctttagttttatttttgagattacaatataattacattgctccctccaaaccttcccatacacacctcacaactctccttcaaattcatgaccttgttttcactaattgttattgattgcttgtgtgtgtgtgtagaaaacatatatatatcctcctaaatctgtataacgttacttgcatatgttttttcagggctgacctttttttttttttttaaagatttatttatttatttatttatttatttatttatttattatatgtaagtacactgtagctgtcttcagatgcaccagaagagggcatcagatctcattacagatggttgtgagccaccatgtggttgctgggatttgaacttcggaccttcagaagagcagtcgggtgctcttacccactgagccatctcaccagcccccagggctgaccttttggcactacacaaagaactggtgtggtcttccctcaccacctttcctgctcccagttttcctctgtttcctatactcctttctgtagggctgaagcctcatgggattttccccatccactttggcatgtctcttggtgttgtccatgtgtatgtagctctagcatgggcagtcatgctgctgagaatttatggagcttgcttttggcattaactaggagacataacctcatagcaatctccttgatcagttcacgggtcttttatggagctggattcccccgaatcccagatgtcatatgtgcaattcaaattccagtcctctagtcacttaatcttcctgtgacaagcccaaggttacctcagacctatttgtaagtcatctattaacagcctctactggaatcaaaggctgctggtgatgtagctcagtggcagagtgcttgtctagaatgtcctgagcctgatccccagcatcatagacaaaagaaaacgaacttccagcctttggcagagagccccacttgccatcccctcctattttaatttgaagatgactaatctcagcctatctagaagcagtaagtatttcttctttgggaatgcacctcttactatggaacactgtgaagactaaccattacaacaatatttctggtacttactagaacacatggaatttaatcacctggtaacatcagactaacccaactgaaagggaaatctgcaggcagttagccagaaatacctaggtcatgacaggctgagtctgaagaactcttgaatggcaacaaagaataagaaaataagtaaagataaaccaggcctggtggattcttgcactgtgtaggtagaggcagcggcaggtgggtctctctgaatccaaggccagcatgttatacacaggtaattctaagccagtcagagatacatagtgaggccatgtctccaaaacaagcaaacaaacaaaaacagaaaaaaggaaagataacatgtgtccttggattggaccctagtccagaaacacagggcaaaaatggatcttctggtcaaagactcctcacctctgggtctggataaaaagagggtaggaagcagttaagatatgtttggagtgcaatttatgtagttcatccactgagcccatctgagaattagtagccaggcatggtgtcacttgcctgtgattaaggctcttggcagatgaaggcaggatcaggagttaaaggtcatccttagccacaaaaagagttccaggtgagctgagttgtctgacaccctgtctctaacacacctcctctaaacaagtacaggtagtgagggtggaatgaaatcaaattactggagaaacttatattcggaatataagagagggagctgatcaagggcttttaaaggattgcagaaaggtgctgctgcccaaaggatagctatgcagtgcccactaagtccccgctaaatacttagattcttcttgttcaatttctacgtcaagtttctctgctcattatgaaaagtgatgcaatactttaaatgagtacctctagtaaatcactggacttcacagatagctcaagcaagctggacatttcaactagaaaatcagttagttctattagttaagattttccatagaaacagccagtctgtctacatatatctctccagatatttatgtggagagagaggaggtaaggggtagagattttttttttaatttggcttacatgattgtgaaggccctgttcaatcccaatttgatagaagtaattgcagtaggttggagactcgggggaaagctgacattctaattacaaggcagtctgcaggaagaataccttctcactcaagggaggtcgatctttgctctctcatggccatcagctgaggagatgtagactaatgagggtcacttaaaaaattccaacattatgagttagaatccttgtcgagcaagcataaggaccagagcttagattcacgtgatctcctgtttgtaactggaaggcttgtggacgcagggagaaggggaagacagtagatgggccagcatggaactgggcaggactaggtggagacagaagaattatgcggctgtccaggtgccagactgctccatgatcagtaagagattctgtcttaaacaaggaataaagtagagaatgacagagccttctctagcccccatgctcacaggcacacatattgaatatgtacagatacatcacacacacacacacacacacacacacacacacacacacacacacacacgttcccaagcgcacacacagaactaaaaactttttttttaaaaaaaatcaatgttaagaataagtgttttgtgtaatatttcttgtggaaatatatacgtatatacatcttttctttttcttttttgagatagagtcttctgtagcccagcctgccctcaaatgtgctgtcaccaagaccggcctctatcctcttgcttcagcctcctaagtgctgggattagaagtgtgagctatcacagccaactccagaaatttgaaggactattttggaatccagcatggctttggtagggacagaatgacaaggttcctgtgcctgggacagagcaagctggagtaggcctccacggatgtcaatggctgttatgggcataaggcttgtttgtataataatgtaaatattttcacatgttcctctgaagaatgtcctccctgttaatatttagtcagacagcattagttcaagaggtgaaggtgtgactaatgtctcagcaaaatggtacatcctggggccttcaggacagcctttaagactgtggaaaagaactctaaaaaatgagtttgaaaatatataattcctcaactatgcgaaaaataaagatgaaatatgaattgtataaagagattcacagatctaaaggaacagaggcagctccactatgagtcagattgtcagaaagatacaaagacaggcagatacaaaggcaggcaggcagattctgggttcaaggtcagcctgaaaatttagggccaggcatgatcggaatggtaattccagggtggggtcccacccagctatcttattatctatgtttatgcttgcttgcagtcccttcccaagagacaaggggtaaggtaatcagctaatgctgattcatagggtggtcacaagtgaaccaggaataaatcataaaacatgggcttttggtctgcaggagatgagctagcaaaaggcaatagcagttctttttagaatttttctctagtgagaactcagctgtctggagatctctggagagcgaacacagctcttcaatttttttttctaacagactttcttgttttagtcacaaaatccatggagagagcatagctcttttagaaattttcatagtgttttaagaactttttctaataggtcagaaatcccaagaattacttagagagtggatatagctcttttagaaggctctctagctgctatccagagaaggctgtctgaaggatttttagaattctaaatgtctgaaggcacttttagaatttttttctggctttctgattttgatcggaaaacccaagaattattattattattattattattattattatttggtttttcgagacagggtttctctgtgtagccctggctgtcctggaactctctttgtagaccaggctggcctcgaactcagaaatctgcctgtctctgcctccaagaattatttttagaatttttttctaataggatttctgatttggtcagacaatccaagattttttttatagtagcttttctgactttggtctaaaaacacatgggctctccacagagcttttagaatatttactaggagagagagctatctgtcttgaacagaaaactagctgtctcaaccaaaaagtttttagaatactaggaaaaagctgtctagagcagagcagaacacacacgcgtgcgcgcgcgcgcgcgcgcacacacacacacacacacgcacacacacaaacacacacagagagagagagagagagagagagagagagagagagagaacagtagaggaaagtcatctcaacagaacatagatccaagttggggaggaaagggtttattcagcttacacttccactttgctgttcagcctgctctctctctctctctctctctctctctctctctctcactctctctctctctctctggtttttcgagacagggtttctctgtgtagccctggccgtcctggaactcactctgtagaccaggctggcctcgaactcagaaatccacctgcctctgcctcctgggattaaaggcgtgcactaccactgcctggctagcctgctctctcttatagaaccaagactaccagcccagagatggcatcagccacaaggggacctcccctcttgatcactaattgagaaaatgccttgcagctggatttcgtggaggcacttccccaactgaagcacctttctctgtgataactccagcctgtgtcaagttgacacaaaactagccagtacaataactattcaaacaaaggcagaagttgaggtggtatttttttcttctgcagtgccttagagtgactgccaaatttggcacctgttcggcatgtgttaggaatggactccagatccaaggtagagaaattttgggatccatttgactgtatatgataacattttttttcagtaatatcatgtaagaattagtaatagtcactttcccgaactcatattaaattggaaaacaaaactctaaatgtaatgtctgatctgaataaagtgctttgtagatcagcttgtttacttttcaaaaaaccataacttctttcatcttgtactgtgtggggtgtttcccaccatacagtgaggcaagaaggttgcaaattccaggccaactgagactagaaagcaagactctcactcaaaaggaacaaaactccatgatccattgttaaagtctaagaagatgagggcagtgctggcaaaagcctttaatcccatcacccagcaggaagatctttgtgagttcaaagccagtccggtctagggagagagtttcaggacagccagagctacacagagagaccctgtctcagaaaacaaccaaaagcaaacgaaaccaataaaacaaacaaaaaaaaccccacatctaccatcaaatttctcatattagtatccttaataaaagcgtggccactgactatagtcaaacatggtaatgggtgctgggtagatacaaatggagatattgacagtagcattaggggcaagcaactgctggctgcttttgaaaatagaggacgattttgttttctgatttcacattggatagtcagatgtctataatcccagtacttgggagatggagacaagaggaacaggggttccaggccatactcagcaacaaagtaagtttgtggccagcttgggctatagaaggacctgtcttaaaaaacagacctgtcttaaaaaatatctaataggtaaacaaaatataaaacaaattccatgcaggaaattgtggagaaaaaaataaatatgaataacagccacagttcccatacattgtgtacttttatattgtgtcccatatgtatgctcgctcaaatgtatgtgtgcaatcctttaattcccccatattcccatcaagtacggttaatatgcttactttatctatttatttgtttattcattctttttttgttgttgttgtataagattgaacccagaagccgggcgcggtggcacacgcctttaatcccagcactcgggaggcagaggcagccggatttctgagttcaaggccagcctggtctacaaagtgagttccaggacagccagggctatacagagaaaccctgtctcaaaaaaaaaccaaaaaaaaaaaaaaaaaagattgaacccagagcctcttagagcccaaatgtactactgctctgctctcttcctggctcttttattttttcaaacactagtcagtcagtttgttcgttcgttggttagttagttagttagttgtttttcagccagggtctcactttgtaatgcaggctcgtctggaattcacagttgtaattctcctacctctgtagtgctgggattacacatatgtgtcgccacacctgactaaaatcaacatgtaagaaatggcatcttatttggtaatatatgaatctctatcagcatttcttttgtgtgtgttgcagtcatgtgcaagatgtctttctccatccctattccaccttaacaatttttattttgaagcaagatcttaattgtctgggtaggtcgaatatgtatgtgattctcctttcttggtagctgggcataaaagccttttttttttttttaaaccatacttggcttaaaatgctcattttatgtaaaggcaaaaagcattttagggtctatttctcctaaggttactaagtagtttatttttccttttggattggtactccactttgtagaccagactggccttgaactcagaaatccgcctgcctctgcctcctaaatgctgggattaaaggcgtgcgccaccaccgcccggctggatctcaaatcttatgactaagtaaaaatttgtgaaagaactgggcctaaatcttgaggaatcacatcatgatttagagctgtttagactcatgaggagggagaaaaatgcggagtgattatctgggaatcctctgggagacgacagagggcctgggggctgcggtatggccagtaccattttcttcagaaagaaaattatcaggcccacctagtcagataagagttccggaactgcctttggtggcgcgcgcgcgggagaacgcccagcggagcctccggggacggagcctgggcgggccgagagggcgggccgaggggcggagcctggccggcagcgtttctgagccattgctgaggcggcgagggagagcgttgggcttacctcactgctttccggagcggtagcacctcctccgccggcttcctcctcagaccgctttttgccgcgagccgaccggtcccgtcatgccgacccgcagtcccagcgtcgtggtgagccaaggggactccagcagagccccacagccgggccccatgcgcccggtggcacagtgacgcaggccggagccctgaggctcccgaggcccgctctgggcgctggggcggccgggactctttgatggcgggggcggtcagggattcctggagtctggctagatgccccatgagggcggcgggcaggacgggatggcggggttcgggggtggggatgcccctccagtgagccccgacagagagagagggcaggctgcgtgtggaccaggaaggtggcaatggcgttggacttgacatgtgcggccggcggacgcgcgcggtggcaagcggcggagggcggcttcaggaaggatcaggcgcggggagggcgggggagctctcctgggagaggcccagctctacaagtttggggtttggcggccagggaacacctctagaaggagcttcggttcccaagacgaccgcatgagagggcatgttcaggcctggactttgcccctaattctgcagatgccataattcatatttgtgggaatgcgcaatcactccgttgaatcagcgctgcggcccaggcagtgaaaatcacgcctattttccacctgaagagtggaaaggcggctcgttttttgttttgttttgttttgtttttttacccccccatggcccagaataatgggctttggcttcagatacacttgacttgggagcccatgcccttggatgctgtgggaatttaaaaaaaaaaaaaagtatggatttggttgttacgttggatgacttttttccacactcatcttcagatatcctgccttttctcccattggctcaattttttctaacctgccaagctctgtctcccctatcaatcccaacgccataaccttgctgatcatgcttgctagaacatcccatagctcctgcttctgattaacgactttagcctgctctattcttattcttgcctctggtactccttaaatgtcatattatgctttatatactacagatttagcaggtatctggttacttgttggttgactttcccactcacacgtactttatcttgatgttttcaggcagggtcttactatgtagctctgtctggtctgtaattggtaatgtagaccatcaagctggccatgaacttgtgacagtcatcctgactcttgcctcccaaatgttgcatcactgagtcttgctggttttttaaaaattcattttagggaatgaacccttgttctactgggtaagcaagctctctactctactgggccaaaagccaggcccctaaacaagcctcagctttaggtatagcacaatgtctggtttgtggcaagttttcactaatagtttgttgggtgaattaataaccatttgagcccttaaaaaggtgttctctcatagtgtattagatattgtggcttaaggcaaaaccactgtgttcttaatgacccagaatcctgcttgcttagaatatgttctatgtggccttcagtatcttcacctagactgaagcttccttttcagacatttcttcctgtgcaaccattgccctaagtagaccaggccttgaactttcagccatcttgcttctacctcagtgtgggaattacaagcaagcatatgctatcaccaggttgtacatttttcttacacctgagatgctggctgctggtattgttaaaaggactgtaagataataaacaacacttatatagtccctgagtgggaatagcataatagccatcattttgtttacatatatctatccttattagttttcaaaataatcctgtaacaaagggcatgttcacattatcagacacaagttattaagagggtagagagctcccctcaattatgtactaaaccctagttttgatcaccagcaccagaagcaaggatacattttagaaaatggagttctgtctcaattcttggtctgtgtctgaggtctatgcaaataaatactatggtaggattcagtagataatgtagtaggtgctacttttattcggatatggctgcttttaagcttggagatatggtacttgttcagtgtagagttaattagttctttgtgctagaagtggctattcttagttttgtttgaacattaagaaattcacagtatttttagtttgtaaattcctgttcctttttttttttttttttgcttccttcccctaaattgtctgcatgctaggaataacaaacacttaaaaagtgcttactacatgctgcttgctcttctaagcccgttagcagatttgacttcttttatttctattttttttcctgtatatggctgctttgcctatatgtatgcatgtatgccatgtgcttgctttggagtccaaaagagctgccataggggttatgctcatggattggcaggatcaatatagtaaaaatggctatcttgccaaaagcaatctacagattcaatgcaatccccatcaaaattccaactcaattcttcaacgaattagaaagggcaatcggcagattcatctggaataacaaaaaaactaggatagcaaaaacctaggtcccctgaagaacaatacgtactctgagccatccttcaacccctacttgactccatcttttaaaaaaattacacagacaaggtaaataacttgcccatatcagtcagtgctaccacatttgaacctgttaatctggccccagattctacccttaaccagtagacttgttaggagctacagtgaatgtttatgaaatacttgttctgtcttcagcaatgacaaatgttttgtggactttacctaataccaataagttacataataagtgccccttgtgtagatgaacatgactggggtgatacaaggtagaggaagtaaatataagctacattactttcatgaaatgggcccctagatatgcttgagagctacaaaaacgtgctgcttgtaactatcagtctagaaaaggcttctggcttcttacaaactaatgtgaaacatcagatatgttttatatggtatacacttgaacttcaaaatagcccagatgaaagtataatatactaactgaacttaaaccttgttaatgaatttttcaaaatttatagtgtcttgagacaaagacacactctgtaaattaatgtggcctgctggccttaaactaacagtccttctgccttagtcttccatgtgctagagttacaatcatgagccaccacccttggctcagatgatttttttgagatacatactctgtagttttaggctggtctcctaactcactttgtgagaataagagacacattctaccatgcttggtatgctaatgaaagtgaatctgtgttttggtgatctaacttgaggtcttgtgctaataagcatgtttcaccattaagctatacctttatctatctgctaatttttttcagtttttaaagatttcttgttatgtgtatgagtgttttgcctgcattatatgtgtgtgtgtaccattaggatgtctgtggatgtcagaagaaggcatttcatctcctggaactggagttacagactattgtgagcctccacgtgggtttggggaactaaatctagatcccctgcaagagcaagtacttttataaaattaattctttttaattcactttatgtcctgatcaccctccctcctctctccccagtcctaccctaccatccttacaaatccctccccctccctcagagaaggggagcccccactttgctcataccccactctgggcatctagtcccagcaggtctcccacggaggcctaaccaggcagtctaagtactcctaaccattgagccgtctttctagcccatggttttttttttctctcagaattggttaaatattgtagtttttgcctaacactattttattattatcaatggtgtctaaaataacatccatttataaataagaccaaaatgaattattttgatcaccaaaaaatgggaatagtccctcttagaggtttctttatgtaaattttatactcttgttacctctgttatatgtctatcttatttggataaaaataatctggattattgtagcaggtgggaaaaagacttaattatatcagaaaaaagatgccttacagttttattattgttttgggtggggttctttttgtgagggattagtttactttatttagtctgggatatattttctttatataggccaggcttgtctcagactgggaatccgttttagtctcttaagtgttgggattatgagcatagactgctatgcctagtcttgtagtttttttttttttttactttgtaaattttagatgaaagaaaaaacagctaacttattttattaatgactatcatgaattgaattttcacttttttatttttgtgcaattggtagttcagagacctttacagtttttttttaaatttcttttccttttttttctttttggtttttcaagacagggtttctctgtatagccctggcagtccttgaactcactctgtagaccaggctggcctcgaactcagaaatctgcctgcctctgccttccaagtgctaggattcaaggtatgctatgagtcacaacacttgacaaattaaatggaattatatcattttccccttcccttttctccctccagttcttcccatttgcccaccctagaatctttttctttgattatcattgttacctacacatgtgtatgtatgtatgtatgtatgtatgtatgtatgtgcacatatacttgtttgtgtgtaaatgggttcaaggttgctcactccgcaatggatagccaaaaagggagctcttcctgggcgtgactaattcttctcacagttgtcattggttgcctgtagttctttgtctaggggtgggaccaagagaaatttctcaaacctggaatcctcctgccttagtctcctgactaacttgccttagttgattctgtaattctctgatgtagatccttaggattaaattcagattaagtttggcagcaagttcttttatccaccctaccgtctcagcagcctgagatgggatctggctgtgttgcccaggctagccctgccttaattttccaggtacttaggactacaggtgtatcaccctattcccagtggaatgtgttttattccataattaattagattaaacaatggtccatgtcatttttctcccctatagtaaaggggtattgaaattgtgtttgttctgtctttctgtaattttatgttaggtggatttactaacattgatagatcacatagaagtgttaattactaccagtaatagtaatattgagatacacttgttattttcctgttgaggactaccaaaataactaccatttaaataatttgttactagtaggaattcagacacttcaaattgctttgaaaactactttcagttttttcttgctgtttagtgtcaaaatatctatgattctactatgcatattagtaaagggaaagattttttttttttttttttttttggtttttcaagaccgggtttctctttatagccctggctgtcctggaactcactctgtagaccaggctggcctcgaactcagaaatccacctgcctctacttcccgagtcctgggattaaaggcgtgtgctaccaccgcccggcaagatttttttttttaattcatgtccttacagatatggtagttacaggcctacttgcctagagtggttataacttattcctgggctgagtagtctactaccttattttaatttttcttatagctttaacccttggaaaggaaacaaatactctatgtatgttatttgtaggactgataaaaaaaaagaaaatgaacatagtaccattttaagttgttttcatatttaggagtatctatcaataaattataatttttgtttaatcatatccagacataatataaattatctcaaggatagcttatcatctgctttttttgagattttttttaaaaagttttatttgtttttgaaaaattttaatatatttgaattaagctagtgtctcactgtgtagccaagaactagtagttttctgtctcagacttctaaatgctgagtttataggtatgtgccaccatgcccagcacaaatccctattataaaatgtgcacatttgtaataatggcaatcacatgaaagacaatccttgtgatttacacataaaatttcctgttacacaggtacattatcagaaataatatgaaaaaggaaatgaacctaagctaatacgacctttggaatgtcaggttattgtctacaatttggattgtttaagtctctttatagtaaaatataacattgttcatgagcccaaacaagactccattaaatggaagtgagtcctaaaatgactacttgggagacagggggagaaggttcagctacatagtgagttcaaagccagcctgagctcatgagactgtctcagagaagaaaactattgtgaattaagagttgtatagtaccaggcagtggtggtgcatgcctttgaacccagcacttgggaggcagaggcaggcagatttctgagttcgaggccagcccggtctacagagtgagttctaggacagccagggctatacagagaaaccctgtctcgaaaaaccctccaaaacaaaacaaaaaatccccaacaaggacaggaagagttccaagccagcccgggtcacatagtgttgagacaggaaagggtgtgtgtgtgagagagaataatagatagtagaaaaattgttttgaattttatgactagtaatcagcatgttcaaagttttagaatggacagaaatgtgaccgtcacatctgtgcacctgtgttcacacatgcatgaccacataaatacacacacacacacacacacacacacacacacaatctcaagtgaagagttgtaagactttttgcattttggagaagaattatgttgatatggctttaataaactgggtatgatggttcatacccataaacccatcatatgagaagccgaggcagaaagattgccccgggtttgaggatagcttagactatgtcgtgagattaagtttatggtgtactgcagagccaaggcaatctgaaatcagaaacaaattttttaatgttaaaataactataagcatttcagaggaacaaaacaaaaattctcagatatgaatttgttttaattagaaatcaagacttttgcattggtgtgttgatggaaatagaattcctatttttgagtaattcctgatgtttgtattcttagactacttgggtgcacatctgtaatcccagcactcagaggcagagggaggaagatcatagcaagtttgaggccaacctaatctatatagctagttccagtacagctagagttacatagtaagaccctgtctcaaacacacataaaaagactgggatgaacttggcagagttcacattggatttgtctttaattgaaacagtctttgaagttcttaggtaggttacctgtagaacctgtaaccaggcattgagctattttagtaggtgcagtagtctgatgaaacctgggtgtgataggcttaaggcagaaacagagtgagtgggcagagggtatgagaatgcctcaggaaagtcattgtggtattctaattttgattctaaggtactttgaaataatccagctttatttttgtcaggtagtacataagttctcatgagcctggcctgaatatttattgttgttatcttataaaattgagcagtctgtcatctttccccaaaacatgaactaaaatttgctttatagaacttacaaaaatgctttttttgtaaaatactctttgaatattcctttgtatgatacaaatgcccaatttctatttttgttactaaatgtcctaatataaatattaagtgaatgttaagcaggtttttttagctctctaattttttaaagaaattgccataatgtttcacaaatttttctgattatgaaaaaaaatacatgtgtatttaagaataaatcagtattctgcatgctgcaggttcttgtgaacagacctaaaaataaataaaattctatcaaacattgagctcaaaatagaccttttgtgactaaacagagagacagacagactatacaacttttaatttttttctctgggagaaacctcaaaatatatctgaattctgagctgggtgttgacagtcccagtacttggaaagtagaagaagggttgtgagtttgaaaccagcatgagctatgcaatgcaattccatctcaaaaacaatggcaagtgaattctgcaaagaacgtaaacttatgtaattttaatttttttcaaagtcaaaccacttgtgacgaaagcacctaataaaacgttaactgaaaggaagaactctgtatgaattcacagatatgatgaaatttagttatgatttggccaatattccttgaaaactgccagagcgtagacaaccaggtcttgtagtctattcggtttagaggattttttgggatgggggcaggagctctctatgtaggtcaccttggcctttaactcgtgattatccctgcctttgtacccgagtgctggcattagagatgtgtgacaccatgtgcagcttgatgctttagttcttacaacaccgtgccagggactgctgcttcttagatggggcttaaaagttgggaatgtcatgtaagattgagtagtctaattcttcctggcttatttctctcaataagtttttttaaaaagatttttatttattattatagataagtacactgttggctgtcttcagacacaccagaagggggcatcagatctcattccagatgattgtgagccaccgtgaggttgctgggatttgaactcaggaccttcggaagagcagtcagtgttcttacccgctgagccatctctccagcccctctcattaagttttgattaatagattaacttatgatcttttaagcttttcttgtagtttagtttttgttttgcttttagtgtaaagagggctggagatgagcttggttgctggagtgcttgcccggtatgcatgaaaccctgggtttgacacctagcatcgcataaactgggtgtgatatactcatgctcataatctaaaagaaggagaagcttcagaagttgaaggtcaactgcatagtgagttttaggccagtttaggatccatgacacccccccgccccccatatctcactataattcactgtcaaatggcttttatgatttggagtttggggatacttttaaagacagggtcttggtagctcctagatggcttgggattcacttagtaacccttgctggcctaaaattcaggaacttctacctcatcttcccaagtactgggttagtagggatgtccagcatatttagcttgctttaatgattttgctgtacttttttctgtgtgtacaggtgcatgtatatttataaaactaacataatatattttacccccaaagtaccataaccctaattaatgctattaaatgttttgtatgctgggctctgggcatactaatataaccaatattatacaatgcaaaacaattttggaatatcttctgtaaaattatcttattagtaagttgtaaccatctcagacttctaagtttgagtttgtaaaggatcagttttttttggtgacctacacacacacacacacacacacacacacacacacacacacacacacacacaggggggtggattctgagaatttagagaatttagatggttaataccagtttttatttttattctgtgtgatatttatttattaagatttatttatttattacatgtaggtacactgtatctgtcttcagacacaccagaagagggcatcagatctcgttacagatggttgtgagtcaccatgtggttgctgggatttgaactcaggacctctggaagaacagtcagtgctcttaaccgttgagccatctcaccagccccgtgatattttatttaacttactagaatatactgtgttaaaacatattttaggggattggggagatggcccattctgtaaagtgtctgccatgtcatcttcaggacctgcgtttgtaaccccagcatggagaagacagagacagggagacccctgggcttcctggcaagctagactagcaaatttggttaactaggttcaatgagagactcagtctcaaaacataagaagtgaattttttagacccaatttcaatctctgaactccatacgtatgcacatgtacctgcatataaatatatatacacacccataaacacatgcacacacaaaaaatggttcaaaagttcttaaaatgtataagagtagaaagtgtagagccgggagtggtggcgcacgcctttaatcccagcacttgggagcagaggcaggtggatttctgagttcgaggccagcctggtctacagagtgagttccaggacagccagagctatacagagaaatcctgcctcaaaaaaccaaaaataaagtgtatatactaatctttcatgcctaaaatatttatttttgccacatttttcatacctctttaatatttttctttttctctttgtgcttcaaaggaaattttgtgtcatgttttacttttcattcttgactctattcagcagtaagacgcagcatggctttcttagagaagtataatctattacaaaacggtaacatttaactgctctacataccctcttgtagctaaattcctctgttaaactaagacttattatctaaacgtaattaaatgttgatatcttataatgctccactttgaaacagctgtctttcttttgcagattagcgatgatgaaccaggttatgacctagatttgttttgtatacctaatcattatgccgaggatttggaaaaagtgtttattcctcatggactgattatggacaggttagtaagacctcgattgaagttatttttagagggtgtgtgtgtggtgtgtgtgtgtgtgtgtgtgtgtgtgtgtgtgtgtgtgtgtgtgtgtgtgtaagagagagaggagaggcatgtgtgatatatatgtgaagtgtattgcatgtacatggaatccagagaaggacattaggtgtcctactctgttgctctcttattcccttgaatcagtgtctcttgctgaacctggggcatacatactgatttggctaggctgcctggctagcaagacccagggatctgcttgtctctgccccccagtgctgacgttacaagcaggtgcaaccacatctggtttttatatgggtactgggggatctgaacttagggcctgatgcgtgcccaagtgctctcacccgccaagccacctctccagccaaagggttttttttcttgtattaattctaacttagcaactgttgagtagttgatgtttgaatataagctaagccaacttattagaataaatgttttctattttttacttgtatgtgtgagtgcctgcatgtatgtatgtgaagcatatgtattccaggatgtcagaattgtgatggattccctggaactggagttacagaccattgtgaaccactgtgtatgggtgctgggaactgaactttaggtcctctgcaaaaacagtaaggatcttaactgataaactatctttctagccctaaggctttctacttttaaagttcgtttctctttctctctctctctctctctctctctctctctctctctccctctccctccctcctcctcctcctcctctttcccccctctcgcctcctctttctctctcccctccctctctctctctcacacacacacacagacagagagaggagagagaaaggaagccttactaattaattacctagttttagacataactagtgggaatccatagtaagtaaatcaacattcttgaagagaggttagaagaattggctctcgttgtccatcgaggctgtataagattattcttctgttttctcagcttaccatacatattttctacgtagacaataccaattcaaatacactgtacgtaaagtatatgcgcacacacacacacacacacacacacacacacacacacacaagttacatattgtcatatagtactaaaatttatggactttttcatattaatacatctagagctatcatgttttttatcttttaaaaattactttacggggctacagagatgtctcagcagttaggagcactgactgctcttccagaggtcctgagttcaattcccagcaaccacatggtggctcacaaccatctgtaatgggatctgatccactcttatggtgtgtctgaagacagtgacagtgtactcatatacatgaaataaatctttaaaaaattactttaccatcagggtatatatatatatatatatatgtgtgtgtgtgtgtgtgtgtgtatgaagtatttgctatttgagagggtctcactgtttagctcagtctggcttggaacgttctgtatagcccagactggcctcaactcagcagtccccctgaaaggctctcatatgtggagattacaggtatgtgctactgtgcccagccctacatgttactttgtttttgaaatagggtatcaaatagcttagactggcttctaagtcagtgtgtagctaaggatggtctgagcttctgaacctgctacttcaactcctggtgtgccatcatggccagtttgcacagttgtgagagtagaactcaggacctcctatgtgttactagacatgttctctaccagctgagctacatcccaattcgcctacatttacttttattttttaaaagatttatttatgtatacagcactctgcctgcatgtacatctgcatgccagaagagggcaccagatctcatcatacatagttgtgagccaccatgtggttgctggggattgaactcagggcctctggaagagcagtcagtgctcttaacctctgagccatctctgtagccccctacatttattttaaagattataggctattctattcatagatgtgccataactgatttaaccagatcttcattattttgtacttagtagagtatattagagggaatgaatcttaaatacacattttgacacttgctcagctttagacaagtaaaaatcactggtcaaggaaatggtgcttagtggatgcttctgaactgtcaaattgtcctccaacaagttacatcattttatacttccaacgttatgtgagagttcatttttctttaggctcttctagtattttatatttgagaaataaaatttaaccaaaatttgccaatctagtaagcttgtttttatttgtatctttaaattttatgatagatgttatagtgtactctcctctcccctcccctcccctctcctcctcagcaggatcttgttatgtagccctaagggatctaatacttactctgtagtccaggctgtccttcagctcatgagacacaccatcatgcttggcatgtttcttgttctgaaaggtatctggttttaattttggttgagctggtgtgttggtgtatatctgtaatctcagcacaggcaagtagagacaaggattatgattacagtccagcctgggctatttagagggattctctttaatctttcctcatgccccaaaatcttacctttggtatatgaaaaatagtctccacttctgcaaaatattgctttatgaagtaagaattcccttcatagagacaaggaatgtgtcctgtaaaagtttaatgtgtaagaagtatttgttataaaagataaatattcagaatcttctttttaattcctgattttatttctataggactgaaagacttgctcgagatgtcatgaaggagatgggaggccatcacattgtggccctctgtgtgctcaaggggggctataagttctttgctgacctgctggattacattaaagcactgaatagaaatagtgatagatccattcctatgactgtagattttatcagactgaagagctactgtgtaagtataattaacttataattaaaaaaatagggccattctagttttatctatatttttttaaacttgtgcaaactatgctacataatcaacttacttgattatgtaatatatatagtaatagttggaattactattattacatatttatttttctgtgctggggtagaacccagggaactaagtactgtaataaccgagcttcattcatcctagtcatttttaatttttttttttttttttgttttttcgagacaaggtttctctgtgtagccctggctgtcctggaactcactctgtagaccaggctggcctcgaactcagaaatctgcctgcctctgcctcccagtgctgagattaatgacgtgcaccaccactgcctggcattttttttaaagttttaatttgagaccctttctcactaacttgctcacactatcctcgaactcattacgtgggctggtctagaaatttcagtcaacttgcctcagcttctcaagtagctgggattacaggcaggtgctaccacttctggccatgatcattgttgttgttgctattattattattattatttcactgatacttcatatcacaacacagaatagtaactgtagttcatgaccaacaaaaaagttgtacagtttctctgttgtcttattttgatctggattttgatttgtttcatggcactgggcaggctaatctcaaactgcatggctcaaatagtccttctgtcttaatctcccatgttctggaagtataggtatcactacacctagctgtattttcatatttaaaaaaaaacgcctaagaattgctattgaatgaggcggagagatggctcagcagtcacaagtacttgtagaggactggggtttggttactagcacctcaaagatggcttacaattatctgtagctccaattccagaggatctgtgtggtaaagctgcatgtatatgggcatgcaggtaaaactgctaaacatataaaaatagctcagtcttaagagaattctaggcctggtgaggtggctcactagtcaaaagcactggctgctcttcagaggactcaggttcaattcctagcacttacatagtggctcacagagtctgtccctttagtcccagggatctgccactctcttctgtcctgcaagggcacctggcaatcacataggaaacaaacttgcagcagaaacccccatacacataaaattaagaaaaaaagaattgctattgagacttgatgttttctcaactgtgtatgctggtggcaaatactctcactggagataattgctctgagaggaatcctaagttatttgaagcaaagccttaattattaaggttaatgattatttcttggaaatcagaaaatacttttggcctgggaccactttacctttgccagagtttgaaatgatttagagtattgacagtatgatgaaacaaaataaatgtcatctttatatgtaaaaacttcaccattcacaattatgatggtatagtttgtttcttcctttcctttccttcccttcccttcccttcccttcccttcccttcccttcccttcccttcccttcccttcccttcccttcccttccccctttttccccctttcccctttttccctttcccttcttccccccttcccctttcccctcttccccccttccccctcttccccttcccccttcccatcctttgactctctgtgcagtcccagctgtcctggaactcactatgtagaccaggctagccttgaacttagtgattcccccccttcaatcccagcactaggagtgcaccatcactgcctggttaaaatatgtatttattttaaaattaaaactgcagaaagttatagaaaaaaaagattgtctttccaaagtctactttttaaaaaatagatataattttattttatgtttctgcggtttttttgtgcacatgagtatatggatcatcttgagtgcctcatgtctgcagaggccagaagaatacatgggatcccctggaaatggagtttcaggtgtttgtgagtcaccatgtgggtgctgggaactgagcctgggtactctatgagaatagcacatacttttaactgttggaccatctctctaactcctgtcatcactttttattttgaatattaagagttttctctatatatacatgtccccacatacaactatagcttacataatcagtattagcccaggaggtatttaacaatccaagtgcaaaacagcctaaggagtccaaatatctattttattaaatgaaaaagtccactaattaaaaccactgtatttgtgtgcttttaagaaagaaactacctccagttatagttgtatggtgccatgaattatgatgtttacagaggtagtaaagtatgaatgttcatcttcaaacagtgaaatatagtgttatatatttggtgacattttttctgtccctagtgctctgtaactttcagaaaaatgaaacatttgataagtacacaaatgtgtcctattttgacttttatttcaattttataaaattctaaaatcgtcgaagaacaaaactagaccttgagagaaagggttgttagtaaacaagtaatggtttttaaaagatttattttattttatgtatatgagtacactgtagctgtacagatgattgtgaaccatcctgtggttgctgggaattgaactcaggacctctgtttgttccggcccagcttgctccaacccaaagatttatttattattatatgtaagtacactgtagctgtcttcagactcaccagaagagggcgtcagatatcattacatatgtttgtgagccaccatgtggttgctcaagacctgtggaagagcagtcagtgctcttaaccgctgagccatctctccacccacaagtaatgttttgagttttatttttaagtttgtaattatttgagtgttggatgaatctaaggtcgtgaatatgctaagcaaatatgctctaaatcctgagctcttgtttctatttagaggttgccagaaatcctagtgatggaaaaataggaatacaacttctttcttgtcactcccacttttccatctagactctaagaggtagacaaagtagaaagaaacattacggctgtatttatagaaacctgagcttctggggaaaatatatataaagtgagtgttttgcctgtatacatgtctgtgtaccatatgtgtgcttgaagtccacagagggcagaatagggtgtctggacccctagaatatagttatagactgttgaaatgctggatgctggaaattgaacctgggtcttctggaagccgttgctctgaaccaccccttcagcctcctctggggatttttggtagttgacagtagtgacacctgaatgaaggatgtgagtatactgtagctgtacagatggttgtgagccttcatgtggttgttgagaattgaatttttaagacctctgcttgttccaggcaactctgctcactcaggccctgcttgttctggcccaaagatttatttattgttatacataagtacactcactgtaggtgacttcagacacaccagaagagggcatcagatctcattgtgggtggttgtgagccaccatgtggttgctgggatttgaactaaggaccttgggaagagcagtcgggtgctcttaaccactgatccatttcaccagcccatataacaactattaaatgaaactttttttctctttatagtgtccctttaaaaggaagctgtttccttaacaaaaacttcagggaagcataagctgaaacactgaatgggactgtggaaacgtgaacatcttagcgtgcaagtgttctgtgtgctttggagttctgttgcctcggaccctatagcaatagcctttggatcacacttgcattcttagatatttattccttatgtctgtcctttgaaagaggaagtacttggcattgggctgtaataccatttttctacagcaggtgtcagtatttatcagggtttgttattactatgtagcactcagtgtaatgccatcttaactaggttcaggttttgtacagttctttttctttgtgtcattaatcagttgtgtgtgtttgaaattctgagttttaggctaaactagtttaaattaaaaagccaacatttagtttacagcttggactagtagtattttttgtttattttgttcttctccactccccttaaacatgctaggtaaacattctaccaactgagctatcattttaaaaaaaaattttgagatagggttttgaataccgaataaaaatagttttataggtagtatatttgtctgctacttggtgttactaattagtattgatccacataagaatatattagattgtgtcattctttgtaatagtttcatagtattatttatgtgtattaatttctttaagtaattcccttttaaagacatgctgggtttttttttgttttgtttttgatgactacctgatatagtgaacatttttgaatgtttcccttgcatgtttgtggatatttttgtaacactgattcttggaaatgggattgttagatcaaaataatttgcatgtttataattttaataggcattactatattttttcaaaagaggtcatattgctttctgtaatctaaccagcagcttgagtatttgtttctcctgaatgtattatcaggcttaattgctgtaaatgtggatgaatgaacagtagaatcacatgtagaatctgtcaggtggccatcagttgtctatttgtattctaatagttcttttttttaaagagatttgtttatcttgcttcatgtgtatgtgtgaatgccagcatatatgtatttacaccatatggatgcctgatacatttgagctcagaagaggggatcagatcacctgaaactggaggtataggcatatgaactgccatgtgggtgctgggaactgaacccaggtccttggcaagatcagcaagtgctattaattctgatctctctcctgtcccacctggtaggttcttattttgagcagaatttacattaggaatagtggttacagatctttttagttggagttcatgactagttttttatcctttctaagaatacaggggaaaattatatatattcctgggggctgagagatggctcagcagttaagaacactgtctcttcttccagaggtcctgcgtctgggaattgaacgaattcccagaaaccacacggtggctcacaaccatctgttatgggatctgatgccctcttctggtgtgtctgaagacagctacagtgtattcatatacataaaataaataaatctttaaaataaaatatattcttacattttcttctaatccacttatagttctattttttacatttagattttagtccatctggaatttatttttgtgcatggtgtgaggtaggaaccatgctttattttttcccaaatggataagtaattgaccaaataccatttgttgaataattcatctcttaattactgactcaaaatatcatctttgtcatatactaaattctcatgtttttgggtctgtttctggattttattgggttccttgaactttttgtcattcactgtgctggttctataccaagctaattgctgcagtttttggtatgctttgctgtcccagtagagtaagtccacactcttttaatcatcagttttctgatttaataccagcacatccaaattatagctattcccaccaactctagtgagtgttaatcactctcctttgaaacctctgtaaggttttctgctaatttctctacaagcagaaagtgggaacctaagaaggatgttctaatagactagtaatcagacctggtttctcagacagttctgaagatgacctggatatgggcatatccaggatatggacatattttatgggcatatcttcagggttgaatgtgatatagaccagctcctacacttgtgtgactcacaggaatggttcagggccagaagcagacacctgtcatgctaataaattgtcctttgtagttgagaagtacctgattgatgagtagctataatatgcccactcagaaatagatgtactctagttttagaactcttcagagcctcaaatactagtaatggtcaattaagatttttaatttttactaatctctatgtaaaatttacctagtcattcatttctagaaacctaattcttatactttataatttagaatagcataattttgtggccattagatagctaactttttaaatcttatagcttatatctaataatttgagaagcttatatatatatacacaagaatttgcatttaagtgatgttcttttttcaactagaatgatcagtcaacgggggacataaaagttattggtggagatgatctctcaactttaactggaaaggtatgtaacttgaagaggaaagaaagaacatttttataccaagaaacattagtaactgctttcaaccacttacttagaggtactttattagtaaaagtaagctggtattgtttaactcttagaagtacttgatatagattaatattatctcctggactttatagccaaatgacagcagaatataccattaaccctcacagtccatattgctaattactgctttattttggttttttcgagacagggtttctctgtgtagcccaggctgtcctggaactcactctgtagaccaggttcgcctcaaactcagaaatccacttgcctctgcccccaagtgctgggatcaaaggcatgcgccaccactcccggctttaattactgctttctataatactactttgaaactctaatttgggatccttcagaaaatatagctggagagggacagtcttttttttttaatagattcaaatgtagtttcatttgaaggtgtgtgtgcgcgcacacatgcttctctatgtgtatttgtttttctaagacacagtcttacttagagtctacaccatctttgaacatctcttatgtaagtcaggttggccttgacatggtggtcctgcttcagcctcccaaatgctgggattgcaagcataagcccccatactagactgtgtatgttttctaagcggctggttattttttacttgtaggcactgtgccatatataaatgtattaacctggttactttcacagtaatctagtgaaggcagttatatttccattttgcagatcaggaaatgaaacaatacacttacagtttcaaaaactccttgggattatgagatgtaaacaatctctcgaagtcacgcaaccaggaagtagaaaagcttgcatgctgacaccaaattctttctttcctctagcttttaggtttagtgctcactgctttcttgcactacttactcactactcactacttccttcactgaaactctgtagggaactttaacataaaatgctggtattctggaggcctgtatcagggtcacgccaaactaatgtcgctgtcagcagtgtttagaacctccaggggcgaatttgtaatctgttcgttctcgctctctgcctctctgctgtccatttggtgtacaactgccagacctctttcccttttagcatggtttgtccatatttagaagctattcgaaacctgcccttctataatccgttttcggggctggcaggggcctagccttcgaagcctgctgggatttagtttgaccttcttcacctaatggctctgtctctacacagcgctgtgatcttaaacagagctctgcttctaaaataacttctcagagcagccacaatagattctttttattgtggaaaacatcaaggaatacaaatttagtaaagttaaatcttgatgatgagattatgggtttatttaaaacattctaattttttgtggaaatttatcttatgtgtatgcaagtacagacataatgcacacattttcccattaatacttgaaacggtagtctttggatccaaaataacctttattcaaacccctttctcttgcccttctcaatgtttactactttaggtagttcatttgactactcagcctcattgtttccattattaagtagacatgtagctatttgacaaaataaactctcagtggtagcagttctctctctctctctgtattagaacaatagtctttaaaatgtcccaaatttttatatctttttaaaattttctatgcatatcctgacctttattttttgaaagatttacctacttatttaatttatttatttctatgtatgtgagtacactgtacagatggttatgagccttcatgtggttgttgggaattgcgttttaggacctctgctcactccagttggtcctgtttactctggtcaactccatttgctcggtccctgctcactcaggcccagagatttatttgttactataagtacactgttgctgtcttcaggcacatcagaagagggcaatggatcccattacagatggttgtgagtcaccatgtggttgctgggaactgaactcaggacctcgggaagagcagccagtgctcttacccactgagccatctcaccagcccctgacctttactttaaagtggctttttcctgcctatagaatgggatgcagttgtagcttgtttgccagaagttctgggcttacattcttagacctgtatagcactgtaagatactgccttctatggtaaactactttgaaacatggacatattagatgtttttcttgattataatttccttttaacgcacagctttgattctccaaatgatttacccacagcatatgtatttttaaattacacttgagttttggtagtaatttatcttgtaaagtacttaaactataggctaaaggagatgaagtatgtctttagttactttgaatacacacaataccaaggcaacttataaaagagaacatgtaattgggagcttgcttacagtttcagagggtaagtctgtaatcatcctggagggtagcctggtggcaggcaggcagcatgacactggagcagtatctagagcatacatattacatgcacattggatgcagagagtactagagactagacccggtgtggcttttgaaatgtcacttttgaagcccattcccagtatatgcctcccctaacaaggccacacctattaacccttctcaaaaacagttccaccaacaagggatcaaacattccaatgtaagagcctatggggggaatttttcattcaaactacaaggtgagaaagaattttgaattttcatggactccaatggaggctatgtactctaccttgataatcactaacttaaagtaataaagaagacttggcaattctgatgttatggttgtttggcagagtgatttgagaactatagactaacagtataaaataaatctgtccagtgagtattgtgggcatgtgaaatgtctgtcaccttatctctctaactagcaactcagaccaggcatgataaatcacaattgcaatcttactattcagtaggttgaggcagaaatggtgctgccagtttgaggacatttttggctacattatgagttctaggtcaacctgggctacagagtaaaattaactagaagattgagttggggttggggtgggtttaagggctctggtggatgtattgatatcttttcccagtttcccaaatacgcacacaaccatatactagttttagcttgatggagaaataaaaaatttgcattttatattatgttagatgcattattttaaaagacatttatacagattacagttcttggaatattagagtcaaaatacataaaaggagagctggttcaagtttttcagtttacatatgagtcactgagatcctgagaaatttcccaagtatgaatttgggtaatttcttagaatttgtttaatgatttcactgataattgggaatactgtctcacttcatatactaattttcatttctctgttttcttctagaatgtcttgattgttgaagtaagttctacgtttacttttaatatactgtctacaactttctaacttagtgtgtatggtaataaaggtaagtcgggggcgcttgtgttttctaaccctaagagaagccaggtacagtagggcatgtctggaatcccagatcctcaggaggctcatgaattcctgggttagcctgagttgcatagtgagtttaaagaccgagaaaatccttattttaaaaacaaaacaaaaagacacaaacaaaaaatatattttgtaagtgatgtgttttgctgctcatgaaaaaagttatatacttcctttttcagttttgatttttttcttttaaaactagttataactatatagagaagggtgtgtgtgtgtgtgtgtgtgtgtgtgtgtgtgtgtgtgtgtgtgagtgagtgtgtgatttcatgtgttaagttttattttatggaatgttacaagatttttaacatttcatctaaataatataaaagtatcaaatatttctggcaagtgagtggagtaaagactcaaaccgctactgtctggagcccattgcttttcaatgtgtaaaaaaccaaaagcattagccaggagcttatggattcagaatctttgtgataaaaaccatcaatttttgtttgagcaaaccttgagctgattccgatacatgctgagctttaagacccattgatttactcagaagaaaatgagaagacactgtctcattaaggccttctttggctgtcctacataaaaccgtacatttccatgtcttcatcttcctattcctttccatacttttttttttatcactgcctacatgcagactttattttttgcctgtggcttccctgtttcacatctgtctgacttgctgaactctatacatgtacgtctataccacagattgtggtcatcctcctaccttgactctattccccagttcttcaggatgcatcttaatagattctcattgtggcttcagaatatatatcagcttcattccccatcatttttcattctttatactttttgcatttcctagagcatcatttttctatcttcattttctgtccctagtagttgcttttcatttttgtaatctcttgtttcctttccactttttgtagtatttatgtttgtgcattgttttgtgtgtctgactgggtatgtatgtgtgtgcaagtatgcatgctagtgcataagaacagaggccagtagaggatgtgtgtgccatcctcttgcacttcctattctatgaggcagggtctctccctgaacctgaggctcacattttcttacataggccggaagctagcaaaccccagcaatcctcctgcctcctgtcttttcagacctgagttgtgatggaagcaggatgcctggattttgtgtgagtcctgcaatgcaaactccagctactatagttaaccactgagctacctctccagccccaatgcccctattttttttttaaacaaaagaatttttattctttcttttatgtgtggtgctagggatcaaacccagagcatgctaaataagtgctctaccaccaggcgtcacccttgactctttagggttttttgtttctttgtttgtaagaggtaggtaaatatctcaggctagactcttactccctccatcccacctgcctgtacctctcaagtcaagtgctgggattataggtatctaccatcatttgcgtctcttcttccctccctctttctcttattccatccctgctgtcttcctcccttccctccctccctctctcctttcttcttttcttcttttctcccttcagcatgatcttgtcatacaactcaagatgagtgtttttccttctatgagacctggtcttaatgtagcctcctcatctgtcctgggtctcactatgtggaccaggagcctaagccttctgaatgctatccattacaattgtgtgccaccatacctgccctccaagctggctttgaacctactgtgtaacctgtgctgcctgtgaactcataacctctctgcctcagcttttcacatgatggaattataggtgtgtgccaccattggttggtttgtatttctttttaagatctcttctcttttttcaattagttttagtctactgcattttgattatgtttgcgccctctctctactcctcccagatctctcttcccttccctacctacccaactttgtgtttctttatttaaaacccatcaacacaatttgtgctgctcctgtactcttggatgtgtgaccatccatcactagaatggtcaacccaccaggagacacatccttaaagaaagctgagtcctctagccgcagctatcaatgatagcttcctcactatgggtgggacatgatgtccacctcccccactccatgctgggaatttgtctgtctttgaccctgcacaggttgtgtgcatgcattctcaactgatgtcagttgataagtgcaaatgttgtactgtgacagaaaacattgtttctttatagttgtccaccacctctggttctttctctttaattaaaaacaaaacacctttgtgcttgcatgagtaagcatgacacagaatgcacatggaggtcagaagagcgctttgtataactgcttctctcctttaccacttacatggaatctagggattgaacttagctcactaggcttgcatggtaaaatgtacccacaaagccagctatctgggcgccgttcttttaagtaacacatctcatctccctccctacagagcaatcagtatccttcgccatcatttcttatttctttctcccccttctccactttctaaggtttattttttgaggacataggtgagtgggattacaccgtaattgccctttgtgtttgaagaggatctcactatttctctctggctgtcctggaacttgctatgtaaaccaggctgtccttgaaccatggcaggtttataaacacacacacactccacaaataaaataaacgtagctttttaaaaaaagttcatgtaggatgatagcactgtacagtttctggtgtgattggccagatgagggacaatttctccctgactatccaggggtagctctcaactacaaagatcatccctcaagtcctacgacacagccctgtcacagcatcacagctttttaaaccagcaggagagttaggtttcgagccctgatattcgttgtggtctatctgttttatggatttttatctgttttctgattttttttatggtactggagaatctagggcataatgggtgccatgtgggtgttttatcactgataaagtcattttatatagtaaaacttattacttagatgcttttaaagataatacaaagtgggctggagaaatggctcagaagttaagagcattgtctgcccttctagaggttctgagttcaattcccagcaaccacatgttgactcacacccatctatagttagatttggtgccctcttctggcctgccagcataatgcaggcagaacattatatacataataaatctttctgtaaaaagataatacaaagcaatgtttcttagagtatcaaagtttgggatgttaagagtccctatctttaatttacaaaaaaacctactatatcttttacagaattaaacctggtaatttatgcctgcaaccctacctcttaggagtctaaagtagggggatcttgagtttaaggccaccaacctgaactacatagcaagaccctgtgtgaaatacaacagaaagatttgtgtatgtgtgcagtgcttacatgtagacgttccatttactgtttttgaccttgccacatctatgcaatctagttctggggactgacattacctctgcttacttagagccagataggttacaagttccagactatctctgtgtgaattgtggtgagattttgtgtatactaaaaatgaatggcattgtgtcgtggaatactagaatattgcatttggaattgtatgtttgtaataaggatgattttttttaaattgtggtggttttatttaccattaaatgtctcttttctttttaaaaggatataattgacactggtaaaacaatgcaaactttgctttccctggttaagcagtacagccccaaaatggttaaggttgcaaggtatgtatgccactttaaagtagaatgctttccttatttagaatattaagtgatagcttctttgtaaggagacatgctttttcagctttcgttttatcattacagagtaatgtaatcttaaaactcaagacagtagcctttgtaattttattgtgtattaataagccattatagtcaattccttgtctaatacagtatatataaggccttggatctagaactacctcagatgctaaactccctagatgttcaggtccttcataaagaatgtcagatgagctgctgagatggctcagtgggtaaagtcatctgctgccaagcctgacaacctgagttcaatcctgggacgcatgtggtagacagagaggactgactccctctgacctccatgtgtgccacactcaagtaaaataagtgcaattgttaatggcaggagtgtttgcacagaatccatgcatactctcccatacactgtaatacctaccacagtgttaatacatataattacgctaaattatttagggaaatacatatctttatagtatgggttcttagaatattgtttatttatgtgtgtagtatatgtattatgtgcaggtgagtacacactcatcatgcagatatgtgaagggcagggcaggactgaatatcctgtactgccctttactctgttgcctgagacatggtctctaactgagctgtaagctcaaagttttagccatgcaggctcattggtgaggtttttgaatctatctctagccccagcgctggggtcacgaacacatacagccatgggcaactttttaatgtgaatattaggagtcaaactcaagtgcttgtgcttgcagaccaaatagtcttatccatggagccacctccccagtccctagaatgtctagtcttgatacacaagtttttagaaatggaactctcacatatatacagagctatgtaacaattgctgtttcagcatgttacttatatcaaatttatcctgagtgacatggcatatgatctgaggtccccttgtgaaattgaaataaatcataccaaggtagtaacaagtggtggacactgcacatctgaatcttctggattagagtggtgagtgaggcattctattttgtgttgtcactgaaattgtaccatgcttgcttcctttttctgaagtctcaaatcttactatatctgggtatttggcttgtgctttcatagttttctgtttttatccttggttatagtttgattctacaacagttgttatctccaccttatagataaggatactgaagcctagggaattgcccacagacacagagctaataagctatagagagaagatttgaacacagggaacctgtcacagttgatgcttctgctattttaagttgggttttgttgttaaaagtgacatcttttttgttgtgttgttgctattgctttttgctttatttttactttatagtttcatttttactttaatatctttgactgctctgtgctttttgtgtagaggagaggtcgggtcttttatttttgtcttttcctgaatgattaattggctcttaattttttttaaagactttacttatttatttattatatgagtacactgttgctgtcttcagacacaccagaagagggcgtcagatctcattacggatggttgtgagccaccatatggttgctgggatttgaacccaggaccttcggaagagcagtcagtgctcttacctgctgagccatctctccagctcccggttcttaatttttgaaaatttacacttatttattgtggcaggaatattggcacgtgccacttgcacttgtgttggtcagaggacagcctaagattctttctaccttgttggtcctgggtcggggtggaacatagtttggcagtcttgatagcaatagtctcatatacactgtgctatgtctgctgaccaattaaactagctttataaaatcgttttaaaagatcaaagtatctataaagtctttgaatctctataattttaataaaacttatttcagcaatttgtcttcatggactttttggatagatggcacaaatatacctcagtgagtttttgccatgctgaaggtgagatgtgcccagagaatacttgggtaatttttgatgatgtagttgtcctacgcaagtgtgttttggtctttccccaaactaaaaattaagtcttatttggtagtattgtaagatagcgtggtcactctagaaagcagttttttttaaaaactgcacagggaactaccagaagaccccagacgttgtgctgagtacttatccctgagaagtgaccatgttgctataaaaatctgtattggtttatagtcaggtatggtggttcacccctgtaatctcagattttggaaactgaaggcaggaggatcacactgaatttgagacaagcagcctgagctatatagtgaagacctgtcttctatctccctactcaaatacgactgttcacgtcatttgtgataatgcagaattaagaagaacaaaatttgaacaaatttgaagcacatttataccacgaaatcagcaataaataggaacagccatcaatatgcagcagttgagatgagtgttactggagctgtacagtgcttcaggaggacataaagcaggtgttcgctctttctgtttaaatgcttacctgtctcccagttttgatatgcccaagatttttaatttttttcaaggctattataatagtaggacaccaaaggcaaagcaataaaactgtatgattctacttatataaccccgtttgaaatgacagatgagaatggattaggggttaccaggggttgagagagaatacaggagggagccttgcatgagtcagagtatcttgattgtggtagtgattagactagtctctatgtgattaaaattgatgaaatctgtacaaggccgcttagttcaccaaggcccatgttctggttctgataatctgctgaaatacgacactagagacctttgtgtgtgatttttttttttcttttgtgacttcagtgaaaacaaaaataaaaattttgaaagccattaactttttttgggcgatattagggtttcaactctggttgtatgcatatatgacaagcattagataactagcatttaactttgtagttttatataattatgtaatcaaactacattcataaattcatgatttctataaataataaaggtataaatttaaaaataaaactgcttaaaacttacatttttagcaagagtcaagtagttgaaaatgtaattaactaaaaaattgagtgagtaactcagtggtcgagtacattcttaatgtgatcaaggctctgagttcagtatccactgcaaaaaattcccattggtgagccagttattacaagtcctgatgaaagagcatgtcttaccttctttagttaggattctgctctcagaagcatcttaccaggttccaggtggtgatcagtcgggggccttgaccttcatgtgacctctctgtgatttagttcttctccctttcagccttcctatgggtctgcgaagctgtccttattctgaatgcagatgatactacttaagaacactgatgttttctttgtaatgctctgtagtctttccatatgccacatgtaattttttgtaattaacagcttgctggtgaaaaggacctctcgaagtgttggatacaggccagactgtaagtagatgccctttggccaatcatttatccatcttataactgaaaaagttaactatgaaatggcttagggttactttagagaacatttgtgaggaaggtacatttgcaagaattagaattgaaagtattattttctctaaagaataaactatgattatttatttacagttgttggatttgaaattccagacaagtttgttgttggatatgcccttgactataatgagtacttcagggatttgaatgtaagtaatgcttttttttttctcgctctcatttttcaaaaacccacataaaaattgaggaaagggaagaattgttttctccttccagcacctcgtaatttgacccgactgatggttcccattagtcacataaagctgtagtcaagtacagacgtccttagaactggaacttggccaggctacggtgacacttcttgctggctgaagtagttgaacagctttaatatacaacaactgtcttattgttatttcacatgatatagtcataagtaagaaataaacgattcagtttcaattttgtaattgactctgcttcagatccctgcctcccattctggaggcaggaaggagtcttctgggtgagtttataagcatggtccaggagcagttagaaagtctccatgggcaatattacctaaagcgtattttttatttcacttacctgttttgatttcagctttatgtttctcaaagttacgtactaagacaaagaaaaagcaaactaatggactatagttctgctttgttttcaaattatgtcctcttcaagttgctggtccaaaataccttgtttggtagaaacccagacaacgtaggaggaccctttaatgctgttattacctctttagaatccgcttttctaacgagaatgtcttttattttatagcacgtttgtgtcattagtgaaactggaaaagccaaatacaaagcctaagatgagcgcaagttgaatctgcaaatacgaggagtcctgttgatgttgccagtaaaattagcaggtgttctagtcctgtggccatctgcctagtaaagctttttgcatgaaccttctatgaatgttactgttttatttttagaaatgtcagttgctgcgtccccagacttttgatttgcactatgagcctataggccagcctaccctctggtagattgtcgcttatcttgtaagaaaaacaaatctcttaaattaccacttttaaataataatactgagattgtatctgtaagaaggatttaaagagaagctatattagttttttaattggtattttaatttttatatattcaggagagaaagatgtgattgatattgttaatttagacgagtctgaagctctcgatttcctatcagtaacagcatctaagaggttttgctcagtggaataaacatgtttcagcagtgttggctgtattttcccactttcagtaaatcgttgtcaacagttccttttaaatgcaaataaataaattctaaaaattcgccactttttgaattctttcgtgtaaaagtccttaaaactaaggactgtctctttaaagaaattctccatgtctgtcatttctctacagattaattcagtacagttttccatgggttcccctttgcttacgttttatagctaatttaatggtactcctcagcaagtattgcaggtcatggttatctggtggaatgggttggtagagcgagggaagcgtctacctactggaaacagtaaattacagacactcagcaccatttcctaacctgtcttctattaaaaagaacatgttttctcctcgttttctgtgaggttgttcagactacaatctgacctatagtttgttttcaggtatgtcctgttacccttttggtttggataaagctttattgaccagagaacagtaacagtaaaacattgttttgtcttttgggagtaagaaatatttgggaccaaaagtcctgtttgccctcttgttatcacgaggtatgagctagcaaccttgtagcacagtgcatatttacattcctttcagactgtgttcttatttccagcagtgaagtggggaactttaaatgataacaagaacttgctgcagttaggctggtgaaatgggtcagtgggcaaaggtttgctgccatccctaggagcacctgcatgctgaaaggagaggactccagaagttgtcccctcgcctccacacacctactaagctgacaaataaatgtaattaaataaaaaggttgccaaactcctctaacttcctaatttacaagatatgtttccttctgttttctcatttcttctgcatagcctggtggtattaatgtgaatgcagtgtcaagtaactcctgagtcctttcctaccataaaataacacctaccgaggtccacctggatcctctagttaacactttgctcggcccccactgcagagccttcttagtcctttcattccgttgcactatcacctctgttgggttgagccatgtaagatgaccatttttttataggtaaagcaattccctacttggctgttggcagtttgaggtgattaaatgaatagcatgccatgtagtttacatttgtttgtttgtttgttttggttttttttgagacagggtttctctgtatagccctggatgtcctggaactcactttgtagaccagattgacctcaaactcagaaatctgcctgcctctgactcccaagtgctgggattaaaggtgtgcgccaccatgcctggcttgtgttcattttttttttttttttttactatttgcctaaccccctgctagaatatgagttccataggaggcaaaccaccttgtttgtgacaaggtctgtctattacatacttccagctgtcctagagctcactatgtaaaccatgctggcctcgaactcacagccagccatctgcctctactttcctagtgctcaaattaaaggaggtgtgccaccatgcccagcaggcaaaacatttttgaactatctttttgtctatactgaggcagggctctcttaatccagactagcttcaaactcaggacacttctgcctctgcctgccaagggtgtggattctagctgagttgccatctgtcattcactggtgtgcattagatgagttgatcagtgccttagaaaaataggagcttaggggactgtcgagatggctcagctcataaagagcactgactgctcttctgaaggtcttgagttcaaattccagcaaccacatggtggctcacaaccacccataatgagatctgacgccctcttctggtgcttcggaagacagctacagtgtacttatgaataataataatctttgggagtaagagagtggggttgactggagtggggaggggtgaccagagcaagcagaggtcctaaaaattcaattcccaacaaccacatgaaggctcacgaccatccatacagccaaagtgtactcacatacattaaataaataaataaataaataaataaataaagctttttaaaaagaaaaattaggagcttacatgatgattgttgaatgagtaagtagctaagagctgtgtagattctctactctttacttaatttggcatctaattactgacatttacaacctggtattgggagtggtgttgtctttttctcttccatttttggaggggtgcactccttccataaagggtgtgtggaggtcaaaggacaactttggggcataggttctcttcctcccaccttgtaggtgtcagcacgaattcagggcatcaggcttggcagcagtgcctttacctgctgagctctcaccagcccactactgttttcttttaattattttttatttttattattattttttgtttgtttgttttggtttttcgagacagggtttctctgcatagccctggctgtcctggagctcactttgtagaccaggctggtctcgaactcagaaatccacctgcctctgcctcccaagtgctaggattaaaggcgtgagccaccactgcccggctccagtactgttttcttcatgggcctctctgaagcattcattagctacaataatgaatggtggctcacaagcatctggaatgggatccgattccctcttgtggtgtgtctgaaaagggacataaataaatcttttttaaaaaggaaagaaatagggcaggtgagataggaccttgacccgagattaagagcactgactgctcttccagaggtcctgagttcaattcccagcaaacacatggtggctcacaacactcagcaaccacgtggtggctcacaacactgagcaaccacatggtggctcataacactcagcaaccacgtggtggctcacaaccatctggaatgggatttgattccctcttgtggtgtgtctgaaaagggacataaataaatcttttttaaaaaggaaagaaatagggcaggtgagataggacagtgacctgacatgtgacaaatgcccccacaacattagttattactggaaaaaaaatgcttcaaaagttattgttaaaccatgacagaacccagatttagcccagatctgcctgatacttgctacagtttatcatggaggatttttctgtttttagtataatgttttagctggttgtctaagccaaccagagtgtagctaacagctgggaaagaaagctgcatttatttaacctaacttgagggtatgtaatgctgataattttgttgagttagagttctcaataggcctaagttggtcttgaactgaattctttttttttccgcccccacccccacccacctctatcccttgaactgaattctgttgctgaatgtctttgtgcttttgatcctcctgcctccacctcccaaattttggaatttaacccagtttatgtagtgttagaggttgtaccgagggctttgtgcatgttagacagtctacttcctgagctatattaccaaccccctgacgatgtcatttttaaaaaccaactttccacaaatcaaatatagtcggtatgtaagacagggaaagggagtcactgagaggtagcagtcattttcagggtaacaggaggggtaaaatctgaaaggaagctgtactttgctgtggctgttcagtataggagcaaaatgcctacaactaccccacctcagtcctccaggacttcattttcattacagtcctgcaaaatggatgctgagaaagaaaacaaaattgcgttaaagttgttagaagttgttagagacataggaaagcatatatccattttaggaattataactggagggttttttttttggggggggcaagggagcagaagcccagggaagagcatctccaacaagctagactcagccacccacccccaatatgcactaaaaaaaaaagtcattgtgagaagatttatttaggggctggagagatggctcagcggttaagagcactgactgctcttccagaggtcctgagtttaattcctagcaaccacatggtggcccacaacactcaactaccacatggtggctcacaaccatctggaatgggatccgattccctcttctggtgtgtctgaaaagggacataaaataaataaatctttttttaaaaaaggaaagaaaagatttatttaatgttgcaacgttgagagggataaaggggtctagtgactccaagataatccagagtacccgcatgaggtttagttcgagatagaagaagctgggggaaaatgtaagagaggcatgattccgaagccctgaccaagccaggtttggttttgcaagatgagcccgagaaacccttatccctgtcatcgtttctcccttgagggagttatcttggtttctgcagctatcactctgctgcagggtatgtcgtcatggataattactcccacctgtcctgcaagattccgctgtcccatgattcctaggtaactcgaccaaaggttaaggatgacttacctctgtcctttcagccagacaaaatggaagcagaaatcccaggtttttagtaaccttggttgagtctaagtgaggagacaatacattttttttagatttatttatttttcttttatgtatatgagtacagtgtagctgtcctgatggttgtgagccatcatgtgatttctgggatttaaactcagggcctctgcttgctccagcccaagacttatttattactatatttaagtacactgtagctgtctttagacacaccagaagagggtgtcagatctcattacggatggttgtgagccaccatgtggttgctgggatttgaactcaggaccttcagaagagcagtcagtgctcttaactgctgagtcatctcgacagtccccgagataatgtgttttaacagaaacatctaagcacgtatttcaagaatattgctgcctaagaatgtgttgctggtctgttacataaaagcttttgcacttctcctttacagattcttagaatcatctgtaaatattggtaggtccctattttaattctctatggagaggatttatagatgttaactgtgttaccattaagcttgtaaggttaaccaagtggtgtccttccctgcattcaagattctagaaacatttttctctgttccatgtgttggggaatacaagctagattaattctagttagagaaacagacattttttaaatattattttgtttttatttttgcaacagggcttcttctggccagactgatattacagatgtgtatctgctaccaaaaccaggcttaaaaatcagactgaacccaaggccttcttacacatgctagccaagttctctaccattaagctactccagctcaaagacaacttgtgctgtgaaggaaccaggagaggcaggccttgttcttaggtgattagggaaggtgatggcactgggaaggtggagatagaaggatacaccagaagagtacatcagatctcattacagatggccgtgagccaccatgtggttgctgggaattgaactcaggacctatggcagagcagtcaatgctcttaaccactgagccatctctccagccccagaaattcaaaagctatcctcagctacataagaagttccagatcaggatggtctatgtgaaaccctatctcaagaaaccaaggaaacaacaaatcctttagttggagctagaagtgatggtgagtgagtactgtttatttcagctactcacaaggcaagggcaggaggatcatgaccccaggtgttcaaagccagcctgggcaatgtagcaaggagcaatttcaaagacaagaactaaaaggaaaggcaaaaaattatatgctttagttaaagtgagtttctcttctgctggaatcctttgtgggactcagttttactaaaaaaataaaataaaataaaataaaataaaataaaataaaaaagccaagtcctttagtgatggagaaactattcctcattatgacaacctgacctggtcatgtccaagcaggctctgggatctctgagctggcccccaaattacttcaagccctgggactgccataaatgcctcccagctgacctctagctcctcgtttcagtgccttaactcctcaccctgtacttgaagtcatttgtgattcacttcacatgaaaagcatgcatgtataccttattcatatagaggtcagaagacagcctgcaacagttggttctcttctaccatgagggtcctagaatggaagccaggttcttaggcgtggtggcaagtatccttgactactgagctagcgttccagccctatttttgtttatttttactatttttcaaatttttattcatttattttacttttgagaggaagatgatcttttccaagtataaatcatatcacttccttcgcacttcagaaaacaaactgctctgtggcctacaaacccacatataagttagcccctgctcacttctctcttttatccctcattactccttcgcctccaccacagcatcattctaccagtccccaaacctgtctcagcatcctgctttcccctgccccttcaccctaacattccttctcaccactcagcagaatggctgcttcattggtcaccttggtgaaccctgccctgaccactggaaccacctcaacatcacattccattatagttcttagcattatcagagccaagccgtcctacaaagcaacacctacaaaggctagcttgggctcatcatagatttgcctgaaaaagaaaaaggcccaagtgaatacagagacttttgggggtttgttttgtgttgtttgttttttacttagaccatggaaaccagcatggtgtcagctccccagatcccaggtcccacaggattgctcagacagtgggttgctgtcacgggaggtcagttccagattccagcctaatgattttatgacctgcagctgtactcttattggggaggcaaggtcaaaagtcccatgcctttccagaacccaggaggcagcctccacaagatagggaggtgggtgaaaaaacagccttgggacaactcacaagactgttcaggggaggctctggggggcatttcttcaagacagggaaagctgaagttatccttgccgatatgtgtagagaggtgttcctgacaccaccttctatataccttaaatcatctttatattaccagtaatatatagcactatatgaaagttatgtaaaaagttgttagactgtattgttgagggaatgaaacacaaaatcctgttcaatatggatctgattttgtttttcaaaaatttacaatctcaggctggttgaatccaaacattcggaacccacaggtacagagggaaaacatttttggggggttgagggtgaaagaacccctaattgttggttactgagagtagttaatattttttaccattattatatgtctgttagacagtagaactgctttgataagaacttttgttttttttctttcatctcaactttacagataatgaaatgcaggtccagagagggttgaagattttcccagatcacgcagctagtaaatatcagataaggaatttaaacagaggcaattttattccagaatctttctgagtaatgcactgtcatttaagccaaattttctgtagaaatgaatacactaacaatagaggaaatgcattaagctgattgcaggtaataatcagaaattacttagatatcatacatggcttttggagggcccggctgaactttaagcatgccttttgactttctgtggcattagtcagtattttcaaaggcttatagacctttttaccaatgggctcttcacatttttcttctggcctattttacaatcttgtgggcagcttcagacaaaataactttttcgtatggaggattatgggtgctctttgccatttgtaaatgtgaattttatagacacccccagccacttgaaagagaaatgcttttaattttttttatgatgatttgtaacctcaagtgtttctgataaactgtcaaattaaatttcaagtttttgctttatattgtctgaatgcactttgtaacgggcttcctcattctgactcgtgactgaagtgactttcaaacttgatagcttttcggcagcacttcctttcctaacacccccgccccggctgtccccccattcaaagatttgcttgtaacacacatggcttcctttatctagaacttttactttgcatacatagtgtatgtagtgtgtgtgtgtgtgtgtgtgtgtgtgtgtttgtgcttgttgaggacagaagttgtcatttgatggtttcctcaatcttcattttatttactgaattggagttccttactaagcctggagcttgctgatgatctagctagtctagctctacccagcttgcccttgaatccatctcacctccagggtgagtgttggaattacatttgggccccaatgctaccagtttttctttctttctttttaaaatgtaagatctagggatcctaactctgatcttcacttttcttctttctccactgagccctccctggaacttactgctctccattttcccaccagcccttgtgatctcttgtcacctgtctctctctttttggaacacaggacattacagactcacctgtattgtcctttccctggtctagactcaggcattttctgatgagccctggttcctttaaaaggaaatggaattagaattgaagatctgggcactggggatgctcattgctgttggaatgtcattggttgtagggtctctcaggggacagtgccaggtaaaacaaacagtcatactaatcctttctgtcatatgtcaaaatctgtttctgtgtttgtctaggtacaggttaaagtaaacacacatctaccctgctccacgctagggtaaattaataaacaagtttcattctagtttcccctcttttctaaaaactctatttttctttaagcaatttttatttgtgtgtatgatgtgtggagggtacatttgtgccacagcatgtgtgaggaagtcagaggatcactgtgaagcagatcctctcccactgttatgtgggtattgatgattaaactcaggttgtcagggttacacagctagctctttacccactgagaatcttggcagctcctctttccttattttcaatttgtttcttcaacagtgagagctatgattcttggtatatactctattccctcatttactttaccttagtatcatgaaattacacatactggtaacaagctgactagacagttatgcatgtatagatcttttattcctaaatcttttggtacccaatcaaaacttcatgttttccataaccacttagttattttcttctcccccaatttgaatatcactgtgttatttgtagcagtttgcttggctggagtttatatcctattatgccctcatttaccattctgtaattttaattcctattaggacaaacccaaacaagtcagagccatacagaaaggtctagtcaaaggaacttggttgtgtgtcaactgttttcaaagaacttgatactctcctcatgtctcatttgccagagtggatgttcaagcttatatttttaaaatatgtgccatatctactatctatctatctatctatctatctatctatctatctatctatctatcatctatctatctatcttgagacacagtcttactctgtagtcttggctagcctggaacttgtagcttgtaactaattggctatgtagaccaggctggcctcaaacacctagagatccatcttcctctgcctcctgagttctgggattaaaggtctgtgccaccatgacaagccttaaaattaacttttaatttttattgtgggacagctccatacatgtctataataaacttagagctttttctcccccagtgctctatatttatcctccttccttctcctgagagtcttcttgttggtctaatgagaggctcttgctaccaagcctgaggacctgaagtcagtccctgggcctgacgtggcggaaggaaagaactgattctcaagagttgtcctctgacctccacgtgggtgctgtggcgtgatcacactggaacacacacacacacaccactacaaccaaacaatgaatgaatacataacataaaaaggaatcttcaggttctaacaaatttttcctcgtaattctcatatggatttttaaagccctcttctgagtcatctccctcagaatacattaaacctttccaggttttgataaggctggaagactcggagactcggacgtgggaaacatctaggaatacctgctgtggtctctagtgttgaaaaagtaaagttttgtgcttgttgagagaaaaaaatagagatcacggagaaagttttaggtggtcttttgggtttttttttttggcattctggtttttttaggggctagtgtagcctaggattgtctcaaaagctttacagacttgagtgtggccttgaaatactgatcctcttacctcaaaagtgctacggagtacttgggaaacctgcttccttacagtcagtccccagaactcacagagagaagccaggcttgtgtggagctcagttggtagagtgcaggctgatggtgcacaaggccctggctttagtcacccaccagtccccacattttttttaatttctttttttaaaaatgttttttattattacgtattttcctcaattacatttagaatgctatcccaaaagtcccccattccctccccccgacttccctacccacccattcccactttttggccctggcattcccctgtactggggcatataaaatttgcgtgtccaatgggcctctctttccagtgatggctgactaggccatcttttgatacatatgcagctagagtcaagagctgcggggtactggttagttcataatgttgttgcacctacagggttgcagatctcagtccccacattttgtaaggtgaaaaccaacacctgtaagttgtcctctgacctccgaacactcactattaattgggaatttctcccacccagtaaatagatagaacaccgttgtcttcgatataatagtttcacaattgaatactacgtgagctcttaaccattttacctgctttcagaaaaccagagcactgatgagtcagacctctgggaattgtgacgtgtgtattcctgtcacctgcttctgccgcgtggcttctttcctaaagccagttgcccctggctgtccatctgctcagactcgaaaacagcttttttttttttttgttccgcataccattttcccctgattttaagtagttcgatttttgagctgggcatgttgagtttgagtctaccttgggctgtatagagagcctgtttccaaaaaaacaaaaaaaacaaacaaaaaaaaaaaaaacaagttatgcctctttatacagggagtctgggtaaataaaagatcttttaaaattagaaaaatacaaactagagataagttacaaccatcaagtctttctgtgctttatgtagtactaagaatctttgcttagttggttgtttatgtttggtttgatttggtttttagtttttggtttttggttttcaatacagggtttctctgtgtagccctgactgtcctagaactcactccgtagaccaggctggcctcaaactcagagggatccgcctgcccctgcctcctgagtgtaaactataccttttcttactgcctcctcacgggtcttgctctgttccccacatccttcctgctccagacagcaccgcccctctacgttttcaccttcctctctgttcatagttcttgggtacaaagagagggaaagaagaactcaatttaatctagaagaagcacagtgtgtgatacactgttttggaaaacaaacaaaaaaaggtttagtagttgtactggctagttttgtgtcaacttgacacatctggagttatcacagagaaaggagcttcagttgaggaaatgcctccatgaga

SEQ ID NO: 44 - DNA, 57583 bp, Mus musculus
tctcatggaggcatttcctcaactgaagctcctttctctgtgataactccagatgtgtcaagttgacacaaaactagccagtacaactactaaacctttttttgtttgttttccaaaacagtgtatcacacactgtgcttcttctagattaaattgagttcttctttccctctctttgtacccaagaactatgaacagagaggaaggtgaaaacgtagaggggcggtgctgtctggagcaggaaggatgtggggaacagagcaagacccgtgaggaggcagtaagaaaaggtatagtttacactcaggaggcaggggcaggcggatccctctgagtttgaggccagcctggtctacggagtgagttctaggacagtcagggctacacagagaaaccctgtattgaaaaccaaaaaccaaaaactaaaaaccaaatcaaaccaaacataaacaaccaactaagcaaagattcttagtactacataaagcacagaaagacttgatggttgtaacttatctctagtttgtatttttctaattttaaaagatcttttatttacccagactccctgtataaagaggcataacttgttttttttttttttgtttgttttttttgtttttttggaaacaggctctctatacagcccaaggtagactcaaactcaacatgcccagctcaaaaatcgaactacttaaaatcaggggaaaatggtatgcggaacaaaaaaaaaaaaaagctgttttcgagtctgagcagatggacagccaggggcaactggctttaggaaagaagccacgcggcagaagcaggtgacaggaatacacacgtcacaattcccagaggtctgactcatcagtgctctggttttctgaaagcaggtaaaatggttaagagctcacgtagtattcaattgtgaaactattatatcgaagacaacggtgttctatctatttactgggtgggagaaattcccaattaatagtgagtgttcggaggtcagaggacaacttacaggtgttggttttcaccttacaaaatgtggggactgagatctgcaaccctgtaggtgcaacaacattatgaactaaccagtaccccgcagctcttgactctagctgcatatgtatcaaaagatggcctagtcagccatcactggaaagagaggcccattggacacgcaaattttatatgccccagtacaggggaatgccagggccaaaaagtgggaatgggtgggtagggaagtcggggggagggaatgggggacttttgggatagcattctaaatgtaattgaggaaaatacgtaataataaaaaacatttttaaaaaaagaaattaaaaaaaatgtggggactggtgggtgactaaagccagggccttgtgcaccatcagcctgcactctaccaactgagctccacacaagcctggcttctctctgtgagttctggggactgactgtaaggaagcaggtttcccaagtactccgtagcacttttgaggtaagaggatcagtatttcaaggccacactcaagtctgtaaagcttttgagacaatcctaggctacactagcccctaaaaaaaccagaatgccaaaaaaaaaaacccaaaagaccacctaaaactttctccgtgatctctatttttttctctcaacaagcacaaaactttactttttcaacactagagaccacagcaggtattcctagatgtttcccacgtccgagtctccgagtcttccagccttatcaaaacctggaaaggtttaatgtattctgagggagatgactcagaagagggctttaaaaatccatatgagaattacgaggaaaaatttgttagaacctgaagattcctttttatgttatgtattcattcattgtttggttgtagtggtgtgtgtgtgtgtgttccagtgtgatcacgccacagcacccacgtggaggtcagaggacaactcttgagaatcagttctttccttccgccacgtcaggcccagggactgacttcaggtcctcaggcttggtagcaagagcctctcattagaccaacaagaagactctcaggagaaggaaggaggataaatatagagcactgggggagaaaaagctctaagtttattatagacatgtatggagctgtcccacaataaaaattaaaagttaattttaaggcttgtcatggtggcacagacctttaatcccagaactcaggaggcagaggaagatggatctctaggtgtttgaggccagcctggtctacatagccaattagttacaagctacaagttccaggctagccaagactacagagtaagactgtgtctcaagatagatagatagatgatagatagatagatagatagatagatagatagatagatagatagatagtagatatggcacatattttaaaaatataagcttgaacatccactctggcaaatgagacatgaggagagtatcaagttctttgaaaacagttgacacacaaccaagttcctttgactagacctttctgtatggctctgacttgtttgggtttgtcctaataggaattaaaattacagaatggtaaatgagggcataataggatataaactccagccaagcaaactgctacaaataacacagtgatattcaaattgggggagaagaaaataactaagtggttatggaaaacatgaagttttgattgggtaccaaaagatttaggaataaaagatctatacatgcataactgtctagtcagcttgttaccagtatgtgtaatttcatgatactaaggtaaagtaaatgagggaatagagtatataccaagaatcatagctctcactgttgaagaaacaaattgaaaataaggaaagaggagctgccaagattctcagtgggtaaagagctagctgtgtaaccctgacaacctgagtttaatcatcaatacccacataacagtgggagaggatctgcttcacagtgatcctctgacttcctcacacatgctgtggcacaaatgtaccctccacacatcatacacacaaataaaaattgcttaaagaaaaatagagtttttagaaaagaggggaaactagaatgaaacttgtttattaatttaccctagcgtggagcagggtagatgtgtgtttactttaacctgtacctagacaaacacagaaacagattttgacatatgacagaaaggattagtatgactgtttgttttacctggcactgtcccctgagagaccctacaaccaatgacattccaacagcaatgagcatccccagtgcccagatcttcaattctaattccatttccttttaaaggaaccagggctcatcagaaaatgcctgagtctagaccagggaaaggacaatacaggtgagtctgtaatgtcctgtgttccaaaaagagagagacaggtgacaagagatcacaagggctggtgggaaaatggagagcagtaagttccagggagggctcagtggagaaagaagaaaagtgaagatcagagttaggatccctagatcttacattttaaaaagaaagaaagaaaaactggtagcattggggcccaaatgtaattccaacactcaccctggaggtgagatggattcaagggcaagctgggtagagctagactagctagatcatcagcaagctccaggcttagtaaggaactccaattcagtaaataaaatgaagattgaggaaaccatcaaatgacaacttctgtcctcaacaagcacaaacacacacacacacacacacacacacacactacatacactatgtatgcaaagtaaaagttctagataaaggaagccatgtgtgttacaagcaaatctttgaatggggggacagccggggcgggggtgttaggaaaggaagtgctgccgaaaagctatcaagtttgaaagtcacttcagtcacgagtcagaatgaggaagcccgttacaaagtgcattcagacaatataaagcaaaaacttgaaatttaatttgacagtttatcagaaacacttgaggttacaaatcatcataaaaaaaattaaaagcatttctctttcaagtggctgggggtgtctataaaattcacatttacaaatggcaaagagcacccataatcctccatacgaaaaagttattttgtctgaagctgcccacaagattgtaaaataggccagaagaaaaatgtgaagagcccattggtaaaaaggtctataagcctttgaaaatactgactaatgccacagaaagtcaaaaggcatgcttaaagttcagccgggccctccaaaagccatgtatgatatctaagtaatttctgattattacctgcaatcagcttaatgcatttcctctattgttagtgtattcatttctacagaaaatttggcttaaatgacagtgcattactcagaaagattctggaataaaattgcctctgtttaaattccttatctgatatttactagctgcgtgatctgggaaaatcttcaaccctctctggacctgcatttcattatctgtaaagttgagatgaaagaaaaaaaacaaaagttcttatcaaagcagttctactgtctaacagacatataataatggtaaaaaatattaactactctcagtaaccaacaattaggggttctttcaccctcaaccccccaaaaatgttttccctctgtacctgtgggttccgaatgtttggattcaaccagcctgagattgtaaatttttgaaaaacaaaatcagatccatattgaacaggattttgtgtttcattccctcaacaatacagtctaacaactttttacataactttcatatagtgctatatattactggtaatataaagatgatttaaggtatatagaaggtggtgtcaggaacacctctctacacatatcggcaaggataacttcagctttccctgtcttgaagaaatgccccccagagcctcccctgaacagtcttgtgagttgtcccaaggctgttttttcacccacctccctatcttgtggaggctgcctcctgggttctggaaaggcatgggacttttgaccttgcctccccaataagagtacagctgcaggtcataaaatcattaggctggaatctggaactgacctcccgtgacagcaacccactgtctgagcaatcctgtgggacctgggatctggggagctgacaccatgctggtttccatggtctaagtaaaaaacaaacaacacaaaacaaacccccaaaagtctctgtattcacttgggcctttttctttttcaggcaaatctatgatgagcccaagctagcctttgtaggtgttgctttgtaggacggcttggctctgataatgctaagaactataatggaatgtgatgttgaggtggttccagtggtcagggcagggttcaccaaggtgaccaatgaagcagccattctgctgagtggtgagaaggaatgttagggtgaaggggcaggggaaagcaggatgctgagacaggtttggggactggtagaatgatgctgtggtggaggcgaaggagtaatgagggataaaagagagaagtgagcaggggctaacttatatgtgggtttgtaggccacagagcagtttgttttctgaagtgcgaaggaagtgatatgatttatacttggaaaagatcatcttcctctcaaaagtaaaataaatgaataaaaatttgaaaaatagtaaaaataaacaaaaatagggctggaacgctagctcagtagtcaaggatacttgccaccacgcctaagaacctggcttccattctaggaccctcatggtagaagagaaccaactgttgcaggctgtcttctgacctctatatgaataaggtatacatgcatgcttttcatgtgaagtgaatcacaaatgacttcaagtacagggtgaggagttaaggcactgaaacgaggagctagaggtcagctgggaggcatttatggcagtcccagggcttgaagtaatttgggggccagctcagagatcccagagcctgcttggacatgaccaggtcaggttgtcataatgaggaatagtttctccatcactaaaggacttggcttttttattttattttattttattttattttattttatttttttagtaaaactgagtcccacaaaggattccagcagaagagaaactcactttaactaaagcatataattttttgcctttccttttagttcttgtctttgaaattgctccttgctacattgcccaggctggctttgaacacctggggtcatgatcctcctgcccttgccttgtgagtagctgaaataaacagtactcactcaccatcacttctagctccaactaaaggatttgttgtttccttggtttcttgagatagggtttcacatagaccatcctgatctggaacttcttatgtagctgaggatagcttttgaatttctggggctggagagatggctcagtggttaagagcattgactgctctgccataggtcctgagttcaattcccagcaaccacatggtggctcacggccatctgtaatgagatctgatgtactcttctggtgtatccttctatctccaccttcccagtgccatcaccttccctaatcacctaagaacaaggcctgcctctcctggttccttcacagcacaagttgtctttgagctggagtagcttaatggtagagaacttggctagcatgtgtaagaaggccttgggttcagtctgatttttaagcctggttttggtagcagatacacatctgtaatatcagtctggccagaagaagccctgttgcaaaaataaaaacaaaataatatttaaaaaatgtctgtttctctaactagaattaatctagcttgtattccccaacacatggaacagagaaaaatgtttctagaatcttgaatgcagggaaggacaccacttggttaaccttacaagcttaatggtaacacagttaacatctataaatcctctccatagagaattaaaatagggacctaccaatatttacagatgattctaagaatctgtaaaggagaagtgcaaaagcttttatgtaacagaccagcaacacattcttaggcagcaatattcttgaaatacgtgcttagatgtttctgttaaaacacattatctcggggactgtcgagatgactcagcagttaagagcactgactgctcttctgaaggtcctgagttcaaatcccagcaaccacatggtggctcacaaccatccgtaatgagatctgacaccctcttctggtgtgtctaaagacagctacagtgtacttaaatatagtaataaataagtcttgggctggagcaagcagaggccctgagtttaaatcccagaaatcacatgatggctcacaaccatcaggacagctacactgtactcatatacataaaagaaaaataaataaatctaaaaaaaatgtattgtctcctcacttagactcaaccaaggttactaaaaacctgggatttctgcttccattttgtctggctgaaaggacagaggtaagtcatccttaacctttggtcgagttacctaggaatcatgggacagcggaatcttgcaggacaggtgggagtaattatccatgacgacataccctgcagcagagtgatagctgcagaaaccaagataactccctcaagggagaaacgatgacagggataagggtttctcgggctcatcttgcaaaaccaaacctggcttggtcagggcttcggaatcatgcctctcttacattttcccccagcttcttctatctcgaactaaacctcatgcgggtactctggattatcttggagtcactagacccctttatccctctcaacgttgcaacattaaataaatcttttctttccttttttaaaaaaagatttatttattttatgtcccttttcagacacaccagaagagggaatcggatcccattccagatggttgtgagccaccatgtggtagttgagtgttgtgggccaccatgtggttgctaggaattaaactcaggacctctggaagagcagtcagtgctcttaaccgctgagccatctctccagcccctaaataaatcttctcacaatgacttttttttttagtgcatattgggggtgggtggctgagtctagcttgttggagatgctcttccctgggcttctgctcccttgccccccccaaaaaaaaaaccctccagttataattcctaaaatggatatatgctttcctatgtctctaacaacttctaacaactttaacgcaattttgttttctttctcagcatccattttgcaggactgtaatgaaaatgaagtcctggaggactgaggtggggtagttgtaggcattttgctcctatactgaacagccacagcaaagtacagcttcctttcagattttacccctcctgttaccctgaaaatgactgctacctctcagtgactccctttccctgtcttacataccgactatatttgatttgtggaaagttggtttttaaaaatgacatcgtcagggggttggtaatatagctcaggaagtagactgtctaacatgcacaaagccctcggtacaacctctaacactacataaactgggttaaattccaaaatttgggaggtggaggcaggaggatcaaaagcacaaagacattcagcaacagaattcagttcaagggatagaggtgggtgggggtgggggcggaaaaaaaaagaattcagttcaagaccaacttaggcctattgagaactctaactcaacaaaattatcagcattacataccctcaagttaggttaaataaatgcagctttctttcccagctgttagctacactctggttggcttagacaaccagctaaaacattatactaaaaacagaaaaatcctccatgataaactgtagcaagtatcaggcagatctgggctaaatctgggttctgtcatggtttaacaataacttttgaagcattttttttccagtaataactaatgttgtgggggcatttgtcacatgtcaggtcactgtcctatctcacctgccctatttctttcctttttaaaaaagatttatttatgtcccttttcagacacaccacaagagggaatcaaatcccattccagatggttgtgagccaccacgtggttgctgagtgttatgagccaccatgtggttgctcagtgttgtgagccaccacgtggttgctgagtgttgtgagccaccatgtgtttgctgggaattgaactcaggacctctggaagagcagtcagtgctcttaatctcgggtcaaggtcctatctcacctgccctatttctttcctttttaaaaaagatttatttatgtcccttttcagacacaccacaagagggaatcggatcccattccagatgcttgtgagccaccattcattattgtagctaatgaatgcttcagagaggcccatgaagaaaacagtactggagccgggcagtggtggctcacgcctttaatcctagcacttgggaggcagaggcaggtggatttctgagttcgagaccagcctggtctacaaagtgagctccaggacagccagggctatgcagagaaaccctgtctcgaaaaaccaaaacaaacaaacaaaaaataataataaaaataaaaaataattaaaagaaaacagtagtgggctggtgagagctcagcaggtaaaggcactgctgccaagcctgatgccctgaattcgtgctgacacctacaaggtgggaggaagagaacctatgccccaaagttgtcctttgacctccacacaccctttatggaaggagtgcacccctccaaaaatggaagagaaaaagacaacaccactcccaataccaggttgtaaatgtcagtaattagatgccaaattaagtaaagagtagagaatctacacagctcttagctacttactcattcaacaatcatcatgtaagctcctaatttttctttttaaaaagctttatttatttatttatttatttatttatttaatgtatgtgagtacactttggctgtatggatggtcgtgagccttcatgtggttgttgggaattgaatttttaggacctctgcttgctctggtcacccctccccactccagtcaaccccactctcttactcccaaagattattattattcataagtacactgtagctgtcttccgaagcaccagaagagggcgtcagatctcattatgggtggttgtgagccaccatgtggttgctggaatttgaactcaagaccttcagaagagcagtcagtgctctttatgagctgagccatctcgacagtcccctaagctcctatttttctaaggcactgatcaactcatctaatgcacaccagtgaatgacagatggcaactcagctagaatccacacccttggcaggcagaggcagaagtgtcctgagtttgaagctagtctggattaagagagccctgcctcagtatagacaaaaagatagttcaaaaatgttttgcctgctgggcatggtggcacacctcctttaatttgagcactaggaaagtagaggcagatggctggctgtgagttcgaggccagcatggtttacatagtgagctctaggacagctggaagtatgtaatagacagaccttgtcacaaacaaggtggtttgcctcctatggaactcatattctagcagggggttaggcaaatagtaaaaaaaaaaaaaaaaaatgaacacaagccaggcatggtggcgcacacctttaatcccagcacttgggagtcagaggcaggcagatttctgagtttgaggtcaatctggtctacaaagtgagttccaggacatccagggctatacagagaaaccctgtctcaaaaaaaaccaaaacaaacaaacaaacaaatgtaaactacatggcatgctattcatttaatcacctcaaactgccaacagccaagtagggaattgctttacctataaaaaaatggtcatcttacatggctcaacccaacagaggtgatagtgcaacggaatgaaaggactaagaaggctctgcagtgggggccgagcaaagtgttaactagaggatccaggtggacctcggtaggtgttattttatggtaggaaaggactcaggagttacttgacactgcattcacattaataccaccaggctatgcagaagaaatgagaaaacagaaggaaacatatcttgtaaattaggaagttagaggagtttggcaacctttttatttaattacatttatttgtcagcttagtaggtgtgtggaggcgaggggacaacttctggagtcctctcctttcagcatgcaggtgctcctagggatggcagcaaacctttgcccactgacccatttcaccagcctaactgcagcaagttcttgttatcatttaaagttccccacttcactgctggaaataagaacacagtctgaaaggaatgtaaatatgcactgtgctacaaggttgctagctcatacctcgtgataacaagagggcaaacaggacttttggtcccaaatatttcttactcccaaaagacaaaacaatgttttactgttactgttctctggtcaataaagctttatccaaaccaaaagggtaacaggacatacctgaaaacaaactataggtcagattgtagtctgaacaacctcacagaaaacgaggagaaaacatgttctttttaatagaagacaggttaggaaatggtgctgagtgtctgtaatttactgtttccagtaggtagacgcttccctcgctctaccaacccattccaccagataaccatgacctgcaatacttgctgaggagtaccattaaattagctataaaacgtaagcaaaggggaacccatggaaaactgtactgaattaatctgtagagaaatgacagacatggagaatttctttaaagagacagtccttagttttaaggacttttacacgaaagaattcaaaaagtggcgaatttttagaatttatttatttgcatttaaaaggaactgttgacaacgatttactgaaagtgggaaaatacagccaacactgctgaaacatgtttattccactgagcaaaacctcttagatgctgttactgataggaaatcgagagcttcagactcgtctaaattaacaatatcaatcacatctttctctcctgaatatataaaaattaaaataccaattaaaaaactaatatagcttctctttaaatccttcttacagatacaatctcagtattattatttaaaagtggtaatttaagagatttgtttttcttacaagataagcgacaatctaccagagggtaggctggcctataggctcatagtgcaaatcaaaagtctggggacgcagcaactgacatttctaaaaataaaacagtaacattcatagaaggttcatgcaaaaagctttactaggcagatggccacaggactagaacacctgctaattttactggcaacatcaacaggactcctcgtatttgcagattcaacttgcgctcatcttaggctttgtatttggcttttccagtttcactaatgacacaaacgtgctataaaataaaagacattctcgttagaaaagcggattctaaagaggtaataacagcattaaagggtcctcctacgttgtctgggtttctaccaaacaaggtattttggaccagcaacttgaagaggacataatttgaaaacaaagcagaactatagtccattagtttgctttttctttgtcttagtacgtaactttgagaaacataaagctgaaatcaaaacaggtaagtgaaataaaaaatacgctttaggtaatattgcccatggagactttctaactgctcctggaccatgcttataaactcacccagaagactccttcctgcctccagaatgggaggcagggatctgaagcagagtcaattacaaaattgaaactgaatcgtttatttcttacttatgactatatcatgtgaaataacaataagacagttgttgtatattaaagctgttcaactacttcagccagcaagaagtgtcaccgtagcctggccaagttccagttctaaggacgtctgtacttgactacagctttatgtgactaatgggaaccatcagtcgggtcaaattacgaggtgctggaaggagaaaacaattcttccctttcctcaatttttatgtgggtttttgaaaaatgagagcgagaaaaaaaaaagcattacttacattcaaatccctgaagtactcattatagtcaagggcatatccaacaacaaacttgtctggaatttcaaatccaacaactgtaaataaataatcatagtttattctttagagaaaataatactttcaattctaattcttgcaaatgtaccttcctcacaaatgttctctaaagtaaccctaagccatttcatagttaactttttcagttataagatggataaatgattggccaaagggcatctacttacagtctggcctgtatccaacacttcgagaggtccttttcaccagcaagctgttaattacaaaaaattacatgtggcatatggaaagactacagagcattacaaagaaaacatcagtgttcttaagtagtatcatctgcattcagaataaggacagcttcgcagacccataggaaggctgaaagggagaagaactaaatcacagagaggtcacatgaaggtcaaggcccccgactgatcaccacctggaacctggtaagatgcttctgagagcagaatcctaactaaagaaggtaagacatgctctttcatcaggacttgtaataactggctcaccaatgggaattttttgcagtggatactgaactcagagccttgatcacattaagaatgtactcgaccactgagttactcactcaattttttagttaattacattttcaactacttgactcttgctaaaaatgtaagttttaagcagttttatttttaaatttatacctttattatttatagaaatcatgaatttatgaatgtagtttgattacataattatataaaactacaaagttaaatgctagttatctaatgcttgtcatatatgcatacaaccagagttgaaaccctaatatcgcccaaaaaaagttaatggctttcaaaatttttatttttgttttcactgaagtcacaaaagaaaaaaaaaaatcacacacaaaggtctctagtgtcgtatttcagcagattatcagaaccagaacatgggccttggtgaactaagcggccttgtacagatttcatcaattttaatcacatagagactagtctaatcactaccacaatcaagatactctgactcatgcaaggctccctcctgtattctctctcaacccctggtaacccctaatccattctcatctgtcatttcaaacggggttatataagtagaatcatacagttttattgctttgcctttggtgtcctactattataatagccttgaaaaaaattaaaaatcttgggcatatcaaaactgggagacaggtaagcatttaaacagaaagagcgaacacctgctttatgtcctcctgaagcactgtacagctccagtaacactcatctcaactgctgcatattgatggctgttcctatttattgctgatttcgtggtataaatgtgcttcaaatttgttcaaattttgttcttcttaattctgcattatcacaaatgacgtgaacagtcgtatttgagtagggagatagaagacaggtcttcactatatagctcaggctgcttgtctcaaattcagtgtgatcctcctgccttcagtttccaaaatctgagattacaggggtgaaccaccatacctgactataaaccaatacagatttttatagcaacatggtcacttctcagggataagtactcagcacaacgtctggggtcttctggtagttccctgtgcagtttttaaaaaaaactgctttctagagtgaccacgctatcttacaatactaccaaataagacttaatttttagtttggggaaagaccaaaacacacttgcgtaggacaactacatcatcaaaaattacccaagtattctctgggcacatctcaccttcagcatggcaaaaactcactgaggtatatttgtgccatctatccaaaaagtccatgaagacaaattgctgaaataagttttattaaaattatagagattcaaagactttatagatactttgatcttttaaaacgattttataaagctagtttaattggtcagcagacatagcacagtgtatatgagactattgctatcaagactgccaaactatgttccaccccgacccaggaccaacaaggtagaaagaatcttaggctgtcctctgaccaacacaagtgcaagtggcacgtgccaatattcctgccacaataaataagtgtaaattttcaaaaattaagaaccgggagctggagagatggctcagcaggtaagagcactgactgctcttccgaaggtcctgggttcaaatcccagcaaccatatggtggctcacaaccatccgtaatgagatctgacgccctcttctggtgtgtctgaagacagcaacagtgtactcatataataaataaataagtaaagtctttaaaaaaaattaagagccaattaatcattcaggaaaagacaaaaataaaagacccgacctctcctctacacaaaaagcacagagcagtcaaagatattaaagtaaaaatgaaactataaagtaaaaataaagcaaaaagcaatagcaacaacacaacaaaaaagatgtcacttttaacaacaaaacccaacttaaaatagcagaagcatcaactgtgacaggttccctgtgttcaaatcttctctctatagcttattagctctgtgtctgtgggcaattccctaggcttcagtatccttatctataaggtggagataacaactgttgtagaatcaaactataaccaaggataaaaacagaaaactatgaaagcacaagccaaatacccagatatagtaagatttgagacttcagaaaaaggaagcaagcatggtacaatttcagtgacaacacaaaatagaatgcctcactcaccactctaatccagaagattcagatgtgcagtgtccaccacttgttactaccttggtatgatttatttcaatttcacaaggggacctcagatcatatgccatgtcactcaggataaatttgatataagtaacatgctgaaacagcaattgttacatagctctgtatatatgtgagagttccatttctaaaaacttgtgtatcaagactagacattctagggactggggaggtggctccatggataagactatttggtctgcaagcacaagcacttgagtttgactcctaatattcacattaaaaagttgcccatggctgtatgtgttcgtgaccccagcgctggggctagagatagattcaaaaacctcaccaatgagcctgcatggctaaaactttgagcttacagctcagttagagaccatgtctcaggcaacagagtaaagggcagtacaggatattcagtcctgccctgcccttcacatatctgcatgatgagtgtgtactcacctgcacataatacatatactacacacataaataaacaatattctaagaacccatactataaagatatgtatttccctaaataatttagcgtaattatatgtattaacactgtggtaggtattacagtgtatgggagagtatgcatggattctgtgcaaacactcctgccattaacaattgcacttattttacttgagtgtggcacacatggaggtcagagggagtcagtcctctctgtctaccacatgcgtcccaggattgaactcaggttgtcaggcttggcagcagatgactttacccactgagccatctcagcagctcatctgacattctttatgaaggacctgaacatctagggagtttagcatctgaggtagttctagatccaaggccttatatatactgtattagacaaggaattgactataatggcttattaatacacaataaaattacaaaggctactgtcttgagttttaagattacattactctgtaatgataaaacgaaagctgaaaaagcatgtctccttacaaagaagctatcacttaatattctaaataaggaaagcattctactttaaagtggcatacataccttgcaaccttaaccattttggggctgtactgcttaaccagggaaagcaaagtttgcattgttttaccagtgtcaattatatccttttaaaaagaaaagagacatttaatggtaaataaaaccaccacaatttaaaaaaaatcatccttattacaaacatacaattccaaatgcaatattctagtattccacgacacaatgccattcatttttagtatacacaaaatctcaccacaattcacacagagatagtctggaacttgtaacctatctggctctaagtaagcagaggtaatgtcagtccccagaactagattgcatagatgtggcaaggtcaaaaacagtaaatggaacgtctacatgtaagcactgcacacatacacaaatctttctgttgtatttcacacagggtcttgctatgtagttcaggttggtggccttaaactcaagatccccctactttagactcctaagaggtagggttgcaggcataaattaccaggtttaattctgtaaaagatatagtaggtttttttgtaaattaaagatagggactcttaacatcccaaactttgatactctaagaaacattgctttgtattatctttttacagaaagatttattatgtatataatgttctgcctgcattatgctggcaggccagaagagggcaccaaatctaactatagatgggtgtgagtcaacatgtggttgctgggaattgaactcagaacctctagaagggcagacaatgctcttaacttctgagccatttctccagcccactttgtattatctttaaaagcatctaagtaataagttttactatataaaatgactttatcagtgataaaacacccacatggcacccattatgccctagattctccagtaccataaaaaaaatcagaaaacagataaaaatccataaaacagatagaccacaacgaatatcagggctcgaaacctaactctcctgctggtttaaaaagctgtgatgctgtgacagggctgtgtcgtaggacttgagggatgatctttgtagttgagagctacccctggatagtcagggagaaattgtccctcatctggccaatcacaccagaaactgtacagtgctatcatcctacatgaactttttttaaaaagctacgtttattttatttgtggagtgtgtgtgtgtttataaacctgccatggttcaaggacagcctggtttacatagcaagttccaggacagccagagagaaatagtgagatcctcttcaaacacaaagggcaattacggtgtaatcccactcacctatgtcctcaaaaaataaaccttagaaagtggagaagggggagaaagaaataagaaatgatggcgaaggatactgattgctctgtagggagggagatgagatgtgttacttaaaagaacggcgcccagatagctggctttgtgggtacattttaccatgcaagcctagtgagctaagttcaatccctagattccatgtaagtggtaaaggagagaagcagttatacaaagcgctcttctgacctccatgtgcattctgtgtcatgcttactcatgcaagcacaaaggtgttttgtttttaattaaagagaaagaaccagaggtggtggacaactataaagaaacaatgttttctgtcacagtacaacatttgcacttatcaactgacatcagttgagaatgcatgcacacaacctgtgcagggtcaaagacagacaaattcccagcatggagtgggggaggtggacatcatgtcccacccatagtgaggaagctatcattgatagctgcggctagaggactcagctttctttaaggatgtgtctcctggtgggttgaccattctagtgatggatggtcacacatccaagagtacaggagcagcacaaattgtgttgatgggttttaaataaagaaacacaaagttgggtaggtagggaagggaagagagatctgggaggagtagagagagggcgcaaacataatcaaaatgcagtagactaaaactaattgaaaaaagagaagagatcttaaaaagaaatacaaaccaaccaatggtggcacacacctataattccatcatgtgaaaagctgaggcagagaggttatgagttcacaggcagcacaggttacacagtaggttcaaagccagcttggagggcaggtatggtggcacacaattgtaatggatagcattcagaaggcttaggctcctggtccacatagtgagacccaggacagatgaggaggctacattaagaccaggtctcatagaaggaaaaacactcatcttgagttgtatgacaagatcatgctgaagggagaaaagaagaaaagaagaaaggagagagggagggagggaagggaggaagacagcagggatggaataagagaaagagggagggaagaagagacgcaaatgatggtagatacctataatcccagcacttgacttgagaggtacaggcaggtgggatggagggagtaagagtctagcctgagatatttacctacctcttacaaacaaagaaacaaaaaaccctaaagagtcaagggtgacgcctggtggtagagcacttatttagcatgctctgggtttgatccctagcaccacacataaaagaaagaataaaaattcttttgtttaaaaaaaaaataggggcattggggctggagaggtagctcagtggttaactatagtagctggagtttgcattgcaggactcacacaaaatccaggcatcctgcttccatcacaactcaggtctgaaaagacaggaggcaggaggattgctggggtttgctagcttccggcctatgtaagaaaatgtgagcctcaggttcagggagagaccctgcctcatagaataggaagtgcaagaggatggcacacacatcctctactggcctctgttcttatgcactagcatgcatacttgcacacacatacatacccagtcagacacacaaaacaatgcacaaacataaatactacaaaaagtggaaaggaaacaagagattacaaaaatgaaaagcaactactagggacagaaaatgaagatagaaaaatgatgctctaggaaatgcaaaaagtataaagaatgaaaaatgatggggaatgaagctgatatatattctgaagccacaatgagaatctattaagatgcatcctgaagaactggggaatagagtcaaggtaggaggatgaccacaatctgtggtatagacgtacatgtatagagttcagcaagtcagacagatgtgaaacagggaagccacaggcaaaaaataaagtctgcatgtaggcagtgataaaaaaaaaagtatggaaaggaataggaagatgaagacatggaaatgtacggttttatgtaggacagccaaagaaggccttaatgagacagtgtcttctcattttcttctgagtaaatcaatgggtcttaaagctcagcatgtatcggaatcagctcaaggtttgctcaaacaaaaattgatggtttttatcacaaagattctgaatccataagctcctggctaatgcttttggttttttacacattgaaaagcaatgggctccagacagtagcggtttgagtctttactccactcacttgccagaaatatttgatacttttatattatttagatgaaatgttaaaaatcttgtaacattccataaaataaaacttaacacatgaaatcacacactcactcacacacacacacacacacacacacacacacacacacacacacacccttctctatatagttataactagttttaaaagaaaaaaatcaaaactgaaaaaggaagtatataacttttttcatgagcagcaaaacacatcacttacaaaatatattttttgtttgtgtctttttgttttgtttttaaaataaggattttctcggtctttaaactcactatgcaactcaggctaacccaggaattcatgagcctcctgaggatctgggattccagacatgccctactgtacctggcttctcttagggttagaaaacacaagcgcccccgacttacctttattaccatacacactaagttagaaagttgtagacagtatattaaaagtaaacgtagaacttacttcaacaatcaagacattctagaagaaaacagagaaatgaaaattagtatatgaagtgagacagtattcccaattatcagtgaaatcattaaacaaattctaagaaattacccaaattcatacttgggaaatttctcaggatctcagtgactcatatgtaaactgaaaaacttgaaccagctctccttttatgtattttgactctaatattccaagaactgtaatctgtataaatgtcttttaaaataatgcatctaacataatataaaatgcaaattttttatttctccatcaagctaaaactagtatatggttgtgtgcgtatttgggaaactgggaaaagatatcaatacatccaccagagcccttaaacccaccccaaccccaactcaatcttctagttaattttactctgtagcccaggttgacctagaactcataatgtagccaaaaatgtcctcaaactggcagcaccatttctgcctcaacctactgaatagtaagattgcaattgtgatttatcatgcctggtctgagttgctagttagagagataaggtgacagacatttcacatgcccacaatactcactggacagatttattttatactgttagtctatagttctcaaatcactctgccaaacaaccataacatcagaattgccaagtcttctttattactttaagttagtgattatcaaggtagagtacatagcctccattggagtccatgaaaattcaaaattctttctcaccttgtagtttgaatgaaaaattccccccataggctcttacattggaatgtttgatcccttgttggtggaactgtttttgagaagggttaataggtgtggccttgttaggggaggcatatactgggaatgggcttcaaaagtgacatttcaaaagccacaccgggtctagtctctagtactctctgcatccaatgtgcatgtaatatgtatgctctagatactgctccagtgtcatgctgcctgcctgccaccaggctaccctccaggatgattacagacttaccctctgaaactgtaagcaagctcccaattacatgttctcttttataagttgccttggtattgtgtgtattcaaagtaactaaagacatacttcatctcctttagcctatagtttaagtactttacaagataaattactaccaaaactcaagtgtaatttaaaaatacatatgctgtgggtaaatcatttggagaatcaaagctgtgcgttaaaaggaaattataatcaagaaaaacatctaatatgtccatgtttcaaagtagtttaccatagaaggcagtatcttacagtgctatacaggtctaagaatgtaagcccagaacttctggcaaacaagctacaactgcatcccattctataggcaggaaaaagccactttaaagtaaaggtcaggggctggtgagatggctcagtgggtaagagcactggctgctcttcccgaggtcctgagttcagttcccagcaaccacatggtgactcacaaccatctgtaatgggatccattgccctcttctgatgtgcctgaagacagcaacagtgtacttatagtaacaaataaatctctgggcctgagtgagcagggaccgagcaaatggagttgaccagagtaaacaggaccaactggagtgagcagaggtcctaaaacgcaattcccaacaaccacatgaaggctcataaccatctgtacagtgtactcacatacatagaaataaataaattaaataagtaggtaaatctttcaaaaaataaaggtcaggatatgcatagaaaattttaaaaagatataaaaatttgggacattttaaagactattgttctaatacagagagagagagagaactgctaccactgagagtttattttgtcaaatagctacatgtctacttaataatggaaacaatgaggctgagtagtcaaatgaactacctaaagtagtaaacattgagaagggcaagagaaaggggtttgaataaaggttattttggatccaaagactaccgtttcaagtattaatgggaaaatgtgtgcattatgtctgtacttgcatacacataagataaatttccacaaaaaattagaatgttttaaataaacccataatctcatcatcaagatttaactttactaaatttgtattccttgatgttttccacaataaaaagaatctattgtggctgctctgagaagttattttagaagcagagctctgtttaagatcacagcgctgtgtagagacagagccattaggtgaagaaggtcaaactaaatcccagcaggcttcgaaggctaggcccctgccagccccgaaaacggattatagaagggcaggtttcgaatagcttctaaatatggacaaaccatgctaaaagggaaagaggtctggcagttgtacaccaaatggacagcagagaggcagagagcgagaacgaacagattacaaattcgcccctggaggttctaaacactgctgacagcgacattagtttggcgtgaccctgatacaggcctccagaataccagcattttatgttaaagttccctacagagtttcagtgaaggaagtagtgagtagtgagtaagtagtgcaagaaagcagtgagcactaaacctaaaagctagaggaaagaaagaatttggtgtcagcatgcaagcttttctacttcctggttgcgtgacttcgagagattgtttacatctcataatcccaaggagtttttgaaactgtaagtgtattgtttcatttcctgatctgcaaaatggaaatataactgccttcactagattactgtgaaagtaaccaggttaatacatttatatatggcacagtgcctacaagtaaaaaataaccagccgcttagaaaacatacacagtctagtatgggggcttatgcttgcaatcccagcatttgggaggctgaagcaggaccaccatgtcaaggccaacctgacttacataagagatgttcaaagatggtgtagactctaagtaagactgtgtcttagaaaaacaaatacacatagagaagcatgtgtgcgcgcacacacaccttcaaatgaaactacatttgaatctattaaaaaaaaaagactgtccctctccagctatattttctgaaggatcccaaattagagtttcaaagtagtattatagaaagcagtaattaaagccgggagtggtggcgcatgcctttgatcccagcacttgggggcagaggcaagtggatttctgagtttgaggcgaacctggtctacagagtgagttccaggacagcctgggctacacagagaaaccctgtctcgaaaaaaccaaaataaagcagtaattagcaatatggactgtgagggttaatggtatattctgctgtcatttggctataaagtccaggagataatattaatctatatcaagtacttctaagagttaaacaataccagcttacttttactaataaagtacctctaagtaagtggttgaaagcagttactaatgtttcttggtataaaaatgttctttctttcctcttcaagttacatacctttccagttaaagttgagagatcatctccaccaataacttttatgtcccccgttgactgatcattctagttgaaaaaagaacatcacttaaatgcaaattcttgtgtatatatatataagcttctcaaattattagatataagctataagatttaaaaagttagctatctaatggccacaaaattatgctattctaaattataaagtataagaattaggtttctagaaatgaatgactaggtaaattttacatagagattagtaaaaattaaaaatcttaattgaccattactagtatttgaggctctgaagagttctaaaactagagtacatctatttctgagtgggcatattatagctactcatcaatcaggtacttctcaactacaaaggacaatttattagcatgacaggtgtctgcttctggccctgaaccattcctgtgagtcacacaagtgtaggagctggtctatatcacattcaaccctgaagatatgcccataaaatatgtccatatcctggatatgcccatatccaggtcatcttcagaactgtctgagaaaccaggtctgattactagtctattagaacatccttcttaggttcccactttctgcttgtagagaaattagcagaaaaccttacagaggtttcaaaggagagtgattaacactcactagagttggtgggaatagctataatttggatgtgctggtattaaatcagaaaactgatgattaaaagagtgtggacttactctactgggacagcaaagcataccaaaaactgcagcaattagcttggtatagaaccagcacagtgaatgacaaaaagttcaaggaacccaataaaatccagaaacagacccaaaaacatgagaatttagtatatgacaaagatgatattttgagtcagtaattaagagatgaattattcaacaaatggtatttggtcaattacttatccatttgggaaaaaataaagcatggttcctacctcacaccatgcacaaaaataaattccagatggactaaaatctaaatgtaaaaaatagaactataagtggattagaagaaaatgtaagaatatattttattttaaagatttatttattttatgtatatgaatacactgtagctgtcttcagacacaccagaagagggcatcagatcccataacagatggttgtgagccaccgtgtggtttctgggaattcgttcaattcccagacgcaggacctctggaagaagagacagtgttcttaactgctgagccatctctcagcccccaggaatatatataattttcccctgtattcttagaaaggataaaaaactagtcatgaactccaactaaaaagatctgtaaccactattcctaatgtaaattctgctcaaaataagaacctaccaggtgggacaggagagagatcagaattaatagcacttgctgatcttgccaaggacctgggttcagttcccagcacccacatggcagttcatatgcctatacctccagtttcaggtgatctgatcccctcttctgagctcaaatgtatcaggcatccatatggtgtaaatacatatatgctggcattcacacatacacatgaagcaagataaacaaatctctttaaaaaaaagaactattagaatacaaatagacaactgatggccacctgacagattctacatgtgattctactgttcattcatccacatttacagcaattaagcctgataatacattcaggagaaacaaatactcaagctgctggttagattacagaaagcaatatgacctcttttgaaaaaatatagtaatgcctattaaaattataaacatgcaaattattttgatctaacaatcccatttccaagaatcagtgttacaaaaatatccacaaacatgcaagggaaacattcaaaaatgttcactatatcaggtagtcatcaaaaacaaaacaaaaaaaaacccagcatgtctttaaaagggaattacttaaagaaattaatacacataaataatactatgaaactattacaaagaatgacacaatctaatatattcttatgtggatcaatactaattagtaacaccaagtagcagacaaatatactacctataaaactatttttattcggtattcaaaaccctatctcaaaatttttttttaaaatgatagctcagttggtagaatgtttacctagcatgtttaaggggagtggagaagaacaaaataaacaaaaaatactactagtccaagctgtaaactaaatgttggctttttaatttaaactagtttagcctaaaactcagaatttcaaacacacacaactgattaatgacacaaagaaaaagaactgtacaaaacctgaacctagttaagatggcattacactgagtgctacatagtaataacaaaccctgataaatactgacacctgctgtagaaaaatggtattacagcccaatgccaagtacttcctctttcaaaggacagacataaggaataaatatctaagaatgcaagtgtgatccaaaggctattgctatagggtccgaggcaacagaactccaaagcacacagaacacttgcacgctaagatgttcacgtttccacagtcccattcagtgtttcagcttatgcttccctgaagtttttgttaaggaaacagcttccttttaaagggacactataaagagaaaaaaagtttcatttaatagttgttatatgggctggtgaaatggatcagtggttaagagcacccgactgctcttcccaaggtccttagttcaaatcccagcaaccacatggtggctcacaaccacccacaatgagatctgatgccctcttctggtgtgtctgaagtcacctacagtgagtgtacttatgtataacaataaataaatctttgggccagaacaagcagggcctgagtgagcagagttgcctggaacaagcagaggtcttaaaaattcaattctcaacaaccacatgaaggctcacaaccatctgtacagctacagtatactcacatccttcattcaggtgtcactactgtcaactaccaaaaatccccagaggaggctgaaggggtggttcagagcaacggcttccagaagacccaggttcaatttccagcatccagcatttcaacagtctataactatattctaggggtccagacaccctattctgccctctgtggacttcaagcacacatatggtacacagacatgtatacaggcaaaacactcactttatatatattttccccagaagctcaggtttctataaatacagccgtaatgtttctttctactttgtctacctcttagagtctagatggaaaagtgggagtgacaagaaagaagttgtattcctatttttccatcactaggatttctggcaacctctaaatagaaacaagagctcaggatttagagcatatttgcttagcatattcacgaccttagattcatccaacactcaaataattacaaacttaaaaataaaactcaaaacattacttgtgggtggagagatggctcagcggttaagagcactgactgctcttccacaggtcttgagcaaccacatggtggctcacaaacatatgtaatgatatctgacgccctcttctggtgagtctgaagacagctacagtgtacttacatataataataaataaatctttgggttggagcaagctgggccggaacaaacagaggtcctgagttcaattcccagcaaccacaggatggttcacaatcatctgtacagctacagtgtactcatatacataaaataaaataaatcttttaaaaaccattacttgtttactaacaaccctttctctcaaggtctagttttgttcttcgacgattttagaattttataaaattgaaataaaagtcaaaataggacacatttgtgtacttatcaaatgtttcatttttctgaaagttacagagcactagggacagaaaaaatgtcaccaaatatataacactatatttcactgtttgaagatgaacattcatactttactacctctgtaaacatcataattcatggcaccatacaactataactggaggtagtttctttcttaaaagcacacaaatacagtggttttaattagtggactttttcatttaataaaatagatatttggactccttaggctgttttgcacttggattgttaaatacctcctgggctaatactgattatgtaagctatagttgtatgtggggacatgtatatatagagaaaactcttaatattcaaaataaaaagtgatgacaggagttagagagatggtccaacagttaaaagtatgtgctattctcatagagtacccaggctcagttcccagcacccacatggtgactcacaaacacctgaaactccatttccaggggatcccatgtattcttctggcctctgcagacatgaggcactcaagatgatccatatactcatgtgcacaaaaaaaccgcagaaacataaaataaaattatatctattttttaaaaagtagactttggaaagacaatcttttttttctataactttctgcagttttaattttaaaataaatacatattttaaccaggcagtgatggtgcactcctagtgctgggattgaagggggggaatcactaagttcaaggctagcctggtctacatagtgagttccaggacagctgggactgcacagagagtcaaaggatgggaagggggaaggggaagagggggaaggggggaagaggggaaaggggaaggggggaagaagggaaagggaaaaaggggaaagggggaaaaagggggaagggaagggaagggaagggaagggaagggaagggaagggaagggaagggaagggaagggaagggaagggaaggaaaggaaaggaagaaacaaactataccatcataattgtgaatggtgaagtttttacatataaagatgacatttattttgtttcatcatactgtcaatactctaaatcatttcaaactctggcaaaggtaaagtggtcccaggccaaaagtattttctgatttccaagaaataatcattaaccttaataattaaggctttgcttcaaataacttaggattcctctcagagcaattatctccagtgagagtatttgccaccagcatacacagttgagaaaacatcaagtctcaatagcaattctttttttcttaattttatgtgtatgggggtttctgctgcaagtttgtttcctatgtgattgccaggtgcccttgcaggacagaagagagtggcagatccctgggactaaagggacagactctgtgagccactatgtaagtgctaggaattgaacctgagtcctctgaagagcagccagtgcttttgactagtgagccacctcaccaggcctagaattctcttaagactgagctatttttatatgtttagcagttttacctgcatgcccatatacatgcagctttaccacacagatcctctggaattggagctacagataattgtaagccatctttgaggtgctagtaaccaaaccccagtcctctacaagtacttgtgactgctgagccatctctccgcctcattcaatagcaattcttaggcgtttttttttaaatatgaaaatacagctaggtgtagtgatacctatacttccagaacatgggagattaagacagaaggactatttgagccatgcagtttgagattagcctgcccagtgccatgaaacaaatcaaaatccagatcaaaataagacaacagagaaactgtacaacttttttgttggtcatgaactacagttactattctgtgttgtgatatgaagtatcagtgaaataataataataataatagcaacaacaacaatgatcatggccagaagtggtagcacctgcctgtaatcccagctacttgagaagctgaggcaagttgactgaaatttctagaccagcccacgtaatgagttcgaggatagtgtgagcaagttagtgagaaagggtctcaaattaaaactttaaaaaaaatgccaggcagtggtggtgcacgtcattaatctcagcactgggaggcagaggcaggcagatttctgagttcgaggccagcctggtctacagagtgagttccaggacagccagggctacacagagaaaccttgtctcgaaaaaacaaaaaaaaaaaaaaaaattaaaaatgactaggatgaatgaagctcggttattacagtacttagttccctgggttctaccccagcacagaaaaataaatatgtaataatagtaattccaactattactatatatattacataatcaagtaagttgattatgtagcatagtttgcacaagtttaaaaaaatatagataaaactagaatggccctatttttttaattataagttaattatacttacacagtagctcttcagtctgataaaatctacagtcataggaatggatctatcactatttctattcagtgctttaatgtaatccagcaggtcagcaaagaacttatagccccccttgagcacacagagggccacaatgtgatggcctcccatctccttcatgacatctcgagcaagtctttcagtcctatagaaataaaatcaggaattaaaaagaagattctgaatatttatcttttataacaaatacttcttacacattaaacttttacaggacacattccttgtctctatgaagggaattcttacttcataaagcaatattttgcagaagtggagactatttttcatataccaaaggtaagattttggggcatgaggaaagattaaagagaatccctctaaatagcccaggctggactgtaatcataatccttgtctctacttgcctgtgctgagattacagatatacaccaacacaccagctcaaccaaaattaaaaccagatacctttcagaacaagaaacatgccaagcatgatggtgtgtctcatgagctgaaggacagcctggactacagagtaagtattagatcccttagggctacataacaagatcctgctgaggaggagaggggaggggaggggagaggagagtacactataacatctatcataaaatttaaagatacaaataaaaacaagcttactagattggcaaattttggttaaattttatttctcaaatataaaatactagaagagcctaaagaaaaatgaactctcacataacgttggaagtataaaatgatgtaacttgttggaggacaatttgacagttcagaagcatccactaagcaccatttccttgaccagtgatttttacttgtctaaagctgagcaagtgtcaaaatgtgtatttaagattcattccctctaatatactctactaagtacaaaataatgaagatctggttaaatcagttatggcacatctatgaatagaatagcctataatctttaaaataaatgtagggggctacagagatggctcagaggttaagagcactgactgctcttccagaggccctgagttcaatccccagcaaccacatggtggctcacaactatgtatgatgagatctggtgccctcttctggcatgcagatgtacatgcaggcagagtgctgtatacataaataaatcttttaaaaaataaaagtaaatgtaggcgaattgggatgtagctcagctggtagagaacatgtctagtaacacataggaggtcctgagttctactctcacaactgtgcaaactggccatgatggcacaccaggagttgaagtagcaggttcagaagctcagaccatccttagctacacactgacttagaagccagtctaagctatttgataccctatttcaaaaacaaagtaacatgtagggctgggcacagtagcacatacctgtaatctccacatatgagagcctttcagggggactgctgagttgaggccagtctgggctatacagaacgttccaagccagactgagctaaacagtgagaccctctcaaatagcaaatacttcatacacacacacacacacacacacatatatatatatatatatataccctgatggtaaagtaattttttaaagatttatttcatgtatatgagtacactgtcactgtcttcagacacaccataagagtggatcagatcccattacagatggttgtgagccaccatgtggttgctgggaattgaactcaggacctctggaagagcagtcagtgctcctaactgctgagacatctctgtagccccgtaaagtaatttttaaaagataaaaaacatgatagctctagatgtattaatatgaaaaagtccataaattttagtactatatgacaatatgtaacttgtgtgtgtgtgtgtgtgtgtgtgtgtgtgtgtgtgtgtgcgcatatactttacgtacagtgtatttgaattggtattgtctacgtagaaaatatgtatggtaagctgagaaaacagaagaataatcttatacagcctcgatggacaacgagagccaattcttctaacctctcttcaagaatgttgatttacttactatggattcccactagttatgtctaaaactaggtaattaattagtaaggcttcctttctctctcctctctctgtctgtgtgtgtgtgtgagagagagagagggaggggagagagaaagaggaggcgagaggggggaaagaggaggaggaggaggagggagggagagggagagagagagagagagagagagagagagagagagagaaagagaaacgaactttaaaagtagaaagccttagggctagaaagatagtttatcagttaagatccttactgtttttgcagaggacctaaagttcagttcccagcacccatacacagtggttcacaatggtctgtaactccagttccagggaatccatcacaattctgacatcctggaatacatatgcttcacatacatacatgcaggcactcacacatacaagtaaaaaatagaaaacatttattctaataagttggcttagcttatattcaaacatcaactactcaacagttgctaagttagaattaatacaagaaaaaaaaccctttggctggagaggtggcttggcgggtgagagcacttgggcacgcatcaggccctaagttcagatcccccagtacccatataaaaaccagatgtggttgcacctgcttgtaacgtcagcactggggggcagagacaagcagatccctgggtcttgctagccaggcagcctagccaaatcagtatgtatgccccaggttcagcaagagacactgattcaagggaataagagagcaacagagtaggacacctaatgtccttctctggattccatgtacatgcaatacacttcacatatatatcacacatgcctctcctctctctcttacacacacacacacacacacacacacacacacacacacacacacacacacaccacacacacaccctctaaaaataacttcaatcgaggtcttactaacctgtccataatcagtccatgaggaataaacactttttccaaatcctcggcataatgattaggtatacaaaacaaatctaggtcataacctggttcatcatcgctaatctgcaaaagaaagacagctgtttcaaagtggagcattataagatatcaacatttaattacgtttagataataagtcttagtttaacagaggaatttagctacaagagggtatgtagagcagttaaatgttaccgttttgtaatagattatacttctctaagaaagccatgctgcgtcttactgctgaatagagtcaagaatgaaaagtaaaacatgacacaaaatttcctttgaagcacaaagagaaaaagaaaaatattaaagaggtatgaaaaatgtggcaaaaataaatattttaggcatgaaagattagtatatacactttatttttggttttttgaggcaggatttctctgtatagctctggctgtcctggaactcactctgtagaccaggctggcctcgaactcagaaatccacctgcctctgctcccaagtgctgggattaaaggcgtgcgccaccactcccggctctacactttctactcttatacattttaagaacttttgaaccattttttgtgtgtgcatgtgtttatgggtgtgtatatatatttatatgcaggtacatgtgcatacgtatggagttcagagattgaaattgggtctaaaaaattcacttcttatgttttgagactgagtctctcattgaacctagttaaccaaatttgctagtctagcttgccaggaagcccaggggtctccctgtctctgtcttctccatgctggggttacaaacgcaggtcctgaagatgacatggcagacactttacagaatgggccatctccccaatcccctaaaatatgttttaacacagtatattctagtaagttaaataaaatatcacggggctggtgagatggctcaacggttaagagcactgactgttcttccagaggtcctgagttcaaatcccagcaaccacatggtgactcacaaccatctgtaacgagatctgatgccctcttctggtgtgtctgaagacagatacagtgtacctacatgtaataaataaataaatcttaataaataaatatcacacagaataaaaataaaaactggtattaaccatctaaattctctaaattctcagaatccacccccctgtgtgtgtgtgtgtgtgtgtgtgtgtgtgtgtgtgtgtgtgtgtgtgtgtaggtcaccaaaaaaaactgatcctttacaaactcaaacttagaagtctgagatggttacaacttactaataagataattttacagaagatattccaaaattgttttgcattgtataatattggttatattagtatgcccagagcccagcatacaaaacatttaatagcattaattagggttatggtactttgggggtaaaatatattatgttagttttataaatatacatgcacctgtacacacagaaaaaagtacagcaaaatcattaaagcaagctaaatatgctggacatccctactaacccagtacttgggaagatgaggtagaagttcctgaattttaggccagcaagggttactaagtgaatcccaagccatctaggagctaccaagaccctgtctttaaaagtatccccaaactccaaatcataaaagccatttgacagtgaattatagtgagatatggggggcgggggggtgtcatggatcctaaactggcctaaaactcactatgcagttgaccttcaacttctgaagcttctccttcttttagattatgagcatgagtatatcacacccagtttatgcgatgctaggtgtcaaacccagggtttcatgcataccgggcaagcactccagcaaccaagctcatctccagccctctttacactaaaagcaaaacaaaaactaaactacaagaaaagcttaaaagatcataagttaatctattaatcaaaacttaatgagaggggctggagagatggctcagcgggtaagaacactgactgctcttccgaaggtcctgagttcaaatcccagcaacctcacggtggctcacaatcatctggaatgagatctgatgcccccttctggtgtgtctgaagacagccaacagtgtacttatctataataataaataaaaatctttttaaaaaaacttattgagagaaataagccaggaagaattagactactcaatcttacatgacattcccaacttttaagccccatctaagaagcagcagtccctggcacggtgttgtaagaactaaagcatcaagctgcacatggtgtcacacatctctaatgccagcactcgggtacaaaggcagggataatcacgagttaaaggccaaggtgacctacatagagagctcctgcccccatcccaaaaaatcctctaaaccgaatagactacaagacctggttgtctacgctctggcagttttcaaggaatattggccaaatcataactaaatttcatcatatctgtgaattcatacagagttcttcctttcagttaacgttttattaggtgctttcgtcacaagtggtttgactttgaaaaaaattaaaattacataagtttacgttctttgcagaattcacttgccattgtttttgagatggaattgcattgcatagctcatgctggtttcaaactcacaacccttcttctactttccaagtactgggactgtcaacacccagctcagaattcagatatattttgaggtttctcccagagaaaaaaattaaaagttgtatagtctgtctgtctctctgtttagtcacaaaaggtctattttgagctcaatgtttgatagaattttatttatttttaggtctgttcacaagaacctgcagcatgcagaatactgatttattcttaaatacacatgtattttttttcataatcagaaaaatttgtgaaacattatggcaatttctttaaaaaattagagagctaaaaaaacctgcttaacattcacttaatatttatattaggacatttagtaacaaaaatagaaattgggcatttgtatcatacaaaggaatattcaaagagtattttacaaaaaaagcatttttgtaagttctataaagcaaattttagttcatgttttggggaaagatgacagactgctcaattttataagataacaacaataaatattcaggccaggctcatgagaacttatgtactacctgacaaaaataaagctggattatttcaaagtaccttagaatcaaaattagaataccacaatgactttcctgaggcattctcataccctctgcccactcactctgtttctgccttaagcctatcacacccaggtttcatcagactactgcacctactaaaatagctcaatgcctggttacaggttctacaggtaacctacctaagaacttcaaagactgtttcaattaaagacaaatccaatgtgaactctgccaagttcatcccagtctttttatgtgtgtttgagacagggtcttactatgtaactctagctgtactggaactagctatatagattaggttggcctcaaacttgctatgatcttcctccctctgcctctgagtgctgggattacagatgtgcacccaagtagtctaagaatacaaacatcaggaattactcaaaaataggaattctatttccatcaacacaccaatgcaaaagtcttgatttctaattaaaacaaattcatatctgagaatttttgttttgttcctctgaaatgcttatagttattttaacattaaaaaatttgtttctgatttcagattgccttggctctgcagtacaccataaacttaatctcacgacatagtctaagctatcctcaaacccggggcaatctttctgcctcggcttctcatatgatgggtttatgggtatgaaccatcatacccagtttattaaagccatatcaacataattcttctccaaaatgcaaaaagtcttacaactcttcacttgagattgtgtgtgtgtgtgtgtgtgtgtgtgtgtgtgtatttatgtggtcatgcatgtgtgaacacaggtgcacagatgtgacggtcacatttctgtccattctaaaactttgaacatgctgattactagtcataaaattcaaaacaatttttctactatctattattctctctcacacacacaccctttcctgtctcaacactatgtgacccgggctggcttggaactcttcctgtccttgttggggattttttgttttgttttggagggtttttcgagacagggtttctctgtatagccctggctgtcctagaactcactctgtagaccgggctggcctcgaactcagaaatctgcctgcctctgcctcccaagtgctgggttcaaaggcatgcaccaccactgcctggtactatacaactcttaattcacaatagttttcttctctgagacagtctcatgagctcaggctggctttgaactcactatgtagctgaaccttctccccctgtctcccaagtagtcattttaggactcacttccatttaatggagtcttgtttgggctcatgaacaatgttatattttactataaagagacttaaacaatccaaattgtagacaataacctgacattccaaaggtcgtattagcttaggttcatttcctttttcatattatttctgataatgtacctgtgtaacaggaaattttatgtgtaaatcacaaggattgtctttcatgtgattgccattattacaaatgtgcacattttataatagggatttgtgctgggcatggtggcacatacctataaactcagcatttagaagtctgagacagaaaactactagttcttggctacacagtgagacactagcttaattcaaatatattaaaatttttcaaaaacaaataaaactttttaaaaaaaatctcaaaaaaagcagatgataagctatccttgagataatttatattatgtctggatatgattaaacaaaaattataatttattgatagatactcctaaatatgaaaacaacttaaaatggtactatgttcattttctttttttttatcagtcctacaaataacatacatagagtatttgtttcctttccaagggttaaagctataagaaaaattaaaataaggtagtagactactcagcccaggaataagttataaccactctaggcaagtaggcctgtaactaccatatctgtaaggacatgaattaaaaaaaaaaatcttgccgggcggtggtagcacacgcctttaatcccaggactcgggaagtagaggcaggtggatttctgagttcgaggccagcctggtctacagagtgagttccaggacagccagggctataaagagaaacccggtcttgaaaaaccaaaaaaaaaaaaaaaaaaaaaatctttccctttactaatatgcatagtagaatcatagatattttgacactaaacagcaagaaaaaactgaaagtagttttcaaagcaatttgaagtgtctgaattcctactagtaacaaattatttaaatggtagttattttggtagtcctcaacaggaaaataacaagtgtatctcaatattactattactggtagtaattaacacttctatgtgatctatcaatgttagtaaatccacctaacataaaattacagaaagacagaacaaacacaatttcaatacccctttactataggggagaaaaatgacatggaccattgtttaatctaattaattatggaataaaacacattccactgggaatagggtgatacacctgtagtcctaagtacctggaaaattaaggcagggctagcctgggcaacacagccagatcccatctcaggctgctgagacggtagggtggataaaagaacttgctgccaaacttaatctgaatttaatcctaaggatctacatcagagaattacagaatcaactaaggcaagttagtcaggagactaaggcaggaggattccaggtttgagaaatttctcttggtcccacccctagacaaagaactacaggcaaccaatgacaactgtgagaagaattagtcacgcccaggaagagctccctttttggctatccattgcggagtgagcaaccttgaacccatttacacacaaacaagtatatgtgcacatacatacatacatacatacatacatacatacacatgtgtaggtaacaatgataatcaaagaaaaagattctagggtgggcaaatgggaagaactggagggagaaaagggaaggggaaaatgatataattccatttaatttgtcaagtgttgtgactcatagcataccttgaatcctagcacttggaaggcagaggcaggcagatttctgagttcgaggccagcctggtctacagagtgagttcaaggactgccagggctatacagagaaaccctgtcttgaaaaaccaaaaagaaaaaaaaggaaaagaaatttaaaaaaaaactgtaaaggtctctgaactaccaattgcacaaaaataaaaaagtgaaaattcaattcatgatagtcattaataaaataagttagctgttttttctttcatctaaaatttacaaagtaaaaaaaaaaaaaaactacaagactaggcatagcagtctatgctcataatcccaacacttaagagactaaaacggattcccagtctgagacaagcctggcctatataaagaaaatatatcccagactaaataaagtaaactaatccctcacaaaaagaaccccacccaaaacaataataaaactgtaaggcatcttttttctgatataattaagtctttttcccacctgctacaataatccagattatttttatccaaataagatagacatataacagaggtaacaagagtataaaatttacataaagaaacctctaagagggactattcccattttttggtgatcaaaataattcattttggtcttatttataaatggatgttattttagacaccattgataataataaaatagtgttaggcaaaaactacaatatttaaccaattctgagagaaaaaaaaaaccatgggctagaaagacggctcaatggttaggagtacttagactgcctggttaggcctccgtgggagacctgctgggactagatgcccagagtggggtatgagcaaagtgggggctccccttctctgagggagggggagggatttgtaaggatggtagggtaggactggggagagaggagggagggtgatcaggacataaagtgaattaaaaagaattaattttataaaagtacttgctcttgcaggggatctagatttagttccccaaacccacgtggaggctcacaatagtctgtaactccagttccaggagatgaaatgccttcttctgacatccacagacatcctaatggtacacacacacatataatgcaggcaaaacactcatacacataacaagaaatctttaaaaactgaaaaaaattagcagatagataaaggtatagcttaatggtgaaacatgcttattagcacaagacctcaagttagatcaccaaaacacagattcactttcattagcataccaagcatggtagaatgtgtctcttattctcacaaagtgagttaggagaccagcctaaaactacagagtatgtatctcaaaaaaatcatctgagccaagggtggtggctcatgattgtaactctagcacatggaagactaaggcagaaggactgttagtttaaggccagcaggccacattaatttacagagtgtgtctttgtctcaagacactataaattttgaaaaattcattaacaaggtttaagttcagttagtatattatactttcatctgggctattttgaagttcaagtgtataccatataaaacatatctgatgtttcacattagtttgtaagaagccagaagccttttctagactgatagttacaagcagcacgtttttgtagctctcaagcatatctaggggcccatttcatgaaagtaatgtagcttatatttacttcctctaccttgtatcaccccagtcatgttcatctacacaaggggcacttattatgtaacttattggtattaggtaaagtccacaaaacatttgtcattgctgaagacagaacaagtatttcataaacattcactgtagctcctaacaagtctactggttaagggtagaatctggggccagattaacaggttcaaatgtggtagcactgactgatatgggcaagttatttaccttgtctgtgtaatttttttaaaagatggagtcaagtaggggttgaaggatggctcagagtacgtattgttcttcaggggacctaggtttttgctatcctagtttttttgttattccagatgaatctgccgattgccctttctaattcgttgaagaattgagttggaattttgatggggattgcattgaatctgtagattgcttttggcaagatagccatttttactatattgatcctgccaatccatgagcataacccctatggcagctcttttggactccaaagcaagcacatggcatacatgcatacatataggcaaagcagccatatacaggaaaaaaaatagaaataaaagaagtcaaatctgctaacgggcttagaagagcaagcagcatgtagtaagcactttttaagtgtttgttattcctagcatgcagacaatttaggggaaggaagcaaaaaaaaaaaaaaaaaggaacaggaatttacaaactaaaaatactgtgaatttcttaatgttcaaacaaaactaagaatagccacttctagcacaaagaactaattaactctacactgaacaagtaccatatctccaagcttaaaagcagccatatccgaataaaagtagcacctactacattatctactgaatcctaccatagtatttatttgcatagacctcagacacagaccaagaattgagacagaactccattttctaaaatgtatccttgcttctggtgctggtgatcaaaactagggtttagtacataattgaggggagctctctaccctcttaataacttgtgtctgataatgtgaacatgccctttgttacaggattattttgaaaactaataaggatagatatatgtaaacaaaatgatggctattatgctattcccactcagggactatataagtgttgtttattatcttacagtccttttaacaataccagcagccagcatctcaggtgtaagaaaaatgtacaacctggtgatagcatatgcttgcttgtaattcccacactgaggtagaagcaagatggctgaaagttcaaggcctggtctacttagggcaatggttgcacaggaagaaatgtctgaaaaggaagcttcagtctaggtgaagatactgaaggccacatagaacatattctaagcaagcaggattctgggtcattaagaacacagtggttttgccttaagccacaatatctaatacactatgagagaacacctttttaagggctcaaatggttattaattcacccaacaaactattagtgaaaacttgccacaaaccagacattgtgctatacctaaagctgaggcttgtttaggggcctggcttttggcccagtagagtagagagcttgcttacccagtagaacaagggttcattccctaaaatgaatttttaaaaaaccagcaagactcagtgatgcaacatttgggaggcaagagtcaggatgactgtcacaagttcatggccagcttgatggtctacattaccaattacagaccagacagagctacatagtaagaccctgcctgaaaacatcaagataaagtacgtgtgagtgggaaagtcaaccaacaagtaaccagatacctgctaaatctgtagtatataaagcataatatgacatttaaggagtaccagaggcaagaataagaatagagcaggctaaagtcgttaatcagaagcaggagctatgggatgttctagcaagcatgatcagcaaggttatggcgttgggattgataggggagacagagcttggcaggttagaaaaaattgagccaatgggagaaaaggcaggatatctgaagatgagtgtggaaaaaagtcatccaacgtaacaaccaaatccatacttttttttttttttaaattcccacagcatccaagggcatgggctcccaagtcaagtgtatctgaagccaaagcccattattctgggccatgggggggtaaaaaaacaaaacaaaacaaaacaaaaaacgagccgcctttccactcttcaggtggaaaataggcgtgattttcactgcctgggccgcagcgctgattcaacggagtgattgcgcattcccacaaatatgaattatggcatctgcagaattaggggcaaagtccaggcctgaacatgccctctcatgcggtcgtcttgggaaccgaagctccttctagaggtgttccctggccgccaaaccccaaacttgtagagctgggcctctcccaggagagctcccccgccctccccgcgcctgatccttcctgaagccgccctccgccgcttgccaccgcgcgcgtccgccggccgcacatgtcaagtccaacgccattgccaccttcctggtccacacgcagcctgccctctctctctgtcggggctcactggaggggcatccccacccccgaaccccgccatcccgtcctgcccgccgccctcatggggcatctagccagactccaggaatccctgaccgcccccgccatcaaagagtcccggccgccccagcgcccagagcgggcctcgggagcctcagggctccggcctgcgtcactgtgccaccgggcgcatggggcccggctgtggggctctgctggagtccccttggctcaccacgacgctgggactgcgggtcggcatgacgggaccggtcggctcgcggcaaaaagcggtctgaggaggaagccggcggaggaggtgctaccgctccggaaagcagtgaggtaagcccaacgctctccctcgccgcctcagcaatggctcagaaacgctgccggccaggctccgcccctcggcccgccctctcggcccgcccaggctccgtccccggaggctccgctgggcgttctcccgcgcgcgcgccaccaaaggcagttccggaactcttatctgactaggtgggcctgataattttctttctgaagaaaatggtactggccataccgcagcccccaggccctctgtcgtctcccagaggattcccagataatcactccgcatttttctccctcctcatgagtctaaacagctctaaatcatgatgtgattcctcaagatttaggcccagttctttcacaaatttttacttagtcataagatttgagatccagccgggcggtggtggcgcacgcctttaatcccagcatttaggaggcagaggcaggcggatttctgagttcaaggccagtctggtctacaaagtggagtaccaatccaaaaggaaaaataaactacttagtaaccttaggagaaatagaccctaaaatgctttttgcctttacataaaatgagcattttaagccaagtatggtttaaaaaaaaaaaaaaggcttttatgcccagctaccaagaaaggagaatcacatacatattcgacctacccagacaattaagatcttgcttcaaaataaaaattgttaaggtggaatagggatggagaaagacatcttgcacatgactgcaacacacacaaaagaaatgctgatagagattcatatattaccaaataagatgccatttcttacatgttgattttagtcaggtgtggcgacacatatgtgtaatcccagcactacagaggtaggagaattacaactgtgaattccagacgagcctgcattacaaagtgagaccctggctgaaaaacaactaactaactaactaaccaacgaacgaacaaactgactgactagtgtttgaaaaaataaaagagccaggaagagagcagagcagtagtacatttgggctctaagaggctctgggttcaatcttttttttttttttttttggtttttttttgagacagggtttctctgtatagccctggctgtcctggaactcactttgtagaccaggctggccttgaactcagaaatccggctgcctctgcctcccgagtgctgggattaaaggcgtgtgccaccgcgcccggcttctgggttcaatcttatacaacaacaacaaaaaaagaatgaataaacaaataaatagataaagtaagcatattaaccgtacttgatgggaatatgggggaattaaaggattgcacacatacatttgagcgagcatacatatgggacacaatataaaagtacacaatgtatgggaactgtggctgttattcatatttatttttttctccacaatttcctgcatggaatttgttttatattttgtttacctattagatattttttaagacaggtctgttttttaagacaggtccttctatagcccaagctggccacaaacttactttgttgctgagtatggcctggaacccctgttcctcttgtctccatctcccaagtactgggattatagacatctgactatccaatgtgaaatcagaaaacaaaatcgtcctctattttcaaaagcagccagcagttgcttgcccctaatgctactgtcaatatctccatttgtatctacccagcacccattaccatgtttgactatagtcagtggccacgcttttattaaggatactaatatgagaaatttgatggtagatgtggggttttttttgtttgttttattggtttcgtttgcttttggttgttttctgagacagggtctctctgtgtagctctggctgtcctgaaactctctccctagaccggactggctttgaactcacaaagatcttcctgctgggtgatgggattaaaggcttttgccagcactgccctcatcttcttagactttaacaatggatcatggagttttgttccttttgagtgagagtcttgctttctagtctcagttggcctggaatttgcaaccttcttgcctcactgtatggtgggaaacaccccacacagtacaagatgaaagaagttatggttttttgaaaagtaaacaagctgatctacaaagcactttattcagatcagacattacatttagagttttgttttccaatttaatatgagttcgggaaagtgactattactaattcttacatgatattactgaaaaaaaatgttatcatatacagtcaaatggatcccaaaatttctctaccttggatctggagtccattcctaacacatgccgaacaggtgccaaatttggcagtcactctaaggcactgcagaagaaaaaaataccacctcaacttctgcctttgtttgaatagttattgtactggctagttttgtgtcaacttgacacaggctggagttatcacagagaaaggtgcttcagttggggaagtgcctccacgaaatccagctgcaaggcattttctcaattagtgatcaagaggggaggtccccttgtggctgatgccatctctgggctggtagtcttggttctataagagagagcaggctagccaggcagtggtagtgcacgcctttaatcccaggaggcagaggcaggtggatttctgagttcgaggccagcctggtctacagagtgagttccaggacggccagggctacacagagaaaccctgtctcgaaaaaccagagagagagagagagagtgagagagagagagagagagagagagagagagagagagcaggctgaacagcaaagtggaagtgtaagctgaataaaccctttcctccccaacttggatctatgttctgttgagatgactttcctctactgttctctctctctctctctctctctctctctctctctctctgtgtgtgtttgtgtgtgtgcgtgtgtgtgtgtgtgtgtgcgcgcgcgcgcgcgcgcacgcgtgtgtgttctgctctgctctagacagctttttcctagtattctaaaaactttttggttgagacagctagttttctgttcaagacagatagctctctctcctagtaaatattctaaaagctctgtggagagcccatgtgtttttagaccaaagtcagaaaagctactataaaaaaaatcttggattgtctgaccaaatcagaaatcctattagaaaaaaattctaaaaataattcttggaggcagagacaggcagatttctgagttcgaggccagcctggtctacaaagagagttccaggacagccagggctacacagagaaaccctgtctcgaaaaaccaaataataataataataataataataataataattcttgggttttccgatcaaaatcagaaagccagaaaaaaattctaaaagtgccttcagacatttagaattctaaaaatccttcagacagccttctctggatagcagctagagagccttctaaaagagctatatccactctctaagtaattcttgggatttctgacctattagaaaaagttcttaaaacactatgaaaatttctaaaagagctatgctctctccatggattttgtgactaaaacaagaaagtctgttagaaaaaaaaattgaagagctgtgttcgctctccagagatctccagacagctgagttctcactagagaaaaattctaaaaagaactgctattgccttttgctagctcatctcctgcagaccaaaagcccatgttttatgatttattcctggttcacttgtgaccaccctatgaatcagcattagctgattaccttaccccttgtctcttgggaagggactgcaagcaagcataaacatagataataagatagctgggtgggaccccaccctggaattaccattccgatcatgcctggccctaaattttcaggctgaccttgaacccagaatctgcctgcctgcctttgtatctgcctgtctttgtatctttctgacaatctgactcatagtggagctgcctctgttcctttagatctgtgaatctctttatacaattcatatttcatctttatttttcgcatagttgaggaattatatattttcaaactcattttttagagttcttttccacagtcttaaaggctgtcctgaaggccccaggatgtaccattttgctgagacattagtcacaccttcacctcttgaactaatgctgtctgactaaatattaacagggaggacattcttcagaggaacatgtgaaaatatttacattattatacaaacaagccttatgcccataacagccattgacatccgtggaggcctactccagcttgctctgtcccaggcacaggaaccttgtcattctgtccctaccaaagccatgctggattccaaaatagtccttcaaatttctggagttggctgtgatagctcacacttctaatcccagcacttaggaggctgaagcaagaggatagaggccggtcttggtgacagcacatttgagggcaggctgggctacagaagactctatctcaaaaaagaaaaagaaaagatgtatatacgtatatatttccacaagaaatattacacaaaacacttattcttaacattgattttttttaaaaaaaaagtttttagttctgtgtgtgcgcttgggaacgtgtgtgtgtgtgtgtgtgtgtgtgtgtgtgtgtgtgtgtgtgtgtgtgatgtatctgtacatattcaatatgtgtgcctgtgagcatgggggctagagaaggctctgtcattctctactttattccttgtttaagacagaatctcttactgatcatggagcagtctggcacctggacagccgcataattcttctgtctccacctagtcctgcccagttccatgctggcccatctactgtcttccccttctccctgcgtccacaagccttccagttacaaacaggagatcacgtgaatctaagctctggtccttatgcttgctcgacaaggattctaactcataatgttggaattttttaagtgaccctcattagtctacatctcctcagctgatggccatgagagagcaaagatcgacctcccttgagtgagaaggtattcttcctgcagactgccttgtaattagaatgtcagctttcccccgagtctccaacctactgcaattacttctatcaaattgggattgaacagggccttcacaatcatgtaagccaaattaaaaaaaaaatctctaccccttacctcctctctctccacataaatatctggagagatatatgtagacagactggctgtttctatggaaaatcttaactaatagaactaactgattttctagttgaaatgtccagcttgcttgagctatctgtgaagtccagtgatttactagaggtactcatttaaagtattgcatcacttttcataatgagcagagaaacttgacgtagaaattgaacaagaagaatctaagtatttagcggggacttagtgggcactgcatagctatcctttgggcagcagcacctttctgcaatcctttaaaagcccttgatcagctccctctcttatattccgaatataagtttctccagtaatttgatttcattccaccctcactacctgtacttgtttagaggaggtgtgttagagacagggtgtcagacaactcagctcacctggaactctttttgtggctaaggatgacctttaactcctgatcctgccttcatctgccaagagccttaatcacaggcaagtgacaccatgcctggctactaattctcagatgggctcagtggatgaactacataaattgcactccaaacatatcttaactgcttcctaccctctttttatccagacccagaggtgaggagtctttgaccagaagatccatttttgccctgtgtttctggactagggtccaatccaaggacacatgttatctttccttttttctgtttttgtttgtttgcttgttttggagacatggcctcactatgtatctctgactggcttagaattacctgtgtataacatgctggccttggattcagagagacccacctgccgctgcctctacctacacagtgcaagaatccaccaggcctggtttatctttacttattttcttattctttgttgccattcaagagttcttcagactcagcctgtcatgacctaggtatttctggctaactgcctgcagatttccctttcagttgggttagtctgatgttaccaggtgattaaattccatgtgttctagtaagtaccagaaatattgttgtaatggttagtcttcacagtgttccatagtaagaggtgcattcccaaagaagaaatacttactgcttctagataggctgagattagtcatcttcaaattaaaataggaggggatggcaagtggggctctctgccaaaggctggaagttcgttttcttttgtctatgatgctggggatcaggctcaggacattctagacaagcactctgccactgagctacatcaccagcagcctttgattccagtagaggctgttaatagatgacttacaaataggtctgaggtaaccttgggcttgtcacaggaagattaagtgactagaggactggaatttgaattgcacatatgacatctgggattcgggggaatccagctccataaaagacccgtgaactgatcaaggagattgctatgaggttatgtctcctagttaatgccaaaagcaagctccataaattctcagcagcatgactgcccatgctagagctacatacacatggacaacaccaagagacatgccaaagtggatggggaaaatcccatgaggcttcagccctacagaaaggagtataggaaacagaggaaaactgggagcaggaaaggtggtgagggaagaccacaccagttctttgtgtagtgccaaaaggtcagccctgggggctggtgagatggctcagtgggtaagagcacccgactgctcttctgaaggtccgaagttcaaatcccagcaaccacatggtggctcacaaccatctgtaatgagatctgatgccctcttctggtgcatctgaagacagctacagtgtacttacatataataaataaataaataaataaataaataaataaataaatctttaaaaaaaaaaaaaaaggtcagccctgaaaaaacatatgcaagtaacgttatacagatttaggaggatatatatatgttttctacacacacacacaagcaatcaataacaattagtgaaaacaaggtcatgaatttgaaggagagttgtgaggtgtgtatgggaaggtttggagggagcaatgtaattatattgtaatctcaaaaataaaactaaagactcttgaacaataagatgtcatgcgttttctgggatgctgaacacatggtcatcctaggggaatagtgttatgagagacagcatgagcactccatgaccccacccataccccaccctacttctcatccacgcgggtgtttatctgcatctttttaaatagtctttagagtacactgctaagcattaagggtttcccgggactacaactgttctaataagaactgaatctgaggagggtatcatgagaacctctgtttaattgctggttggtcagaagtacaaatcacagcctggaacatgtaatgggcacctgaagtgggaaagagtcttgtaagacagagccctcaacctgtaggctctgatgctatctctaacctgtagttactgatctctctaccctctgagatctgtgaggtcagttgctttttccagttacagggcatcccaatgttaccttttgcagactttctaggtatgtggggattttctcacatgtctggccacaagcatacattgtgcaatgttaagtaagagtacaaactatggggctgacgagattgctcagtggttaaaaacactcttacaggggctacaggtttgattcgcaatatctatatcatcatctgtaacttaagttccatggaatccaaacctctcttctgcgctccaagaacacttcacacatatagaacacagacatacatgcaggcaaaacccctatttacattttcaaacatataaatttttaaaattgtaggctaggatgaacttgagttatggtacctcatgctccgctcatcttcccagttcacctagattattactattaccaaaggctcgcttcttcatctcatgacccaaatgttggcgcatcacaagcaaaaacaatagagcaggacagtaggcataattaactaggagctcaaggggtaggtcagtactgagcatttacaaggtcctaggttccaactttatcactacaatagaagaaacattagctatgataacatgccttttgagacaagcttttgctatgtagcccaggatttactgtgtaaccaacctaagctcgcctcagacttgcaacaatcctccttctgagtgctaggagtgcaggtgtgagctaccaaacctggctcatgtaccattttatttttcatagtagcctggcagtggtggtgcacacctttaatcctagcactcaggaggcagaggcaggtagatctctgagttccagggtcacctggtctagagagcaagttctaggacagccagggctacacagaaaaaccttgtttcaaaaaccaaccaaacagggctggagagatggctcagtggttaagagcactgactgttcttccagaggtcctgagttcaattcccagcaaccacatggtggctcacaaccatctgtaatgggatccaatgccctcttctggtgtgtctgaaggcactacagtgtactcataaataatttttaaagaaagatggttttttatttttagttgtttatgtaattaaatcagaggtgtcagatgcctgtgaactgggattataggcagctgtgttgtccgatgtgatccctgggagctaaacttggatcttcttcagcagtagtttgtgctcacagcctttgagtcatctcttcagccctacatcatgtcttgatcttctttttgtttttttgaggcaagatttctcaatgtaaccctggtgtcctagaacttgctctgtagaccaggctgggctcaaactcagagatctgcatacctctgcctcccaagtgctgggattgatggtatgaaccaccatatctggccctatatcatatattatcattattattattattattattattatttttacagcccagtcattaccccactcccagtccaccctcccacagttcctcatcccattcctcctccccccctgtatctaagaggttgtccctcccactcctgcaagtcctccccactcccttggggcctcatgtctctcaaagattaggtgcttcttctctcactgaggccaggccaggtagtctctgctgtatatattggaggcctgagaacatcatatatacttaatgtatgcaatagcatattgcaaacgttttatagtttagattcacagtgtagacaaagagtgtgaagacaatgaaaaggcattcttcctatgttttagatattatacctctaacatgtagctggcaaagattttcgcccattttgtaggatgtctcctctatgttcagtgttttccttgcaatgcggtaggttttggattatttggcattattttttgttttgtttttgtttttgttttttttttcgagacagggtttctctgtagccctggctgtcctggaactcagaaatccgcctgcctctgcttcctaagttcccaagtgctgagattaaaggcgtgcaccaccactgcccagccttgtttggcattacttactgggttattgtaacatttcctgaaaattctttcccatatcttaaaagtgttttccttgagtagtttcagtgtttagggttttatattaaggtcttttatccattttaaatagatttttgtacagggtgggagatacaaacataaagaaaaataaataaaaataaaatagaagacaaagaatggctaggaagatggctcatatggtaagggaatttcccaccaagcctggtaacctgagttccaccctccagatccatgcagtggaaggagagaaccaattcctctgaattgttctctgatctccacacatgtacagtggcacaagtacacccacatgcactaagtgtaacaaaattagctaatgtttgggcttgagagatggctgagcagttaagagaactggttgctcttccagaggtcatgagttcaattcccagaaaccacatggtggctcacaactatctggaatgggatctgatgcccttttctggtgtgtctgaagaagacagctatggtgtagtcatataagtaaaataattcttaaaaaattagtttgtagccgggcattggtggtgcacgcctttaatcccagcacttgggaggcagaggcaggcggatttctgagttcgaggacagcctggtctacagagtgagttcaagtacacagagaaaccctgtctcagaaaaaaaattagtttgtgtttttattttaaaatgattgtattatttactcattataattttatttattattaatttataatttcaattatttatatcgtttggtttttattattttgtgttttactttacatgtatgtctatgtaccatgtaggcacctgatacccacagaagccagaaaaggacttcagattacctggaactggaggtataggcaattgtgagccagcatgtgggggctggcaattgaccccaggtcctctgaaagaacaggctgtgctcttaaccactgagccatctctcaagctccccatcaaatgtactgaagtgagtaagaagcttgactcacagtaggttacttttaaataggtaaagtgtttttgtaatgaaattatatcttttcctgccaggcagtgccaaactcaaattcccatgtaaatggcttccaaggtgacttttaaaactgtccacctctaaagattttctggctatatttacaatccctttagtgtctgaaaaatacaaaggggcaaactgtggctaggatgtatatgacaaggacggattttcacatcctggacatgtgtatgaggcctctctggtcataacctgttctttcaaaatatgctcttaaccacgtggttgtcacaggctcgatagtaacaggtggcaccatctccggctctgttcctcagcagagaattccttcatttggccattattaatgaacaagccataatgatttggtcacttcacaggtgctcactattgtttccctcacaactgcctaaagatccctgctgcaaatgagatagagccacaccatccagtatagaagacaccaactgcaggtgacaatttcataaacgtaggtctgaattaattaaaactcatttaaaatgtagagccatggtgatagcagttggtgaatgtgcttgccatacaagcataatgacctgcgtccaacgcccagaatccacagtgaaaggagagaaccagcccctgaaagttgttctctgacctccacatagctgtcatggcacaggtcttagtcagggtttctattcctgcacaaaacatcatgaccaagatgcaagttggggaggaaagggtttattcagcttacactttcacattgctgttcatcaccaaggaagtcacgactggaattcaagcaggtcaggaagcaggaattgatgcagaggccatggagggatgttacttactgtcttgcttccactggcttactcagcctgttctcttatagaacccaggactatcagcccagagatggcaccacccacaaggggcccttccccccttgatcactaattgagaaaatgccttacagttggatctaatggaggcatttccctaagggaggctcctttctctgtgataactctaccttgtgtcaagttgacacacaaaaccagccagtacagtacacatgcacatgcacacttctctctctctctctctctctctctctccctctctccctctctctctccctccctccttct

SEQ ID NO: 45 - DNA, 38982 bp, Homo sapiens
tttaaaagcccttggtgaccaacatgcactggaggtaactgttctctggagttactttatctgcctaaagtctggaactaccaaagaataaaacaatgaccactggtcctttttatgtgtttgcattaacttaattcatatcaaaggaagaaagacacacctggacagagttttgtcacaaaccatcgccttctatttcagtctaattcagtatttcaaagaaaatcatttcatagccattgtctgctctgcaggctcaacagaccttgttacaggcctttttgagttctccaagtccattcatttcccctaaaaaatcattttatataccccaaattgtcacatttaccccacttcttccctatgaaaagtggtatataggcatctctacccccatcgggttattgggtaatccttctcctacaatccccctatgctatgcacattaacataaaatttgcatgccttttctcctattaatctgctttgtcatttgattttcaatgaaccttcagagggcaaaaggaaagttttccctcagctccaacagttttggcccagtgaacaggacaaccaaaactgctctgctcttccgaaaattgcagtcagggaacctgggacccggcaagccagcagaagggtaagaaattctttccagtcagaatcttggtctgtgtttgtctttggaatctggatgagcggatagtaaaaaaaccatgtttgtctctctttccatatgtaacattaacaggagaaaatcatttttgactggtcttgggtgtagcaactctggtgtattttattgtatagatattcatattgtcttatcttttttctcccagaaatagattttgtttctccattgtctttgtctttatgtgttgttttgtcataaagatgggtgtcataggatagaacatgggtctaaagtctctataagccccttgtctgagctggcccccgagagactggtgatgtttacagtttcatcagacctatgtacaattgtacgtgctgtgagtccccgaaataaaaactggatgagggtccccttatatcttgttttgtgtttgtgagaacttgacttgtttgttactggtgggagcactcgctcttgtttttcaccatctggggagtatgattttcgggacataactggtggccagtctgaaagggccagaaccctagacacctaagatattaagcagcacactcttaggtctgaatatgccagactctcaggggactttgtcctatctataaaggacctttgttgtctcaacacatgctacctggttagttctggaaaagtccaaacccaggagggtctgctggtgcaacagattaaggggtctgtgactggcacaccccacaactttgtgggatagtgtggcactgctgcacacacagacagcaccctgcgccatctgtggtaatgagtcttttgctaccttagcctatttctgagagtgaatttttgaggaatcatgagggctacatcaactgaaccgatttttaaaatgccacttaacattcatagtattgtaaacttggaaagttacctctgggactttgcatgaaaaaagctgattggcttcagttgctttgcaataaagaaactggctatatttaagtgaaaactttttagagggctcttgccttaatcagctgttattggtacttatataagaaacaaaagaaatgtagccttagaaactcctttggcaagatttcaaaaaggcagaaagcagattgtaaatgtacttaaaatctttttgcttcaaactgcctgctttggggttcccgctgaacctacaaaaagataccccagcttgtagtgtaggggctaggattctactcttcactgctgtgatctgggattggattctcattcaggaaatcagacccttagagatctagatctttgcaactcaggagaaaaagaaaaatgtacaacaattagcttgaattatttgttttgaatttatgtttgtgtgactctcgactgtttggagagttacattaccatttgatattgatctttttcccttttatggaccatttttacttttctgttattgaagtctctttaggggctggctccagatcttgtgaggacttcctcttcatgccactttgaggtgcctcatatctgtcctttgttacctcataaaggatttactggctttggttctgagtcactcagtagatacctttggttagaaaggagaaataaaagttcaaaaacaaggaatactggttttttgtcccagctgaaatctgataataataaattccaatttttaaaaaaagaactctaaggtcagaaaacagcttaactaaaagctgatattcaggctataatttttactttatttttttaatttattattattattattattttgagacaaagtctcactctgtatcccaggctggagtgcagtagcatgatctcggctcactgcaacctctgcctcccaggttcaagtgattctcctgcctcagcttcccgagtagctgagattacaggcacccaccaccatgtcaagctaatttttgtagttttagtagagataaggttttgccatgttggccaggccggtctcaaactcctgacccaggtgatccacccacctcagccttccaaagtgctgggattacaggcgtgagccaccttgcccggccgtactttgttttatttttcacaaagacttttcccttttggatcttctttctaccctgtgttggtttttgttttgttttgttttgggcttttttgtttttccagtcaactgaagctctttttaaaaattatacatttggtccttttttttgcttcctttcttattagaattatttttactgagaaaaaaaagtaaaatttcattggtctttttggaaaagcttaaaatattcccgatgggcttctctaagagttgttttcccatttacttctacttcacctttcttttgccacctttaatattacattaaggggtctaaccaggactttgactctcatgaggggaccctgtgaccctttgaagaacacacaaaaaaagtgccactggcctcttggggcggggggatgttccctgtctccattacagagctccaagaggtatgggcaggttcctctcaggtctaaagatttgccctctgttgtgttaagccccctgatgtctggcttttggatacatatctgtgtgttctgtattttatgtctacacatatttatatttctatacatatgcttgtatattgtctaatggtaataaattgacttgaaaataaaaacacatataaattaagtaaataggttcaatgcttttcaaattcatatgaccttaagaatctttgctaaataaaacttttaaaattattggtaaaataaaataaaaatttcttcagaatttaatttatacatttttgcctggggctactgctcaggcaggtttggactgtctctgctaaatgtagtaaggtcataaaactatctcttctatgatatttttggtacttctttgatttgtctgtgagctaaagctactacagctggtggctgggctcccccaatgccttgcacacatcttactgtgagcctatgtttttgcttttgagtttctaggtcttggagcctagaaagattgccatgatgaagcctgaagatatatgtgtgtccacagcacctgggctaccagctgcagggcagagtcaagctcagtagggccctatcctcccacatccagctcttcctcttggtcatgctgggaggggtcagatcctccagacatcatcttcatagttctgtcctctgtcccgggctttacacttggtgtgtaaatccaggacccaggtggaccctccttttcataaccatcgtgggtgcccatgggcatttggatccaggacaacctggaggatagagtattggggaggatacctgtgcccagtatcttaaaggccttgctcaagatgaaattggctgatttagggttgacatggtttagctgggaaaaaaacaaaaaacaaaaaaacaggccaggcacaatggctcacgcctgtaatcccagcaccttgagaggccaaggcgggtggatcacaaggtcaggagttcgagaccagcctggccaatatggtgaaaccccatctcaactaaaaatacaaaaattagctgggcacggtggcgggtgcctgtagtctcagctactcgggaggctgaggcaggagaatggcgtgaacccgggaggcagagcttgcagtgagccaagactgcgccactgcactccagcctgggcgacagcgcaagactgcataaaaacaacaacagcaacaaaaaaaacccaaacaaacaaaaagcttaagcttaaatggctactattgtttttcatgaggaattcagacataattgttgatgagtcaattaggtaaatacaaatagagtaaatgtttacaaataaatttatcatagtttcaaaaatctttttggtaattgacactcttaaagtcttaaagtcatgttatattaaattaagtaatagttaatagtgaaatatctgagttatttctaagttaaaatactgacacatcaattattaagcataagtttaagtttgaatactctgataccttattttgatgtgatatagaaaagataaatatatttgaatctcttgataaacatgaaaaattgaggaaatatttttaagaattataaaatggttttcatttacaaatactgatatgaaagagttcccttagattttcactaaaaattaagatactaagagttaaattataattaatatatgtaattaaaaccactaaaaataaggtaaacaattttgtatgcaaagtgtatacaaaaaaaggcaagatacgtttttggtgagaacgcttataaggaagtcatgagtatgtggtttggttaaaggaaaagtaattttgtctagtttagaggttacttaaaagttgtttcagaccaggcacagtggctcatatctgtaatcccaacacttcgggaggccaaagtgggaggatttcttgaggccagcttgggcaacagagggagaccctgtctctacaaaaaaaaaaaaaaaaattttaattagctaggtgtggtggtgcacacctgtggtctcagctactgtggaggctgagggctgagatgggaggatcacttgagccggggaggtcaaggctgctgtgagccatgatcaggccattgcactccagcctgagtgacaagaccctgtctctaaaaaataaaaataaataaaaaataaataaagattgcttcagactaagtgaatggagaaaaaaaatgatataggtaaaactaaatggatataaagacttttaaaaagtagaagagtaggaaaaaattataataggttatagaaggtttatgaaaagtttatcttgtgtgcaaagctgactgatatcagagaaatttgtttacacgtcattaaaattagctttagtatttaaagtacacaaagacaaagctagtggttgattttctcttttaaataatatttttgcataggattaataaaaagaaaagatttttgtacatgttctgagtaaaatgcaaaaaaacaaaaaaaaagcaagagagagaaacagattttgtgtgcctcatgtcttgtcatgcttcttcagaaggtgttttgattatttgcaaaaccgagtctcttatcaatcaaacagcaaaggtttttgctttttgaaatcttctaattatcactttggctaaatgaatgactattattttttcattggacctatgatcctattttgatcaagtatttgaaacctttaatgtatttgagaggcttctcacaattatatttcaaaatctaaaattaagtatttttgacctcaaactaactttgagatattccaaaaagctgctgaagcttccaaaagaaataataaacaggcttatttgatatgttcattatgtaaaaagattttcaaataagaaataatatttaaggccgggcgcggtggctcacgcctgtaatcccagaactttgggaggccgaggcgggcggatcacgaggtcaggagatcgagaccatcccggctaaaacggtgaaaccccgtctctactaaaaatacaaaaaattagccgggtgtagtggcgcgcgcctgtagtcccagctacttgggaggctgaggcaggagaatggcgtgaacccgggaggcggagcttgcagtgagccgagatcccgccactgcactccagccagggcgacagagcgagactccgtctcaaaaaaaaaaaaaaaaaaaaaaaaaaaaaaaaaaaaagaaataatatttaaccttttcaaaattatatttgtattgtcatgttattagtatttgctccaaaattatatgagattcctaaaaattggatttgttttgttatatgttattagtcataattatgagtattatgttaaattgttgtaggtcataaaaggagaaaatgacctagttttcttgttaattccatctttaaccacggccatttttagtcttgctcacaattaatttttttatgctgatcctttttttctgaaagctctttgcaaatcctaaagtgttgtgtcttcaagaaagctcatggaaaggactgcaacaagtactcttggctgggcacagtggctcatgcctgtaatcccaacactttgggaggcagaggtgggtggatcacctgaggtcaggtgttcgagaccagcctgaccaacatagtgaaaccctgtctctgctaaaataaaaaaattaggccagcatggtggcaggtgcctgtaatctcagctactcaggaggctgaggcaggagaatcacttgaacccaggaggtggaggttgcagtgagccgagatcatgccattgcactccagcctggccaagagcaaaattccatctcaaaaacaaacaaacaaacaaacaaaaacaaaaaacaaacaaaacaaaaaacaagtactcttgaatacaagtttcttataattttaagattgtattatagcactgagtaaacaatttcagaactctaatttttaaaaagtcataaaattgttaactcaacatcaagcaaaacaactaattacattggactaatgtaattttaataacttttttgtttaaaatattgctgattctttttatgttttgctttacagagttaaggaaaatgtttgttctgttaagctttacagaaatgggtaaagtatacttttttgaacaaaattgaaacattcacttttctctctacctgattgatcctgaatttggaaactatgagtatttctattttatggcaaaatagttatttgaatcagttcattaagaatctgttcccttttgccacagaacacagttggagactctggttattttaccaaggctttgactgaaatgccatattttcagatgtgaccagacagctttaagaaactgaggttgatattatgaagcccataggagcttttggaaaaactggtctaatatcctaaatacacggttcacataatgggcttgtggtaagtaagaatgtcactttctgacatcccaggaacctcaagttaattgggggaccttgagaaaagagaaattcactaatttgtacaggtattactgacacaatctaagagcaaatccaatccttgacttggctttctagcctgaagaggtttctaaaagtttaatctgagattccttacgaaaagttccagcaaagtgaacttaaaaggagcctgtgttacaaattgatattcttactgcactttatgcaaataatcaggccaagtacaataagacgaaaacttaatatgcaaataaaatggctttgcttttatttatctttggtagaaatgggggactgaagagagaaaaatcatgtttcaggaaagaaaaaaaaactataattagattccagttcattgtttgttttttctttctttctcagatttttttatttgcctgtaatctaaactaaatcttaaattgttagtcctatcaaaatctgtctttgaatctccaggcaagcattttcaattttcctcctacatttctgacttggaatcactaaacgttaaaattccctttttcctaagactctacaagctgatactagctaacttggctttgaagaaaaatcactgcaacattttataaatggacaaactttgcacacaagctacaatccaggaaaatctgtcagattgctactgatattctcagctgtcctgcagactttagaagaaactagtttgtaaactactccaaagattaacctttgtttttcttccaattctgtaaaaaatggctcttactgtagatctttttgtctgcattatatatagagtcatagctttaagatcccatctacaaagccatctcctgatataagacaaaactggccttttcccagaagtgagaagactaattagactggccttttcccagaagtgagaagactggtttaatgagatcctttgccattcagctactaactcagtttttctctctacaactaccaactcaactttttgtgtatgaaacattagaaaagtttcaaacaggggaattactggggctcagaaaaggacacccaaaaatatggcactctgatatgctggttacttcaaattaaaggctcccggaagccagtagacactggaagaagttgttccccgaagttctcttacctgccttaagtccagatctgccaaagaagaaaacaattacctctggtcccttttctgtgttttcattaacttaactcatgttacaggaagaatgactaaagtttgtcaacacacctggacagacttttgtcacacatcattgtcttctatttcagtccaattcagtattttattttacttatttattttattttattttattttattttattttattttattttattttattttattttatttatttttgagacggagtcgccttctgtcgcacaggctggagtgcagtggcacaatctcggctcactgcaacctccacctccctggttcaagcgattctcctgcctcagcctcccgagtagctgtgattacaggcacataccaccatgcccagctaatttttttgttatttttagtagagacggggtttcaccttggccacactggtctcgagctcctgacctcaggcagtccacccgcctcagcctcccaaaatgctgggattacaggcgtgagccaccgcggctggcgcctggttattttttagtgatttttagacatctataaaaacaatatcagtactttgaggtctaagatgatgttttcttccttaagggagtatttaattttgttttattttggcaactaagggccttaattagcaaaatctgaatcacgttaattccctttcagagatatcatgaaagtttcctcataagccaattataaaagtaaaattagttactacaagcaaagtttttagaaaattcctgactctagtaagtgcccagaaaaatttgaatgtaattgatttgcatgaaaaatgctgtaaaacataataacataaacgttaatggtgaattcagtgatgttggtatttccatgacttttttcattctccttacatgctgtaaattattttttaaatgaaaattcttttattaaaaaaagctacattttataaattagtataacataatggtaaagagaaatgtgaatgtattagaaaagatgctccattgagaggagacacatttgtatttatcatgaccttgaatgaaggtccctctgcagatcctatcataatagtccttgtgtcagtgaagtcccctgtgaaactggataacaggattttaaggtagagatgttcctcaggcagatggaaatgtagtctatagctgtgaagataagtcaggcaatgaaataattatagagaaaaaataatgtaagctatcaaagacagatgtatacaagggagacagagtcacataaagtctcagatgtaggaggccatagagcaaaacgctgagttctggctttcaggagttttctaacataacaacctgatcaccagttaaaagctaaggagaaagatgaagaatcagtatgagatcataaaattatgatgctcttctaaaaatatgcgaaatgaggtttttagggaggtgtaggtatggctgaagaaaatcaaggtgaatgaagacaagatcaattgagaatgtagtttcagaaatagcaaagaagccaaagtttgaggaagttaagtggctagggataacattgaggcactaaagcattattggttctgcagtcaagggtaggatagattgttttttttttttttgagacggagtctcactctgctgcccaggctggagtgcaatggtgcaatcttggctcactgcaacctctgcctctcgggctcaagcaattctcctgcctcagcctcccgagtagctgggattacaggcacatgccaccatgcccagctaatttttgtattttcaatagagactgggtttcaccatgttgcccaggctggtcttcaactcctgacctcaagtgatccgccctcctcagcttcccaaagtgctgggattacaggcgtgagccaccacaccggggggtaggatagatttagtgagatgactggataaacggaatcaagaaaaagctttgtcaaaaacttatgcttcttaaaaacttaatcctgggacagaatcatctaaaacgttgttccatgtcttcactttgactcacccataaaaacttcaagtacaaagaatgaaaaataaccacatattttctaatgctcaatattttatttgtagtgttgttttctatatagatatgataggtcttcatgattttttgtttgttttccttgaactgattcccaaagtattagcctcatgaatcatgtagtcataagaaacacagtcattgtattctctttgctgtataattttggtttcagttttccttacatttcctattcaaggaacattttcctgtaaaatgacaggttgaagaaaacagccataatttagtagagaatagcgcgagagctattctagactgtaacgaaagccatatgctatcacaatttaatttatttcaagtactaataagctgatgacaaaacagcgatgtcttttagtttactcacacgaactatttctcttttctccttttgatcatctagaggaacgggcaacttggtttcttctttagcttccttgttctcattaagattgaacaatgcctctaaagtgaaccacagacttgcatgcaagctgaaaacctttaccaaatgcagtcttaatttgtactttgagaaaaacattttcaaggtattttatccttttctccaacttttgacatattacaaagtacccaaatatgccagactgttgcctcatcagccccccgcagtcaggtacagttagatgcaaggcaatcttcctaaaagttacttattagagatgtgagaagggcaaatgctatcattggaaaaactgacaaaagtcccaataggaaaaataaggaagtggagagttactatgtttctaatttttcatgtgcttctatttttttcctacttcagagccattgactaatagttgagtataacacaggttgtgtttccgggctgctgaaacatgacactaatattttcaaagaactgtggaagcctaaaaggaagccaatgagaaataactaaatgagagtttaggactgcagccttcattttcattcaaagatttaaaagtttccataaagtaaaatgttcttctccggccacctgttttcatagttctgtgttttccttcaggcctttctggcttcctatatggcagtaagaaaatgatgtgcttaatgattacaaatttcatatggaatacgaactttcagtttgtacatatgatgcacagagatgcttttgtggttttattggttttcatattacaaacaaagaaactagaaaatgaaaccattccaaaagtggaagtaatttctcactgcccctgtgataaactgtggtcactggctgtggcagcaactattataagatgctctgaaaactcttcagacactgaggggcaccagaggagcagactacaagaatggcacacgctatggaaaactcctggacaatcagtaaagagtaccatattgatgaagaagtgggctttgctctgccaaatccacaggtaagagaaggcagtaaaatgtgggaaaatgcattcttcttctcattccttacctggccaagttaacttctactgaacaactgtggttcagtaacttctagtaaacaaacacataaagctgtgtaaaaattagagagctgtaataactgcatctcacttaatttgtcttacattttctccctagaaatggagtcatctatgcatttcttacttacctaacatggatacggagagtggtgagaaaggaaactatagaaagtgtatcagctttacataagaattatatagtaaaatacaaacaatgaggttattacagttgtattttgagaaaaggtgttttgcaaaagccagagttttaaatgagccatgagtcaaacagaaatccctttctcttagggatataacttaaattatgcaaaacatgtgtttctaatttgatggggtttatgagattgcacatcaagcaccttccatgttatattatcattgcttgttatttactgagcgtaagattcaagtgagagtctgaactaccttttttcttgtttgcaagtcttacctataaagtacaaggtatgtggaaaaaaggtttgccttaaaaactacattttctagtctgtcttctaacgaatgctatgtaaaccaatttatcatcaatattttaattatcaaatacagcatttttctaagcaatttacaaattaaccctttccattctcatagccatcccaaaagttatgtatgttatttatttattattattattattattttgagatggagtctcgctctgtcacctgggctggagtgcagtggcacgatctcagctcactgcaacctctgcctcctaggttcaagcgattctcctgcctcagcctcccaagtagctgggattataggcacctgccaccacacccagctacttttttgtatttttagtagagacggggtttcaccatgttggccaggctggtctcgaactcctgacctcaggtgatccaccgatcttggcctcccaaagtgctaggattacaggcgtgagccactgcacccggccagaaacgtatgttattatcctcatgttcctaatgagaagtataaggcatgcagaatgtaattatcaaactatgtagctagcaagtgccagaggccagtatgagcctaagcagcctgtctccagagtctatgatcttaaaaccattattccacactgcctctcttaagaagggataataagacattgcttattttctttctttcaatcttcagtttaacaaggtacatgggattccaggagaagatttctatgaacatgttataataattctgtagacgagtgtatttttgtttgtagctcaaacagttacagtccacatactagagagcacctttaaacacagcaaatgtttagtcagagatttcaacctaactgtgcttagaaatgaaatcctgtaaacaatttggtgatactggcaaatttaaagcatctacctccttccaatctaattttcctcttcagattgttaattaaagaaaatgaaaagtatactttaattttattgccaaaagcactagtttgctttattcatgcaaaacaataatactcaaacttgctatttgcccgcagatctacaaaaatgctgggactggatgatttcaaggatgtacttatcaatggtacaataaaaccatctttttcagaaactactaaactttgtatcatgggttttgtttctcagatattcgattctccttaaaaatgcaacaactgtgataattatgaatacctgtagaacagattccaaggagtaaagcaaaaccccaaaagaaaacaaacgaaactcttccttagctacttaaaaaaaagattctcggctggggacgggtggctcacgcctgtaatcccagcactttgggagacggaggcgggtggatcatgaggtcaggagttcgagaccagcctggccaatgtggtgaaaccccgtctctactaaaaaaatacaaaaattcgcagggcatagtggcatacacctgtaatcctcgctactcaggaggctgaggcaggagaatcgcttgaacctgggagtcggaggttgcagtgagctgagatcacgccaccgcactccagcctgggtgacagagcgagactccatctcaggaaataataataataatagtaattctgacaaggtgcagtggcttacacctgtaatcccagcactttgggaggctaaggtgggtggatcacttgaggtcaggagtttgagaccagcctggccaacatggtgaaacccctgactctactaaaaatgcaaaaaaaaattacccagcatgttggtgtgcccgtagtcccagctacttgagaggctaagacaggagaattgtttgaacctgggaggcggaggttacagtgaactgagattgcgccactgcactccagcctgggtgacagagtgaggccctgtctgaaaacaataacaataataacaattctgctagctgagatgctgcagaagctagattcactgtcccggaaacatgaaaaaaaattattggttacttttatttcttcactgaagatctttcctagaaattatgaaccaaaaaatgtctgttttatctctcataatctatctgcttcttagtccaaaggaaaataatatgttttctgattccatatagatagatacaaggcacaatctctaatctagcagaatttgaatgatcctcagtatgattcatttttaatttatattataccatttagggatcctctgaaccagagcatattactgattaaattttatacttgttgaaagtgctgtcaaataaaatgatcatcattgtgcagaacaaaaaagtattctgttatttggagaaaatcacaacaaccaaaaaaataagatgtactagatggtgaaacatagaataaaaacaacaaaaatacatttattacatttcttttgaaagttggaaacttcacaataaactcgatatacaaaaatcgttatgtaaactgtataagcctgggtttccttatttatgatacagagataacttcttgggccattacaataattaaatatgtatcttttatatatatgaaattatcgagcagagtgcctagtccactattgacatttaaaacatctcattttccttccattcaaagaacttaaaatctagccaagataaaccaaagtaggccaggcgcagtggctcatgcctgtaatcccagcactttgggaggccgaggcaggcagatcacctgaggttaggaggtcgagaccaacttggccaacatggcaaaaccccatctctactaaaaatacaaaaattagccaggcatggtggctcatgcctgtaatcccagctacttgggaggctgaggcaggagaattgcttgaacccaggagacagaagttgtagtgagccaagattgcgccactgcactccagcctgggcaacagagtgagactccaattcaaaaaagaaaagaaaagaaaaaccaaagcagcagataataattgtttaacaatttgaaaaggcataatccatagaatttatagtggaggagattggtttcaaatagagtagtcaggaggattttagtgaaacctttgaggtgaactttgaaaagctgcaaatggcagtgtttgaagagagaggaagaggtggaacacagagagggtcttcagccctgcgtgtgcagatgacaagacagaggctggtgtttccagacaggtaagccatatgccagggcaacattgcacagaatggatgtgaaggcaaggcatactatcagtgggaagccaaatctacaataactgctactactaaataaagatcttttttttttttcaaggaaaatctacctgatttttataatgactggatgttcattgctaaacatctgcctgatctcatagagtctggccagcttcgagaaagagttgagaaggtttgacatatgtattacatttgtcttcttgtatagcttcttaacattgttaacttggttttgaagcataaaacattactgagattgatttgagtcaattgctccatttgttttcagttaaacatgctcagcattgatcatctcacagaccacaagtcacagcgccttgcacgtctagttctgggatgcatcaccatggcatatgtgtggggcaaaggtcatggagatgtccgtaaggtttggagattttctcagatttcttatgctatgtgacagattttcatctaatttacatttaactttccaaaaattttctaaaagcattataactgcatcatgcaaagtttagataacacgacaaaatgataaagaaaatatgccctggcttgacatgtccactgttatcattattatatttttagtcttttacttcatttttcatcctgtattttatctggcaaccctaattacataaaactaatacagactgcaatatctaacctttaaaacacacatgggcctcccagcactttgagaggccaaggccggaggatcacctgaggtcaggagttcaagaccaacttggctaacatagtgaaaccccatctctactaaaaatacaaaaaatagccaggcatggtggcaggtgcctataatcccagctactcgggaggctgaggtgggagaatcacttgaacctgggaggcagaggttgcagtgagccgagatcctgccactgcgctccagcctgggggacaggagcaagactccatctcaaaaaaaaaaaaaaaaaaaaaaacaacaacaacaacaacaaaaaacctaactactgtattttaatcaggtcttgccaagaaatattgctgttccttactgccaactctccaagaaactggaactgcctcctattttggtttatgcagactgtgtcttggcaaactggaagaaaaaggatcctaataagtatgtaaacagtgataacaacaggaatttttggagtgtgtgccgattaaataaaacaggggttgttcattggcttaattttgggcagcgcagctttcctctcagctgggtatggttcctctcagttcctcggctgggtacggtttcttggactgctgtgtctaccactacaaatgtacacatatgtgacaggtgtatagttaacacagtaaaatgcacaaatcttaagtgttcagcttgaatttaactattatatacatacatacacccaccattctcagtaagatacagaattttttatcacctcagaaaatttctttgtgcctctttcaattccctttcctgccacagacaaatatatttttatttgccttatcaaaaattagatgatttttgttattgggtttcatatcaatgaaaccacagagtatagactcttgtgtctggcttcttttgatgagcatgtctttgagattctattaatttaattttttagcagccaattgtggttaagagtcaacacatctttaattacaggcagcaatgactggtttctcagagcagtctgctcaggatataggtgatttttacccatttaggcataagatctgctacaataaaggaaagggagaaccaaagcccacgtctctgggtgtgtgcctgtagaaaaatattctgcaaatgggaatatcataaaatgaaaggattcaatctagaaagtttcttcttattaaaaattagtttttttaaaaaaaaattcaccgggaatggtggcgtatgtctgtggtcccagctacacagggagttaaggcaggaggatcacttcagcccaagaagttgaggctgcagtgagccatgttcgtgccactgcacaccagcctgggtgacagaatgagaccctgtctcaaaaaaataaaaataaaacaactagttttgactgtccatgtgtgttccttgcatatttaattatttcattcatttgtaagttattaagttaaatgtaatgcctactgaagaaacattttaataagctttttctttttacctatgtcttacctctgatagtagcattcaatcaaatagcaacaactcatcattatttgatgttaaattggttttctttctctcttccaattggtccattgcttcatggctgctttcataaggcccctgacttatgagtaagtatctgattcttgtttgattctaagaattatttgttacttatagttgaatgtaggtttatcaatagactccaaatgcatttttaaatgattaattgaattcagccaaaaaataatttaagtgactatttagagaacaaataatctcagtctttaattgtatctatgattgtgttacaactatgtctatctgatattatagctatagatatatacaagaatactactcaaatacatctgtaggaaattaatatgcaaacatacaaaatgcacatacatctgtgtatctatgatttaataactcccatgtccataactagttaccggtgtcaataagtaaccatataccaacttgttctttttgacccaatccttactacttttgacctataatatatactaaacataggctaagagatggaaaacctgggctgggtgcatggctcacgcctgtaatccctgcactttgggatgccgaggcaggtggatcacctgaggtcaggagttcaagaccagcctgggcaacatggtgaaacctcgtctctactaaaaatacaaaaaattagccgggcctggtggcgggcgcctgtaatctcagctactcaggaggctgaggcaggagaatcaattgaacccaggaggtggaggttgcagtgagcggaaatcacgccactgcattccagcctgggtgacagaacaagactccatctcaaaaaaaaaaaaaagatggaaaaactaaggtaaatatcatcagtataaacccaccttggtgaagctagactaatgaagaggaaaggcagtatatgaaaattatgtaaattgcgatatgataaagataaggcataagaagttaaagtattgggatccctaaccaaataaaaggagtgatgggggaacccttgaagcaagttatttgaggaattagctagaggaaaaaggtaagagtattcatagcggaagaaacagcaaaagtgagaccttgaagtgacaaacatcttggtgcgttatcaaagctgaaggatggctaatgtcactgataataagtgataaaaataacagtgtgagaaaaagattaatttttttttttaaagatcgctgggaaaagtgggtgaatcacctgaggtcaggcattcgagaccagcctggccaacatagtgaaaaccctcctcttctgaaaatgcaaaaattagcggggcatggtggcacatgcctgtaatctcagctactcgggagactgaagcaggagaatagcttgaacccaggaggcagatgtggcagtgagacgagattgtgccattgcactccagcctgggcgacagagtaagaccccatctcaaaaaattaaaataaaaataaataaagattatgtaggattttattagctatgataaggagttaaaacagtatcttaagggagaaactggaaggtttttaaaaacgaggatgacatcagcagtcagtctcactttacagatgagaacaccaaggcagacggtgtcatatcttgctcaaggtcacacagcaagtaagttgcagagatggtctggcttcagataccatgaatttaaccaccacaaaactcatagatatacagatagtaagactatgtttgcaccaacgcccaaacttcaattaaaaagaaaaacagggtctaatcagttatttgaatttcgcagtcaattcctttgtaaagcatataaaccactgagaaattgaattaggctcacaaattaaaatgtgaatatgaatataattatttaaacaaaagactacctcttaaaactctacctcgcagatatcctgtgagaagttgacgggataatagaaacagaactagtttgggaatttctaattctgagtgttttttgttgttgttgttttgttttgtttatttgttttctgagacgagtctcgctcttgtcgcccaggctggagtgcaatggagtgatcttggctcactgcaacctccgcctcctgtgttcaagtgattctcctgcctcagcctcccgagtagctgggattacaggcgcccatcaccatgcccacctaatttttgtattcttagtagagacggggtttcaccacattggccaggctggtctcaaactcctgacctcaggtgatccacccgccttggcctcctaaagtgccggaattacagatacagatgtgaactaccatgcccggccctagttctgagttctaatatgaaactttaggtctcagtttaacctacttactattaattatatgatcttggacaatgggcctaaaaaaggagtcttaatattcccaactacataatggagatagtaaggcctgccacacctctctcataaaattatgttgaaactaaaatagcataaataaaaatgtcaaaaaatatcccataatttttgctaaacttcttgccttccttatccaatttcctcaggaacatggacgttttgttctcatttcgtgatggagactgcagtaaaggattcttcctggtctctctattggtggaaatagcagctgcttctgcaatcaaagtacgtctatcctcacttcaaaatttatatgtcaatttacgtaagcagagcaatcacttcggagcctaaactatactaagcatgagttaactttatccttaacaagtacaacatgggatcatttaattgggggtaaaggatcaattatttatttttgtgtattacctaaaatataaaatctcagagccatatacttaaaatccaacttgaaacctctgtaggagataaaaattttcaataaaatctggctttggaactatgatacagtgtcataaattcaatagttttgattatcaaaaatagaaatgaaacatatacaactatataaatatctttaaattaaatgctatgtgaataaaaacaaatccaagcttctataaatgtaaggaaattagtcaaatagagtgtccagcccaggaaagaaatgtaaaaatcccaaatttaatttatggattaagacgggggaatttggcagggcacagtggctcacacctgtaatcccagcactttgggaggctgaagtgggcggatcacttgaagtcaggagttcgagaccagcctggccaacatggcgaaaccccgtctctactaaaaatataaaaattagccgggcatggtggtgggcacctgtagtcccagctactcaggaggctgaggcaggagaatggcgtgaacccgggaggcagagcttgcagtgagctgagatcgcgccactgcaccccagcctggacaactgagcgagactccgtctcaaaaaaaaaaaaaaaaaagaaagaaagaaaaccttaaatgtttgtgttttgtttgtttgttttaggtaattcctactgtattcaaggcaatgcaaatgcaagaacgggacactttgctaaaggcgctgttggaaatagcttcttgcttggagaaagcccttcaagtgtttcaccaaatccacggcaagtgttgtgtgcagtgcaatagtctaggctgacaagtcaaatgttccaggtgtagaatagttgaaaaaagggaagcaaaaagcaactatcacttagtatgttttcactttaggtattttatcttactaaaccattccactttctatgtggtaggtttcattatctccattttataagtaaagtcatctaaattcagaaagacagggtaaatgacttcagattccacaggcggtgaagccagagttccaagctgggtctatttaacactaaggaacttccttgcctcccgctaaaaaccttagagaaactttccacatgggagggtggttttaagtcccgaaaaaaaaaaaatagcttctgcttgataagaactccttcctaattctgtttttttacaaattaagaaacaatacagaaaagtcattgaggtcaaaagttgttgcaaaattaacagctaaaaaactacccacaaaaaaacacacaaaaaagtgcataagcagtaatttgcaataggaaatctgccctactgaacagactcaacaaatacttgattgtttctctctgggttttgagttattgctgtttagtccttggcaagaagctagattttcaaatcaagtagggtaggagactgagtgcggtggctcatatgtgtagtttccagctacttgggaggctgaggtgggaagattgcttgagcccaggagttggggctgcagtgagctatgatcaatacattccagcctgagtgatgaagtgagaccctgtctccaaacaatttttaaaaattttaaaaatagagagggaaatctagtttctagggttttgttttggtttgttttgatttgtttttttttgtctttggtttgtttctttatgtaaacagtttacttgttacgtcagtaagcacgtaaagtaaagtagtgctaaataaatagatacagtttaatgggcttcctggaagagggtaggaaagtgaatgcttatctgcaggggctttgtttagcatagactgacctaatgccttttcctgcagcctgtgccaaaatccattatcagttgtacacaacaccttgatttccctgtatacctctgatgctgcttaattaaacatattccatctttttacagatcatgtgaacccaaaagcatttttcagtgttcttcgcatatatttgtctgggtatgtagtcttatgtttgaatttgtttgctctcacttaacaaagaacaccaccaaattctcttggttggtccctaatatccattgggtttggctaacaatttacatccaaaaattcacatggtagaaaaatactagactgttctgttatcacttggccaggaatgtactggagtgggggacaggaaagctagttattttaaaaagagtggtctgtgctagtacaaaggtaagattccattcctagaatagttatgccaaatctgctcaggattatattatttactattctcatgcttgaaaatgagcaggggcaagggggtatgaaaaaaggatcatgaaatccatctcttgtcaccttctgttcagcactagtgcaagatttggtacctgaaaattagcaattaacctaaagaatgatttttctttttttctttctttcctctgatagctggaaaggcaacccccagctatcagacggtctggtgtatgaagggttctgggaagacccaaaggagtttgcagggggcagtgcaggccaaagcagcgtctttcagtgctttgacgtcctgctgggcatccagcagactgctggtggaggtgagtggaaaataacaagaaataattatctcttatgtgaatacaatagtatttggatatctacaaagcaccttcccatcagcatcttatctgagcttatctgatagttttagcagaatcaggcaagtagggatttggttgccatgatcccattttaaaaatgaagatgcagaaacttaatgagagtcagtgacaggttccttgtgaaccagctagaaagtggcagagctggccaggtgcggtgactcaagcctgtaatcctagcacttcgggagacctaggcaggtggatcacctgaggtcaggagtttgagaccagcctgaccaacatggtgaaacccggtctctactaaaaatacaaaaactagctgagtgtggtggtgggtgcctctaatcccagctactcgggagactgaggcaggagaatcgcctgaaccccacaggcagaggttgcagtgagccaagatcgtgctactgtactccagcctgggcaaaagagcaaaactccatctcaaaataaaaataaaaaataaaaagccaggtgcagtcgctcacgcctgtaatcctagcactttgggaggccgaggcgggcggatcacaagatcaggagatcgagaccatcctggctaacacggtgaaaccctgtctctactaaaaatacaaaaaagtagctgggcatggtggcgggtgcctgtagtcccagctactcgggagactgaggcaggagaatggcgtgaacccaggaggcggagcttgcagtgaaccgatatggcgccactgcactccagcctaggcaagagtgcgagactccatctcaaaaaaaattaataaataaaaacaaaaagaaaaataaaataaaataaattggcagagctttcctcacacccaagttccatcttgaaatctgaacatgtctataaagactggttgactccggtgaagccaatatcacatgctctgaaaatgtatgatcagactcagaaagagacactcacctgcaaatgagacagggctgttagtggggagataaagacctcagtgacaagcagagtctgggccctgctcttgttcagctgtcccgtggccccagccacccagagcaatgcctgcaccaaagtttaaaggtgagccacattcattgtatgccttctaggggcttagctggaggggaggaataagctccaagaagaacttctttttaattttctctgttttgttaaacttctgtttaacagtcaaaggggaaagcatcgggctgggtaaaaacatgagtttttcttaatttgagcactcatttttaaaatttttttatcatatttaacttttttattttagattcaggggatacatgtgcaggcttattacacaggtataatgggtgatgctgatgtttgggcttctaatgatcccctcacccaagtatagaacatagtgcccaataggtagtttttcaacctttgctttccttcctccctccctcccctatttgaaatcctcactgtctattgttcctatctttgtgtccatgtgtactcaatatttaactcccacttatcggtgagaacatgtggtatttggttttctgtttctgcattatttcacttaggctaacttaagctaatggcctccagctgcatccatgttgctgtgaagcgcttgatttcattctttttcatggctgtgtagtattccatggtgtacatgtaccacattttctttgtcccatctaccattgatgggcacctgggttcattccatgtctttgctgttgttgaacactcatttaaacacaatctcttaaactctcttaagaatcagtcataatctgtcaaatgcagattatatatgccccttgtctataccatcagcttcttacagtagaaaagagagaaagaaagtgcaaacaaaggccaggcgcggtggctcatgcctgtaatcccagcactttgggaggctgaggcaggtggatcatctgaggtcaggagttcgagaccagcctgaccaacatggagaaaccctgtctctactaaaaatacaaaattagccgggcatggtggcgcatgcctgaaatcccagctactccggaggctgaggcaggagaattgcttgagcccgggaggcacaggttgcggcgagccgagatcgtgccactgcactccagcctggccgacagagcgagactctgtctcaaaaaaaaaaaaaaaaagcgcaaacaaaaatacttattgtgagaaaatgagtttagctcattcagttttcaaaattaataatattttacaataattacgattgctagtagcaagactaatagccaaacattagccttcaaatagaatgaccttgacctcagtgaatgctatattggtgatctcctgcccactctgacctcactctgcctttctctcctggattggggaatgctgtgacctccgtatttcctctttctctttttcctataggacatgctgctcagttcctccaggacatgagaagatatatgccaccagctcacaggaacttcctgtgctcattagagtcaaatccctcagtccgtgagtttgtcctttcaaaaggtgatgctggcctgcgggaagcttatgacgcctgtgtgaaagctctggtctccctgaggagctaccatctgcaaatcgtgactaagtacatcctgattcctgcaagccagcagccaaaggagaataagacctctgaagacccttcaaaactggaagccaaaggaactggaggcactgatttaatgaatttcctgaagactgtaagaagtacaactgagaaatcccttttgaaggaaggttaatgtaacccaacaagagcacattttatcatagcagagacatctgtatgcattcctgtcattacccattgtaacagagccacaaactaatactatgcaatgttttaccaataatgcaatacaaaagacctcaaaatacctgtgcatttcttgtaggaaaacaacaaaaggtaattatgtgtaattatactagaagttttgtaatctgtatcttatcattggaataaaatgacattcaataaataaaaatgcataagatatattctgtcggctgggcgcggtggctcacgcctgtaatcccagcactttgggaggccgaggcgggcggatcacaaggtcaggagatcgagaccatcttggctaacacggtgaaaccccgtctctactaaaaatacaaaaaattagccgggcgcggtggcgggcacctgtagtcccagctactcgggaggctgaggcaggagaatggcgtgaacctgggaggcggagcttgcagtgagccaagattgtgccactgcaatccggcctgggctaaagagcgggactccgtctcaaaaaaaaaaaaaaaaagatatattctgtcataataaataaaaatgcataagatataataaatgttgcttcatttataaccataataaaatatttatttagatgagacctactataaactgctttcagcagggctaatagactcctatactttccctatgttaatgtgagactttttcataattacctgtcaacttgtctatattcttattacatgataagcttcttgatgccagggacactctgtattgtttaccagatttatacatcccagcttttttttgtttgtttgtttttgagacagggtctcactctgtcacccaggctggagtgcagtggcatgatctcagctcattgcagccctgacctcccagacctaagtgatcctcctacctcagccccctaagtagctaagactacagctgtgcaccaacatgctcagccaatttttgtattttttgtagagacagggtcttgctatgttgcccaggctggtcttgaactcctgagctcaagttatgtctgtatcttatcattggaatatatgataatcccagcactttggaaggccaaagtgctgggattatagcatccctcccaaagtgctgggatgcagccaggtgtggtggctcatgcctgtaatcccatgtgattatgaaagatatgatttggcctcccaacgtgctgggattacaggtgtgagccaccgcacccagctgcatcccagcttttagaagacacttagcaaatttatgttcaataaatacataaaagaataaatgaatgtatgataaattaacctgggctaaagagaagattcacctttgaaataacacttctcctgagagatccagattattgggcactcacattctggcatgtatatatttaataatagaaccctaagaagctagagcctgagaggaatttaagaattatcaaagcaaagctcttcattttaaagatggcaacattgaggcacaaaagggtgaaataacttactgatggccacacaattagttggttaacaatgggagaaaaaaattttgatgactcacgtctttgttctttttgctctacttggagtagactaggttgaaggaaaaaataattttggaagggaaaggggaggaaatgaaatgactaggcaggaactcatgagattgtaaatggtcagccagaaatcaagttatgttatagaagatgagaggagggggctgggcgtggtggctcacgcctataatcccagcactttgggaggccgaggtgggtggatcacgaggtcaggagatcgagaccatctggctaacacggtgaaaccccgtctctactaaaaatacaaaaaaaattagccggacgtggtgttgggcgcctgtagtcccagctactcgggaggctgaggcaggaaaatggcgtcaacccaggaggcagagcttgcagtgtgagcggagatcacgccacggaactccagcctgggcgacagagcgagacttcgtctcaaaaaaaaaaaaagatgagaggaggaaaaagcaccatggtcttatgggtgtggaattagcaagcactttgaagttatgaaaacctgagttctgaggagctctgagctcttttaaatacacaggaatttaaacgagtatacccaaataggtttgaggaaggaaatgtagccatatatttctaaaaaccaaacttctaaaaactattttaatattgtttcttaaatacaccgtaatgcagtgaaatcttcctgctcacagcagactttcactagattccatagaaaatgcaccaaatgtcaacgataacggtatttatcaggccggacacattttcttctttatgcttctgtcaatgtttctgcaatgaggacatataattctataatgaaaaaagtaaatatgcatcatgcccatgtacctaccaaatacatatatgtgtgtgcacatgcatgtaagttttgtttttctttctttctttttttttttttccctgagacagagtctcactctgtcaccaaggctggagtgcagcggtgtgatctgggctcactgcaacctccgcctcctgggttcaagcaattctcctgcctcagcctcctgagtagctgggaattacaggcgcccaccaccaagcccagctaatttttgtatttttagtagagacaggttttcaccatgttggctaggctggtctgaaactcctgacctcagaagatccacctgtcttgacctcccaaagtgctgggattacaggtgtgagccaccgtgcgtggcctgtgtgtaagttttaagggataaccagaatgaccatcacattcttggagttaaatgtggtacagaaatctctaacctgagagtcaagagaccaggtcatgggttccatttggacatctttcagctttgtgaccattttatgtctgcaaaataagcataacaacactagccctgccttattcacaaggttactgtgaggcctgagtggaatatggtgttgaagtattaggaagctataaagtactactagcataggtaagtaacttgctaaggatctttttttttttttctttgagaaggagtcttgctctgtcctccaggctggagtgcaatggtgcgatctgggctcactgcaacttctgcctcccaggttccaacaattctcctgccttagcctcttgagtagctgagactataggcacctgccaccatggccagctaatttgttgtattgttagtagagacggggtttcaccatgttggccaggctggtctcgttctcctgacctcaggtgatccacccgcctcagcctcccaaagtgctgtgattataggagtgggccactgtgcctggcctgctaaggatcttttattggcctcctaaggatcttttattggctccaggtcaagatgctatctatcttgtgttctcccacctgcagcactgatggcccacaaccctggaaaggctacacttcaggcacatcaggcatttctctcttccagagttggtttcacctaattagtattgacgtgcagagagtctctggttgctaaagaaagaccctgtagtcatgccttctcctttagaacatcacctttattctgataataagggagagagggaaaggaagtaaggagcattgtcataaaaattgcacccactgctgccttgtaggtgagagagggactgacactgggctccacgtgctcctacagagggtgtgaacactagctccagagtctcttctgtgtttccacataatagaaaccaaaggccaggcatggtggctcacacctgtaatcgcagcactatgggaggctgaagcgggtgtatcatgaggtcaggagtttgagaccagcctgaccaacatggtgaaaacctgtctctactaaaatacaaaatttagccacgcatggtggcgtgtgcctgtaatccccacgcatggtggcgtgtgcctgtaatcccagctactcaggaggctaagggaggagaatcgcttgaacctgggaggcagaggttgcagtgagccaagatcgcgccactgcactccagcctgggtgacagagtgagactctatctcaaaaaaaaaaaaaaaaaaaaaaaatagaaaccaagattcctgaattactctaattaaatcatctctggagtgggaaaggcacaacaaaatgcttggtatgtttcatgagaagccctgctgcttctgcccaccactcgcccgcccccatcccaggcattttctgcacatcgcagtgagtgctcctccaggggtagggtgggatcaccagatggtgaaggtggtatcctatcacaggagatggttttaacgagatgttatgtattttaagtaacatggttcctatttgaatgaaattaaagataattctatcccagtctgtgtcatgggaaaaacagaaattcatagtggtggtggggcacgctggctcatgcctataatccctgcactttgggaggccgagggggggcagataacttgaggtcaggagttcgagaccagcctggtcaacacggtgaaaccctgtctctgctaaaaatacaaaaagtagcagggagtggtggtgggtgcctgtaatcccagctactcaggaggctgaagcaggagaatcgattgaacccaggaggcggaggttgtagtgagtcaagatcatcctactgcactccagtctggcaaacagagcaagactccttctcaaaaaaaaaaaaaaaaaaaaaaagaatgaaagaaagaaattcatagtggtgtatttcttcacatggttgttttccataagtaaggataatttagcttaaaatatgtatcgttttcatatcaaggctcaaaaaagtattctgtagctcttgcctcatataattcagttttgcatattaaatgttgaagttatttatgtatcatttaatcctattttttcactctactatattaaatataatctcacaaggaaataagatatatttttctcggttcacgccactctgaacttctcatgccctttaaacaagagctagtgcagtcatgcagttgtaatggttggaaattaaagtttgctcatttccacataattgttttatgtcaataaacaataaacaattgaaaagttagaagttcacacaagccaaaaatttttcatataaacatacacttaatggtttataagattcttgccaaatatgagacaaaatggcccacacaggcagaaattccatctctagatcctctgggaaacagcaaacttatatttagaactcacaccatcaattactgctcctaatggtctttatataagtcatttaatcttcaaagcaattctatatattattactctcctcattttacagatgcagaggccaagaaatttgttcaagaatatagcaaggaagagacaatgctagggtataaatttgcatagtcaggctctaaagatgagctcttaattactataatatataggaggcaacgtatccagcttctgtgggaatacctctagagaaggggatgtcaataacacatatacagctcaactcccttttgcacagacactcactctttcagttgcttgacatttaaatatcaataaaaatgttttaactttctctaatctcaattagcatacagagacaagacatcatattgtgtttctttgggggtgattacctctgtaatcgttagactaacaagaaaattgtgtgtgatagaggcacaaaatagaaaatgattctttctgtttgaaaagttgaggaatgttttttacaggaggtaagtttgatacttaactttaaagttgaattgattggtgtaccttcattgaaaattttctcctgaatgcccagcattaaataaataagcaaacatataagttgcttgttgacctagcctcatatataatgcaagaagtaaacataaacatataaatgttgtaaatgagcatcagaatcatctaatatatagaatcttctgggagagctactttttaaaactataaattaatgatgatagctaataattacttaattctttcatatgcctcttactgtccaaaaagtgtcatatacattaatcacttgatcaaaacaatgaatctagagacaggtactattactagtacttctttttcctatatgggaattgatacccaatatagttcagtagttttcaagagccacacagctatgacaaagtaaaagattgaacccaggcaatctgactgcagaatacttcaaaccgctacacaatacaatctcctctcttggaaaatgttcttttacaagggaactaggttccttttgaactttgctatcacagtattggataattgactgcgcaagtctctcctcaaattcccaactcatgcatgactttttattacgttgtagcaataaaagagcagtggaggtggggtggaagaagactcatttttgtcttcattactgctatgtggagcaagggcccaagcttttaaaaacaagagctcagagacatggccctggccttggaagatgccctagagacgctgaggtggttgtacttttgccataggagtggcagccagagaactgagcccaatgaatgcaaaggctggtgcctggaaatattgtgactttgccacagaaagaagatggagaattttaaagttggaaatctgcctggtaagggatcatttgctggtgtctgcaaagttgagtccatacacactggtttggaaatttcagtccagatgatagttaagaaagcagtaagaatacagagagtccacaatgagatgaaaatgcactgccagttgaaacatcctcctacactggagctttataaatattttaaagacaaggattggattagatttgacattagaaatgtaccataatacagaaggcaatggacacctaaagaacagaatgaaaaccttcttaggaaatgaagcttgacacttcacccaccaggccaccacaagaatgttgcattttcattattatggtaagtacactggtaacttcttttctaacctcgtatgcataatgtaaacatcaagactgacaatttggggctagcaactcaattggaaaatcactgttctctattgtaaaattcctaattatgtttccctagaaattgcaaagtgcacatgtacttgcatttaatgtttggtccatgggctgaatgctttgtgcattacttttctggttgttgttgttgttgttgttgttgttgttgttgttgttgttttgagacagagtctcactctgttgccaggctggagtgcagtggcatgatctcggctcactgcaacctctgcctcccaggttcaagcaattcttctgccacagccttccaagtaactgggattacaggcgctcaccaccacaccctgctaatttttgtacttttagtagagacggggtttcaccatgttggccaggctggcctcaaactcctgacctcaagtgatccacctgctttgacctcccaaaatgctgggattacaggcatgagccaccttgcccagcctgtgcattacttttgaggacacatttgacaatggcacagtcaagaacaccacataaagtagtattggcagattatgaaatagcaattgttttggaagacagcaaaacctgaagtattttcagacatgtacattatgaagtattataccttctttaactatgtgcaagttaaaatcagtcataactgaaaatcaaaagggcaataatgaacatacttcatccagaagaggtatccacaaaacttctgaaagaggtcttagtatatccagggatggagatattattacaatgtattatccaaatgatggaagttttctcttgctgatagaatgcatccacctactaacatcagtaagtacaggtttaacaatttaccagaaatgtactggaggaaatatgaatatgcttccagatttattctacctaaaggatctggctctattttacaaggtcatctattttacaaggtactgtagatgcattttgatgaaaaaaattaccctgctattgattttgaggtctggtattatgatagagcaaaaactatccaaaagagatttaattcaagtcattgcaaaatcttggaaaatgtgtgagaaatcttacacatggaaaggaggaagtaaagatggtagcttaaacatgtgttccactgtgaacaattctctgcaaacccacccccaaaagtcaaggaggctgacaggctgaagaaagaggctgtcaaatctagtttctcagaaaaagaaaaattaatagggacttaagaacagaagccatatatctgccctgagatgagctggtggatcctcacactgttacccccagacccagggcttatataccacagggaaagacaattgcagtaatttgcttaacggcaggatttacggcaagtacatgctcttaagagtagattaagtagtaaccttagaggcattcctagaactggagttaatcagaagtcaacacagtggattagcatccaagatggagttgctttagcctccacaaagagaaaatgaagataaatttggtccatgctaattagggggtgttccatttgtttgaaactgaaatctataatttccaaagaagaaaataaacgtggaagtcgtccttcctttttggtatgcatagacaatctggcagtgttaggcccctaaggccttatcacctcctccttctgtgggtcaaactttacagtgagaggaaagacatcttttaaaagaagaataatcatgactagtttaatcatgactagttcatcttccctgcaatagatacccatatttaacatacctattgtacaaagaatatgattgcacagctacaactttgggacaaactccttttctgccgctttcaatgatcgtcttccaaaatcagaacagcttttgaattttattttgtgaaaaatgtcgtttgagtgacacagtaaactctgtggagctctgtggatacagttgaatgatggctcccagtttatcatgcaggtgggattatattccaacagttatgtttcacagaaaggcaaaataaccaggtacggaaaaaatgaaaaatttgcagcttacatcaaacagaaattgcagtgtctttcatctctttaaagttttctaatcaaaattctagttttcatcaattaaaactttatttaggtagatacatttaataagtaactttttgttggcttaaagggaatgaactttatgtaatgtaactgtctatttcaggaagcttttctatgagaatttaaaactacaccaaaatatcttcttttttttttttttgagacaaggtgtcacattgtctctcaggctggagtgcagtggtgtgatcctagctcactgtagccttgaattcctgggctcaactgatcctgctacctcaaccccccacgtagctaggactacaggcctgcaccaccacatctggctaattttttatatttttgtagagaaatggtctggctacgttgcccaggctggtcccaaactcctggcctcaggtgatcctcctgcgtcaacctcccaaagtgttgggattacaggtgtgagcaaacctgccatctcaaaacatgtgtattttaatgagacaacaaagatcaagggaactttagtccttacaatgtaatgatcaaaaaagtgaaatagataatcaacataacattgcttgtagaccatgcaaacaatcttattgcatttgtatatttgtaatgaactgttttataataacaaaatgtaaaatgtgtattttatttgtccttttattgttttcctacttcttagacatgttaagaactatggaaaaagatatgggagtttgtgaaaatttaaataattcatatttatattacaagaaacagatattagaatatgtttgttttatatttcttttgtagcagaattttctagccaggcattgtggcttacacctgtaattccagcactttgggaggctgaggtgggacaatcacttaagcccaagagtttgaaatcagtgagggcaacatagtgagactctatctctacaaaaaattctctatctatatctatataaaggaattttgtgaggaaaactatatattttgtatataaatgaattttatcaggaaatatatctgtaaatgaattttataaaatatagcatcactttatccttgatttatttcatttaataattattttaaagtaatatactaataaactcattttaaaaactgctatgaccataaaactattagagataacataagagaaaatctaggtgaccttgggtttggagataactttttatatataacaccaaaggcgcaatcaatgaaaaaaaatgacaagctctatatcacatatcaatattaaaatgtgatctgtgaaaggcatcgtcaagagaacaaaaagacaagccacagactgggagaaaatatttgcaaaagacatatgtgataaaagacaattatcaaaatatacaaataattcttaaaactcaaaaataagaaaatgaacaactcagttaaataatgggcaaaagatctcaacagaaaccccatcaaagaagaaacacagtggcaagcatatgaaaatatgatctacatcatatgccattaggaaattgcaaattaaaacaatgagataccactacatttctacattggtgaaaattccaagtactgacagcactctcagtgctggtgaggatatggtgcagtagaaatccacactcatgccgggcacagtggctcatgcctgtaatcccagcactttgggaggctgaggcgggtggatcaccaggtcaggagtttgagatcagcctgaccaacatggtgaaaccccggctctactaaaaatacaaaaattagcccggtgtggtggcgggcgcctgctactcgggagtctgaggcaggagaatcgcttgaacccaggaggtggaggttgcagtgagccgagatggcgccactgcactctagcctgggcgacagagcaagactccatctcaaaaaaaaaaaaaaaaaaaagaggccaggagtggtggctcacacctgtaatcccagcactttgggagactgaggtaggcggatcacttgaggtcaggagttggagaccagccttgccaacatgacaaaaccctgtctctactaaaaccacaaaaattagccaggagtattggcacatgcctgtagtcccagttactcgggaggctgagacaggagaatttcttgaacccgggaggcggaggctgcagtgagccgatatcgcaccactgtactccagcctgaacgacagggcgagactctgtctcaaaaaaaaaaaaaaaaaaaaaaaaaaggaaagaaagaaagaaagaaaaaagaaaattccgtgattgcagtctttacgtatttatttgttattaagtacagtaaaataaagaaggatagatgtcatggaaaatgtcacgaaaataaaagagttaaaaaaaaaaaaaagtaggctgcaatgccagatgcctgaaaagttaatcaacgaaaggacttaaatgtccccattgaatttaggaacaaagaagtaattaatgaactgggcaaaaacactcaatgtaccagcgttatcgatttagaaactgaaactaagtatatctgatgttgcttttaggaaacaagtaaatgaggtcctaaaaagttaaactgtgaccatattttctttcctttttctaatttctccttgggccatttccaaaaagccctaataccccgactgatagaaatggataccttgctgtgcactggtactactgtgattcatggaaagctgatcatgcaacccaagacgccaaaattcccagccttactgttacgaaagaaagtttctaagcacaattgtctctagccaacttcctcttagtaagaaagaggccaggcagggcttcatgcagggtacagccctgagtttcttactgcgtggtaagtttctggggctgggagtaaagcagcgtgaccgaaagcagtacaaagttctaccggacacgcagatcccggtcctacaaatatgaggtccataatgagactgagatatcattcatccaacaaatatttattgaataccaaacattgggcttacggctaaaggaaaatacaaagttgtgttggatatgggttctgttttcaaggagcttataatctaataggaaagatgaggttactacattagtagcaatcagaccagatagaactggaagtgtgatgtaaatgaggtacagattgattgtagaattttgcagaaagaaaacaattctgaagaaatgttcatggaagtattagcagttgagatgtatcttaaaagataagtggggttcctgttggaaacattcaaaactctctcttctagctattttaaaatacgcaatatattattaactatggtcaccttactgtgctatagaacactagaacttattcctactatctaactataattttgtacccactaaccaacctctccctgtccctcctccccctattcatcccaccctctggtaaccactgttctactctctgcttcccaaaa

SEQ ID NO: 46 - DNA, 38982 bp, Homo sapiens
ttttgggaagcagagagtagaacagtggttaccagagggtgggatgaatagggggaggagggacagggagaggttggttagtgggtacaaaattatagttagatagtaggaataagttctagtgttctatagcacagtaaggtgaccatagttaataatatattgcgtattttaaaatagctagaagagagagttttgaatgtttccaacaggaaccccacttatcttttaagatacatctcaactgctaatacttccatgaacatttcttcagaattgttttctttctgcaaaattctacaatcaatctgtacctcatttacatcacacttccagttctatctggtctgattgctactaatgtagtaacctcatctttcctattagattataagctccttgaaaacagaacccatatccaacacaactttgtattttcctttagccgtaagcccaatgtttggtattcaataaatatttgttggatgaatgatatctcagtctcattatggacctcatatttgtaggaccgggatctgcgtgtccggtagaactttgtactgctttcggtcacgctgctttactcccagccccagaaacttaccacgcagtaagaaactcagggctgtaccctgcatgaagccctgcctggcctctttcttactaagaggaagttggctagagacaattgtgcttagaaactttctttcgtaacagtaaggctgggaattttggcgtcttgggttgcatgatcagctttccatgaatcacagtagtaccagtgcacagcaaggtatccatttctatcagtcggggtattagggctttttggaaatggcccaaggagaaattagaaaaaggaaagaaaatatggtcacagtttaactttttaggacctcatttacttgtttcctaaaagcaacatcagatatacttagtttcagtttctaaatcgataacgctggtacattgagtgtttttgcccagttcattaattacttctttgttcctaaattcaatggggacatttaagtcctttcgttgattaacttttcaggcatctggcattgcagcctacttttttttttttttaactcttttattttcgtgacattttccatgacatctatccttctttattttactgtacttaataacaaataaatacgtaaagactgcaatcacggaattttcttttttctttctttctttctttccttttttttttttttttttttttttttgagacagagtctcgccctgtcgttcaggctggagtacagtggtgcgatatcggctcactgcagcctccgcctcccgggttcaagaaattctcctgtctcagcctcccgagtaactgggactacaggcatgtgccaatactcctggctaatttttgtggttttagtagagacagggttttgtcatgttggcaaggctggtctccaactcctgacctcaagtgatccgcctacctcagtctcccaaagtgctgggattacaggtgtgagccaccactcctggcctcttttttttttttttttttttgagatggagtcttgctctgtcgcccaggctagagtgcagtggcgccatctcggctcactgcaacctccacctcctgggttcaagcgattctcctgcctcagactcccgagtagcaggcgcccgccaccacaccgggctaatttttgtatttttagtagagccggggtttcaccatgttggtcaggctgatctcaaactcctgacctggtgatccacccgcctcagcctcccaaagtgctgggattacaggcatgagccactgtgcccggcatgagtgtggatttctactgcaccatatcctcaccagcactgagagtgctgtcagtacttggaattttcaccaatgtagaaatgtagtggtatctcattgttttaatttgcaatttcctaatggcatatgatgtagatcatattttcatatgcttgccactgtgtttcttctttgatggggtttctgttgagatcttttgcccattatttaactgagttgttcattttcttatttttgagttttaagaattatttgtatattttgataattgtcttttatcacatatgtcttttgcaaatattttctcccagtctgtggcttgtctttttgttctcttgacgatgcctttcacagatcacattttaatattgatatgtgatatagagcttgtcattttttttcattgattgcgcctttggtgttatatataaaaagttatctccaaacccaaggtcacctagattttctcttatgttatctctaatagttttatggtcatagcagtttttaaaatgagtttattagtatattactttaaaataattattaaatgaaataaatcaaggataaagtgatgctatattttataaaattcatttacagatatatttcctgataaaattcatttatatacaaaatatatagttttcctcacaaaattcctttatatagatatagatagagaattttttgtagagatagagtctcactatgttgccctcactgatttcaaactcttgggcttaagtgattgtcccacctcagcctcccaaagtgctggaattacaggtgtaagccacaatgcctggctagaaaattctgctacaaaagaaatataaaacaaacatattctaatatctgtttcttgtaatataaatatgaattatttaaattttcacaaactcccatatctttttccatagttcttaacatgtctaagaagtaggaaaacaataaaaggacaaataaaatacacattttacattttgttattataaaacagttcattacaaatatacaaatgcaataagattgtttgcatggtctacaagcaatgttatgttgattatctatttcacttttttgatcattacattgtaaggactaaagttcccttgatctttgttgtctcattaaaatacacatgttttgagatggcaggtttgctcacacctgtaatcccaacactttgggaggttgacgcaggaggatcacctgaggccaggagtttgggaccagcctgggcaacgtagccagaccatttctctacaaaaatataaaaaattagccagatgtggtggtgcaggcctgtagtcctagctacgtggggggttgaggtagcaggatcagttgagcccaggaattcaaggctacagtgagctaggatcacaccactgcactccagcctgagagacaatgtgacaccttgtctcaaaaaaaaaaaaaagaagatattttggtgtagttttaaattctcatagaaaagcttcctgaaatagacagttacattacataaagttcattccctttaagccaacaaaaagttacttattaaatgtatctacctaaataaagttttaattgatgaaaactagaattttgattagaaaactttaaagagatgaaagacactgcaatttctgtttgatgtaagctgcaaatttttcattttttccgtacctggttattttgcctttctgtgaaacataactgttggaatataatcccacctgcatgataaactgggagccatcattcaactgtatccacagagctccacagagtttactgtgtcactcaaacgacatttttcacaaaataaaattcaaaagctgttctgattttggaagacgatcattgaaagcggcagaaaaggagtttgtcccaaagttgtagctgtgcaatcatattctttgtacaataggtatgttaaatatgggtatctattgcagggaagatgaactagtcatgattaaactagtcatgattattcttcttttaaaagatgtctttcctctcactgtaaagtttgacccacagaaggaggaggtgataaggccttaggggcctaacactgccagattgtctatgcataccaaaaaggaaggacgacttccacgtttattttcttctttggaaattatagatttcagtttcaaacaaatggaacaccccctaattagcatggaccaaatttatcttcattttctctttgtggaggctaaagcaactccatcttggatgctaatccactgtgttgacttctgattaactccagttctaggaatgcctctaaggttactacttaatctactcttaagagcatgtacttgccgtaaatcctgccgttaagcaaattactgcaattgtctttccctgtggtatataagccctgggtctgggggtaacagtgtgaggatccaccagctcatctcagggcagatatatggcttctgttcttaagtccctattaatttttctttttctgagaaactagatttgacagcctctttcttcagcctgtcagcctccttgacttttgggggtgggtttgcagagaattgttcacagtggaacacatgtttaagctaccatctttacttcctcctttccatgtgtaagatttctcacacattttccaagattttgcaatgacttgaattaaatctcttttggatagtttttgctctatcataataccagacctcaaaatcaatagcagggtaatttttttcatcaaaatgcatctacagtaccttgtaaaatagatgaccttgtaaaatagagccagatcctttaggtagaataaatctggaagcatattcatatttcctccagtacatttctggtaaattgttaaacctgtacttactgatgttagtaggtggatgcattctatcagcaagagaaaacttccatcatttggataatacattgtaataatatctccatccctggatatactaagacctctttcagaagttttgtggatacctcttctggatgaagtatgttcattattgcccttttgattttcagttatgactgattttaacttgcacatagttaaagaaggtataatacttcataatgtacatgtctgaaaatacttcaggttttgctgtcttccaaaacaattgctatttcataatctgccaatactactttatgtggtgttcttgactgtgccattgtcaaatgtgtcctcaaaagtaatgcacaggctgggcaaggtggctcatgcctgtaatcccagcattttgggaggtcaaagcaggtggatcacttgaggtcaggagtttgaggccagcctggccaacatggtgaaaccccgtctctactaaaagtacaaaaattagcagggtgtggtggtgagcgcctgtaatcccagttacttggaaggctgtggcagaagaattgcttgaacctgggaggcagaggttgcagtgagccgagatcatgccactgcactccagcctggcaacagagtgagactctgtctcaaaacaacaacaacaacaacaacaacaacaacaacaacaacaaccagaaaagtaatgcacaaagcattcagcccatggaccaaacattaaatgcaagtacatgtgcactttgcaatttctagggaaacataattaggaattttacaatagagaacagtgattttccaattgagttgctagccccaaattgtcagtcttgatgtttacattatgcatacgaggttagaaaagaagttaccagtgtacttaccataataatgaaaatgcaacattcttgtggtggcctggtgggtgaagtgtcaagcttcatttcctaagaaggttttcattctgttctttaggtgtccattgccttctgtattatggtacatttctaatgtcaaatctaatccaatccttgtctttaaaatatttataaagctccagtgtaggaggatgtttcaactggcagtgcattttcatctcattgtggactctctgtattcttactgctttcttaactatcatctggactgaaatttccaaaccagtgtgtatggactcaactttgcagacaccagcaaatgatcccttaccaggcagatttccaactttaaaattctccatcttctttctgtggcaaagtcacaatatttccaggcaccagcctttgcattcattgggctcagttctctggctgccactcctatggcaaaagtacaaccacctcagcgtctctagggcatcttccaaggccagggccatgtctctgagctcttgtttttaaaagcttgggcccttgctccacatagcagtaatgaagacaaaaatgagtcttcttccaccccacctccactgctcttttattgctacaacgtaataaaaagtcatgcatgagttgggaatttgaggagagacttgcgcagtcaattatccaatactgtgatagcaaagttcaaaaggaacctagttcccttgtaaaagaacattttccaagagaggagattgtattgtgtagcggtttgaagtattctgcagtcagattgcctgggttcaatcttttactttgtcatagctgtgtggctcttgaaaactactgaactatattgggtatcaattcccatataggaaaaagaagtactagtaatagtacctgtctctagattcattgttttgatcaagtgattaatgtatatgacactttttggacagtaagaggcatatgaaagaattaagtaattattagctatcatcattaatttatagttttaaaaagtagctctcccagaagattctatatattagatgattctgatgctcatttacaacatttatatgtttatgtttacttcttgcattatatatgaggctaggtcaacaagcaacttatatgtttgcttatttatttaatgctgggcattcaggagaaaattttcaatgaaggtacaccaatcaattcaactttaaagttaagtatcaaacttacctcctgtaaaaaacattcctcaacttttcaaacagaaagaatcattttctattttgtgcctctatcacacacaattttcttgttagtctaacgattacagaggtaatcacccccaaagaaacacaatatgatgtcttgtctctgtatgctaattgagattagagaaagttaaaacatttttattgatatttaaatgtcaagcaactgaaagagtgagtgtctgtgcaaaagggagttgagctgtatatgtgttattgacatccccttctctagaggtattcccacagaagctggatacgttgcctcctatatattatagtaattaagagctcatctttagagcctgactatgcaaatttataccctagcattgtctcttccttgctatattcttgaacaaatttcttggcctctgcatctgtaaaatgaggagagtaataatatatagaattgctttgaagattaaatgacttatataaagaccattaggagcagtaattgatggtgtgagttctaaatataagtttgctgtttcccagaggatctagagatggaatttctgcctgtgtgggccattttgtctcatatttggcaagaatcttataaaccattaagtgtatgtttatatgaaaaatttttggcttgtgtgaacttctaacttttcaattgtttattgtttattgacataaaacaattatgtggaaatgagcaaactttaatttccaaccattacaactgcatgactgcactagctcttgtttaaagggcatgagaagttcagagtggcgtgaaccgagaaaaatatatcttatttccttgtgagattatatttaatatagtagagtgaaaaaataggattaaatgatacataaataacttcaacatttaatatgcaaaactgaattatatgaggcaagagctacagaatacttttttgagccttgatatgaaaacgatacatattttaagctaaattatccttacttatggaaaacaaccatgtgaagaaatacaccactatgaatttctttctttcattctttttttttttttttttttttttgagaaggagtcttgctctgtttgccagactggagtgcagtaggatgatcttgactcactacaacctccgcctcctgggttcaatcgattctcctgcttcagcctcctgagtagctgggattacaggcacccaccaccactccctgctactttttgtatttttagcagagacagggtttcaccgtgttgaccaggctggtctcgaactcctgacctcaagttatctgccccccctcggcctcccaaagtgcagggattataggcatgagccagcgtgccccaccaccactatgaatttctgtttttcccatgacacagactgggatagaattatctttaatttcattcaaataggaaccatgttacttaaaatacataacatctcgttaaaaccatctcctgtgataggataccaccttcaccatctggtgatcccaccctacccctggaggagcactcactgcgatgtgcagaaaatgcctgggatgggggcgggcgagtggtgggcagaagcagcagggcttctcatgaaacataccaagcattttgttgtgcctttcccactccagagatgatttaattagagtaattcaggaatcttggtttctattttttttttttttttttttttttgagatagagtctcactctgtcacccaggctggagtgcagtggcgcgatcttggctcactgcaacctctgcctcccaggttcaagcgattctcctcccttagcctcctgagtagctgggattacaggcacacgccaccatgcgtggggattacaggcacacgccaccatgcgtggctaaattttgtattttagtagagacaggttttcaccatgttggtcaggctggtctcaaactcctgacctcatgatacacccgcttcagcctcccatagtgctgcgattacaggtgtgagccaccatgcctggcctttggtttctattatgtggaaacacagaagagactctggagctagtgttcacaccctctgtaggagcacgtggagcccagtgtcagtccctctctcacctacaaggcagcagtgggtgcaatttttatgacaatgctccttacttcctttccctctctcccttattatcagaataaaggtgatgttctaaaggagaaggcatgactacagggtctttctttagcaaccagagactctctgcacgtcaatactaattaggtgaaaccaactctggaagagagaaatgcctgatgtgcctgaagtgtagcctttccagggttgtgggccatcagtgctgcaggtgggagaacacaagatagatagcatcttgacctggagccaataaaagatccttaggaggccaataaaagatccttagcaggccaggcacagtggcccactcctataatcacagcactttgggaggctgaggcgggtggatcacctgaggtcaggagaacgagaccagcctggccaacatggtgaaaccccgtctctactaacaatacaacaaattagctggccatggtggcaggtgcctatagtctcagctactcaagaggctaaggcaggagaattgttggaacctgggaggcagaagttgcagtgagcccagatcgcaccattgcactccagcctggaggacagagcaagactccttctcaaagaaaaaaaaaaaaagatccttagcaagttacttacctatgctagtagtactttatagcttcctaatacttcaacaccatattccactcaggcctcacagtaaccttgtgaataaggcagggctagtgttgttatgcttattttgcagacataaaatggtcacaaagctgaaagatgtccaaatggaacccatgacctggtctcttgactctcaggttagagatttctgtaccacatttaactccaagaatgtgatggtcattctggttatcccttaaaacttacacacaggccacgcacggtggctcacacctgtaatcccagcactttgggaggtcaagacaggtggatcttctgaggtcaggagtttcagaccagcctagccaacatggtgaaaacctgtctctactaaaaatacaaaaattagctgggcttggtggtgggcgcctgtaattcccagctactcaggaggctgaggcaggagaattgcttgaacccaggaggcggaggttgcagtgagcccagatcacaccgctgcactccagccttggtgacagagtgagactctgtctcagggaaaaaaaaaaaaagaaagaaagaaaaacaaaacttacatgcatgtgcacacacatatatgtatttggtaggtacatgggcatgatgcatatttacttttttcattatagaattatatgtcctcattgcagaaacattgacagaagcataaagaagaaaatgtgtccggcctgataaataccgttatcgttgacatttggtgcattttctatggaatctagtgaaagtctgctgtgagcaggaagatttcactgcattacggtgtatttaagaaacaatattaaaatagtttttagaagtttggtttttagaaatatatggctacatttccttcctcaaacctatttgggtatactcgtttaaattcctgtgtatttaaaagagctcagagctcctcagaactcaggttttcataacttcaaagtgcttgctaattccacacccataagaccatggtgctttttcctcctctcatctttttttttttttgagacgaagtctcgctctgtcgcccaggctggagttccgtggcgtgatctccgctcacactgcaagctctgcctcctgggttgacgccattttcctgcctcagcctcccgagtagctgggactacaggcgcccaacaccacgtccggctaattttttttgtatttttagtagagacggggtttcaccgtgttagccagatggtctcgatctcctgacctcgtgatccacccacctcggcctcccaaagtgctgggattataggcgtgagccaccacgcccagccccctcctctcatcttctataacataacttgatttctggctgaccatttacaatctcatgagttcctgcctagtcatttcatttcctcccctttcccttccaaaattattttttccttcaacctagtctactccaagtagagcaaaaagaacaaagacgtgagtcatcaaaatttttttctcccattgttaaccaactaattgtgtggccatcagtaagttatttcacccttttgtgcctcaatgttgccatctttaaaatgaagagctttgctttgataattcttaaattcctctcaggctctagcttcttagggttctattattaaatatatacatgccagaatgtgagtgcccaataatctggatctctcaggagaagtgttatttcaaaggtgaatcttctctttagcccaggttaatttatcatacattcatttattcttttatgtatttattgaacataaatttgctaagtgtcttctaaaagctgggatgcagctgggtgcggtggctcacacctgtaatcccagcacgttgggaggccaaatcatatctttcataatcacatgggattacaggcatgagccaccacacctggctgcatcccagcactttgggagggatgctataatcccagcactttggccttccaaagtgctgggattatcatatattccaatgataagatacagacataacttgagctcaggagttcaagaccagcctgggcaacatagcaagaccctgtctctacaaaaaatacaaaaattggctgagcatgttggtgcacagctgtagtcttagctacttagggggctgaggtaggaggatcacttaggtctgggaggtcagggctgcaatgagctgagatcatgccactgcactccagcctgggtgacagagtgagaccctgtctcaaaaacaaacaaacaaaaaaaagctgggatgtataaatctggtaaacaatacagagtgtccctggcatcaagaagcttatcatgtaataagaatatagacaagttgacaggtaattatgaaaaagtctcacattaacatagggaaagtataggagtctattagccctgctgaaagcagtttatagtaggtctcatctaaataaatattttattatggttataaatgaagcaacatttattatatcttatgcatttttatttattatgacagaatatatctttttttttttttttttgagacggagtcccgctctttagcccaggccggattgcagtggcacaatcttggctcactgcaagctccgcctcccaggttcacgccattctcctgcctcagcctcccgagtagctgggactacaggtgcccgccaccgcgcccggctaattttttgtatttttagtagagacggggtttcaccgtgttagccaagatggtctcgatctcctgaccttgtgatccgcccgcctcggcctcccaaagtgctgggattacaggcgtgagccaccgcgcccagccgacagaatatatcttatgcatttttatttattgaatgtcattttattccaatgataagatacagattacaaaacttctagtataattacacataattaccttttgttgttttcctacaagaaatgcacaggtattttgaggtcttttgtattgcattattggtaaaacattgcatagtattagtttgtggctctgttacaatgggtaatgacaggaatgcatacagatgtctctgctatgataaaatgtgctcttgttgggttacattaaccttccttcaaaagggatttctcagttgtacttcttacagtcttcaggaaattcattaaatcagtgcctccagttcctttggcttccagttttgaagggtcttcagaggtcttattctcctttggctgctggcttgcaggaatcaggatgtacttagtcacgatttgcagatggtagctcctcagggagaccagagctttcacacaggcgtcataagcttcccgcaggccagcatcaccttttgaaaggacaaactcacggactgagggatttgactctaatgagcacaggaagttcctgtgagctggtggcatatatcttctcatgtcctggaggaactgagcagcatgtcctataggaaaaagagaaagaggaaatacggaggtcacagcattccccaatccaggagagaaaggcagagtgaggtcagagtgggcaggagatcaccaatatagcattcactgaggtcaaggtcattctatttgaaggctaatgtttggctattagtcttgctactagcaatcgtaattattgtaaaatattattaattttgaaaactgaatgagctaaactcattttctcacaataagtatttttgtttgcgctttttttttttttttttgagacagagtctcgctctgtcggccaggctggagtgcagtggcacgatctcggctcgccgcaacctgtgcctcccgggctcaagcaattctcctgcctcagcctccggagtagctgggatttcaggcatgcgccaccatgcccggctaattttgtatttttagtagagacagggtttctccatgttggtcaggctggtctcgaactcctgacctcagatgatccacctgcctcagcctcccaaagtgctgggattacaggcatgagccaccgcgcctggcctttgtttgcactttctttctctcttttctactgtaagaagctgatggtatagacaaggggcatatataatctgcatttgacagattatgactgattcttaagagagtttaagagattgtgtttaaatgagtgttcaacaacagcaaagacatggaatgaacccaggtgcccatcaatggtagatgggacaaagaaaatgtggtacatgtacaccatggaatactacacagccatgaaaaagaatgaaatcaagcgcttcacagcaacatggatgcagctggaggccattagcttaagttagcctaagtgaaataatgcagaaacagaaaaccaaataccacatgttctcaccgataagtgggagttaaatattgagtacacatggacacaaagataggaacaatagacagtgaggatttcaaataggggagggagggaggaaggaaagcaaaggttgaaaaactacctattgggcactatgttctatacttgggtgaggggatcattagaagcccaaacatcagcatcacccattatacctgtgtaataagcctgcacatgtatcccctgaatctaaaataaaaaagttaaatatgataaaaaaattttaaaaatgagtgctcaaattaagaaaaactcatgtttttacccagcccgatgctttcccctttgactgttaaacagaagtttaacaaaacagagaaaattaaaaagaagttcttcttggagcttattcctcccctccagctaagcccctagaaggcatacaatgaatgtggctcacctttaaactttggtgcaggcattgctctgggtggctggggccacgggacagctgaacaagagcagggcccagactctgcttgtcactgaggtctttatctccccactaacagccctgtctcatttgcaggtgagtgtctctttctgagtctgatcatacattttcagagcatgtgatattggcttcaccggagtcaaccagtctttatagacatgttcagatttcaagatggaacttgggtgtgaggaaagctctgccaatttattttattttatttttctttttgtttttatttattaattttttttgagatggagtctcgcactcttgcctaggctggagtgcagtggcgccatatcggttcactgcaagctccgcctcctgggttcacgccattctcctgcctcagtctcccgagtagctgggactacaggcacccgccaccatgcccagctacttttttgtatttttagtagagacagggtttcaccgtgttagccaggatggtctcgatctcctgatcttgtgatccgcccgcctcggcctcccaaagtgctaggattacaggcgtgagcgactgcacctggctttttattttttatttttattttgagatggagttttgctcttttgcccaggctggagtacagtagcacgatcttggctcactgcaacctctgcctgtggggttcaggcgattctcctgcctcagtctcccgagtagctgggattagaggcacccaccaccacactcagctagtttttgtatttttagtagagaccgggtttcaccatgttggtcaggctggtctcaaactcctgacctcaggtgatccacctgcctaggtctcccgaagtgctaggattacaggcttgagtcaccgcacctggccagctctgccactttctagctggttcacaaggaacctgtcactgactctcattaagtttctgcatcttcatttttaaaatgggatcatggcaaccaaatccctacttgcctgattctgctaaaactatcagataagctcagataagatgctgatgggaaggtgctttgtagatatccaaatactattgtattcacataagagataattatttcttgttattttccactcacctccaccagcagtctgctggatgcccagcaggacgtcaaagcactgaaagacgctgctttggcctgcactgccccctgcaaactcctttgggtcttcccagaacccttcatacaccagaccgtctgatagctgggggttgcctttccagctatcagaggaaagaaagaaaaaaagaaaaatcattctttaggttaattgctaattttcaggtaccaaatcttgcactagtgctgaacagaaggtgacaagagatggatttcatgatccttttttcatacccccttgcccctgctcattttcaagcatgagaatagtaaataatataatcctgagcagatttggcataactattctaggaatggaatcttacctttgtactagcacagaccactctttttaaaataactagctttcctgtcccccactccagtacattcctggccaagtgataacagaacagtctagtatttttctaccatgtgaatttttggatgtaaattgttagccaaacccaatggatattagggaccaaccaagagaatttggtggtgttctttgttaagtgagagcaaacaaattcaaacataagactacatacccagacaaatatatgcgaagaacactgaaaaatgcttttgggttcacatgatctgtaaaaagatggaatatgtttaattaagcagcatcagaggtatacagggaaatcaaggtgttgtgtacaactgataatggattttggcacaggctgcaggaaaaggcattaggtcagtctatgctaaacaaagcccctgcagataagcattcactttcctaccctcttccaggaagcccattaaactgtatctatttatttagcactactttactttacgtgcttactgacgtaacaagtaaactgtttacataaagaaacaaaccaaagacaaaaaaaaacaaatcaaaacaaaccaaaacaaaaccctagaaactagatttccctctctatttttaaaatttttaaaaattgtttggagacagggtctcacttcatcactcaggctggaatgtattgatcatagctcactgcagccccaactcctgggctcaagcaatcttcccacctcagcctcccaagtagctggaaactacacatatgagccaccgcactcagtctcctaccctacttgatttgaaaatctagcttcttgccaaggactaaacagcaataactcaaaacccagagagaaacaatcaagtatttgttgagtctgttcagtagggcagatttcctattgcaaattactgcttatgcacttttttgtgtgtttttttgtgggtagttttttagctgttaattttgcaacaacttttgacctcaatgacttttctgtattgtttcttaatttgtaaaaaaacagaattaggaaggagttcttatcaagcagaagctattttttttttttcgggacttaaaaccaccctcccatgtggaaagtttctctaaggtttttagcgggaggcaaggaagttccttagtgttaaatagacccagcttggaactctggcttcaccgcctgtggaatctgaagtcatttaccctgtctttctgaatttagatgactttacttataaaatggagataatgaaacctaccacatagaaagtggaatggtttagtaagataaaatacctaaagtgaaaacatactaagtgatagttgctttttgcttcccttttttcaactattctacacctggaacatttgacttgtcagcctagactattgcactgcacacaacacttgccgtggatttggtgaaacacttgaagggctttctccaagcaagaagctatttccaacagcgcctttagcaaagtgtcccgttcttgcatttgcattgccttgaatacagtaggaattacctaaaacaaacaaacaaaacacaaacatttaaggttttctttctttcttttttttttttttttttgagacggagtctcgctcagttgtccaggctggggtgcagtggcgcgatctcagctcactgcaagctctgcctcccgggttcacgccattctcctgcctcagcctcctgagtagctgggactacaggtgcccaccaccatgcccggctaatttttatatttttagtagagacggggtttcgccatgttggccaggctggtctcgaactcctgacttcaagtgatccgcccacttcagcctcccaaagtgctgggattacaggtgtgagccactgtgccctgccaaattcccccgtcttaatccataaattaaatttgggatttttacatttctttcctgggctggacactctatttgactaatttccttacatttatagaagcttggatttgtttttattcacatagcatttaatttaaagatatttatatagttgtatatgtttcatttctatttttgataatcaaaactattgaatttatgacactgtatcatagttccaaagccagattttattgaaaatttttatctcctacagaggtttcaagttggattttaagtatatggctctgagattttatattttaggtaatacacaaaaataaataattgatcctttacccccaattaaatgatcccatgttgtacttgttaaggataaagttaactcatgcttagtatagtttaggctccgaagtgattgctctgcttacgtaaattgacatataaattttgaagtgaggatagacgtactttgattgcagaagcagctgctatttccaccaatagagagaccaggaagaatcctttactgcagtctccatcacgaaatgagaacaaaacgtccatgttcctgaggaaattggataaggaaggcaagaagtttagcaaaaattatgggatattttttgacatttttatttatgctattttagtttcaacataattttatgagagaggtgtggcaggccttactatctccattatgtagttgggaatattaagactccttttttaggcccattgtccaagatcatataattaatagtaagtaggttaaactgagacctaaagtttcatattagaactcagaactagggccgggcatggtagttcacatctgtatctgtaattccggcactttaggaggccaaggcgggtggatcacctgaggtcaggagtttgagaccagcctggccaatgtggtgaaaccccgtctctactaagaatacaaaaattaggtgggcatggtgatgggcgcctgtaatcccagctactcgggaggctgaggcaggagaatcacttgaacacaggaggcggaggttgcagtgagccaagatcactccattgcactccagcctgggcgacaagagcgagactcgtctcagaaaacaaataaacaaaacaaaacaacaacaacaaaaaacactcagaattagaaattcccaaactagttctgtttctattatcccgtcaacttctcacaggatatctgcgaggtagagttttaagaggtagtcttttgtttaaataattatattcatattcacattttaatttgtgagcctaattcaatttctcagtggtttatatgctttacaaaggaattgactgcgaaattcaaataactgattagaccctgtttttctttttaattgaagtttgggcgttggtgcaaacatagtcttactatctgtatatctatgagttttgtggtggttaaattcatggtatctgaagccagaccatctctgcaacttacttgctgtgtgaccttgagcaagatatgacaccgtctgccttggtgttctcatctgtaaagtgagactgactgctgatgtcatcctcgtttttaaaaaccttccagtttctcccttaagatactgttttaactccttatcatagctaataaaatcctacataatctttatttatttttattttaattttttgagatggggtcttactctgtcgcccaggctggagtgcaatggcacaatctcgtctcactgccacatctgcctcctgggttcaagctattctcctgcttcagtctcccgagtagctgagattacaggcatgtgccaccatgccccgctaatttttgcattttcagaagaggagggttttcactatgttggccaggctggtctcgaatgcctgacctcaggtgattcacccacttttcccagcgatctttaaaaaaaaaaattaatctttttctcacactgttatttttatcacttattatcagtgacattagccatccttcagctttgataacgcaccaagatgtttgtcacttcaaggtctcacttttgctgtttcttccgctatgaatactcttacctttttcctctagctaattcctcaaataacttgcttcaagggttcccccatcactccttttatttggttagggatcccaatactttaacttcttatgccttatctttatcatatcgcaatttacataattttcatatactgcctttcctcttcattagtctagcttcaccaaggtgggtttatactgatgatatttaccttagtttttccatcttttttttttttttgagatggagtcttgttctgtcacccaggctggaatgcagtggcgtgatttccgctcactgcaacctccacctcctgggttcaattgattctcctgcctcagcctcctgagtagctgagattacaggcgcccgccaccaggcccggctaattttttgtatttttagtagagacgaggtttcaccatgttgcccaggctggtcttgaactcctgacctcaggtgatccacctgcctcggcatcccaaagtgcagggattacaggcgtgagccatgcacccagcccaggttttccatctcttagcctatgtttagtatatattataggtcaaaagtagtaaggattgggtcaaaaagaacaagttggtatatggttacttattgacaccggtaactagttatggacatgggagttattaaatcatagatacacagatgtatgtgcattttgtatgtttgcatattaatttcctacagatgtatttgagtagtattcttgtatatatctatagctataatatcagatagacatagttgtaacacaatcatagatacaattaaagactgagattatttgttctctaaatagtcacttaaattattttttggctgaattcaattaatcatttaaaaatgcatttggagtctattgataaacctacattcaactataagtaacaaataattcttagaatcaaacaagaatcagatacttactcataagtcaggggccttatgaaagcagccatgaagcaatggaccaattggaagagagaaagaaaaccaatttaacatcaaataatgatgagttgttgctatttgattgaatgctactatcagaggtaagacataggtaaaaagaaaaagcttattaaaatgtttcttcagtaggcattacatttaacttaataacttacaaatgaatgaaataattaaatatgcaaggaacacacatggacagtcaaaactagttgttttatttttatttttttgagacagggtctcattctgtcacccaggctggtgtgcagtggcacgaacatggctcactgcagcctcaacttcttgggctgaagtgatcctcctgccttaactccctgtgtagctgggaccacagacatacgccaccattcccggtgaatttttttttaaaaaaactaatttttaataagaagaaactttctagattgaatcctttcattttatgatattcccatttgcagaatatttttctacaggcacacacccagagacgtgggctttggttctccctttcctttattgtagcagatcttatgcctaaatgggtaaaaatcacctatatcctgagcagactgctctgagaaaccagtcattgctgcctgtaattaaagatgtgttgactcttaaccacaattggctgctaaaaaattaaattaatagaatctcaaagacatgctcatcaaaagaagccagacacaagagtctatactctgtggtttcattgatatgaaacccaataacaaaaatcatctaatttttgataaggcaaataaaaatatatttgtctgtggcaggaaagggaattgaaagaggcacaaagaaattttctgaggtgataaaaaattctgtatcttactgagaatggtgggtgtatgtatgtatataatagttaaattcaagctgaacacttaagatttgtgcattttactgtgttaactatacacctgtcacatatgtgtacatttgtagtggtagacacagcagtccaagaaaccgtacccagccgaggaactgagaggaaccatacccagctgagaggaaagctgcgctgcccaaaattaagccaatgaacaacccctgttttatttaatcggcacacactccaaaaattcctgttgttatcactgtttacatacttattaggatcctttttcttccagtttgccaagacacagtctgcataaaccaaaataggaggcagttccagtttcttggagagttggcagtaaggaacagcaatatttcttggcaagacctgattaaaatacagtagttaggttttttgttgttgttgttgttgtttttttttttttttttttttttgagatggagtcttgctcctgtcccccaggctggagcgcagtggcaggatctcggctcactgcaacctctgcctcccaggttcaagtgattctcccacctcagcctcccgagtagctgggattataggcacctgccaccatgcctggctattttttgtatttttagtagagatggggtttcactatgttagccaagttggtcttgaactcctgacctcaggtgatcctccggccttggcctctcaaagtgctgggaggcccatgtgtgttttaaaggttagatattgcagtctgtattagttttatgtaattagggttgccagataaaatacaggatgaaaaatgaagtaaaagactaaaaatataataatgataacagtggacatgtcaagccagggcatattttctttatcattttgtcgtgttatctaaactttgcatgatgcagttataatgcttttagaaaatttttggaaagttaaatgtaaattagatgaaaatctgtcacatagcataagaaatctgagaaaatctccaaaccttacggacatctccatgacctttgccccacacatatgccatggtgatgcatcccagaactagacgtgcaaggcgctgtgacttgtggtctgtgagatgatcaatgctgagcatgtttaactgaaaacaaatggagcaattgactcaaatcaatctcagtaatgttttatgcttcaaaaccaagttaacaatgttaagaagctatacaagaagacaaatgtaatacatatgtcaaaccttctcaactctttctcgaagctggccagactctatgagatcaggcagatgtttagcaatgaacatccagtcattataaaaatcaggtagattttccttgaaaaaaaaaaaagatctttatttagtagtagcagttattgtagatttggcttcccactgatagtatgccttgccttcacatccattctgtgcaatgttgccctggcatatggcttacctgtctggaaacaccagcctctgtcttgtcatctgcacacgcagggctgaagaccctctctgtgttccacctcttcctctctcttcaaacactgccatttgcagcttttcaaagttcacctcaaaggtttcactaaaatcctcctgactactctatttgaaaccaatctcctccactataaattctatggattatgccttttcaaattgttaaacaattattatctgctgctttggtttttcttttcttttcttttttgaattggagtctcactctgttgcccaggctggagtgcagtggcgcaatcttggctcactacaacttctgtctcctgggttcaagcaattctcctgcctcagcctcccaagtagctgggattacaggcatgagccaccatgcctggctaatttttgtatttttagtagagatggggttttgccatgttggccaagttggtctcgacctcctaacctcaggtgatctgcctgcctcggcctcccaaagtgctgggattacaggcatgagccactgcgcctggcctactttggtttatcttggctagattttaagttctttgaatggaaggaaaatgagatgttttaaatgtcaatagtggactaggcactctgctcgataatttcatatatataaaagatacatatttaattattgtaatggcccaagaagttatctctgtatcataaataaggaaacccaggcttatacagtttacataacgatttttgtatatcgagtttattgtgaagtttccaactttcaaaagaaatgtaataaatgtatttttgttgtttttattctatgtttcaccatctagtacatcttatttttttggttgttgtgattttctccaaataacagaatacttttttgttctgcacaatgatgatcattttatttgacagcactttcaacaagtataaaatttaatcagtaatatgctctggttcagaggatccctaaatggtataatataaattaaaaatgaatcatactgaggatcattcaaattctgctagattagagattgtgccttgtatctatctatatggaatcagaaaacatattattttcctttggactaagaagcagatagattatgagagataaaacagacattttttggttcataatttctaggaaagatcttcagtgaagaaataaaagtaaccaataattttttttcatgtttccgggacagtgaatctagcttctgcagcatctcagctagcagaattgttattattgttattgttttcagacagggcctcactctgtcacccaggctggagtgcagtggcgcaatctcagttcactgtaacctccgcctcccaggttcaaacaattctcctgtcttagcctctcaagtagctgggactacgggcacaccaacatgctgggtaatttttttttgcatttttagtagagtcaggggtttcaccatgttggccaggctggtctcaaactcctgacctcaagtgatccacccaccttagcctcccaaagtgctgggattacaggtgtaagccactgcaccttgtcagaattactattattattattatttcctgagatggagtctcgctctgtcacccaggctggagtgcggtggcgtgatctcagctcactgcaacctccgactcccaggttcaagcgattctcctgcctcagcctcctgagtagcgaggattacaggtgtatgccactatgccctgcgaatttttgtatttttttagtagagacggggtttcaccacattggccaggctggtctcgaactcctgacctcatgatccacccgcctccgtctcccaaagtgctgggattacaggcgtgagccacccgtccccagccgagaatcttttttttaagtagctaaggaagagtttcgtttgttttcttttggggttttgctttactccttggaatctgttctacaggtattcataattatcacagttgttgcatttttaaggagaatcgaatatctgagaaacaaaacccatgatacaaagtttagtagtttctgaaaaagatggttttattgtaccattgataagtacatccttgaaatcatccagtcccagcatttttgtagatctgcgggcaaatagcaagtttgagtattattgttttgcatgaataaagcaaactagtgcttttggcaataaaattaaagtatacttttcattttctttaattaacaatctgaagaggaaaattagattggaaggaggtagatgctttaaatttgccagtatcaccaaattgtttacaggatttcatttctaagcacagttaggttgaaatctctgactaaacatttgctgtgtttaaaggtgctctctagtatgtggactgtaactgtttgagctacaaacaaaaatacactcgtctacagaattattataacatgttcatagaaatcttctcctggaatcccatgtaccttgttaaactgaagattgaaagaaagaaaataagcaatgtcttattatcccttcttaagagaggcagtgtggaataatggttttaagatcatagactctggagacaggctgcttaggctcatactggcctctggcacttgctagctacatagtttgataattacattctgcatgccttatacttctcattaggaacatgaggataataacatacgtttctggccgggtgcagtggctcacgcctgtaatcctagcactttgggaggccaagatcggtggatcacctgaggtcaggagttcgagaccagcctggccaacatggtgaaaccccgtctctactaaaaatacaaaaaagtagctgggtgtggtggcaggtgcctataatcccagctacttgggaggctgaggcaggagaatcgcttgaacctaggaggcagaggttgcagtgagctgagatcgtgccactgcactccagcccaggtgacagagcgagactccatctcaaaataataataataataataaataaataacatacataacttttgggatggctatgagaatggaaagggttaatttgtaaattgcttagaaaaatgctgtatttgataattaaaatattgatgataaattggtttacatagcattcgttagaagacagactagaaaatgtagtttttaaggcaaaccttttttccacataccttgtactttataggtaagacttgcaaacaagaaaaaaggtagttcagactctcacttgaatcttacgctcagtaaataacaagcaatgataatataacatggaaggtgcttgatgtgcaatctcataaaccccatcaaattagaaacacatgttttgcataatttaagttatatccctaagagaaagggatttctgtttgactcatggctcatttaaaactctggcttttgcaaaacaccttttctcaaaatacaactgtaataacctcattgtttgtattttactatataattcttatgtaaagctgatacactttctatagtttcctttctcaccactctccgtatccatgttaggtaagtaagaaatgcatagatgactccatttctagggagaaaatgtaagacaaattaagtgagatgcagttattacagctctctaatttttacacagctttatgtgtttgtttactagaagttactgaaccacagttgttcagtagaagttaacttggccaggtaaggaatgagaagaagaatgcattttcccacattttactgccttctcttacctgtggatttggcagagcaaagcccacttcttcatcaatatggtactctttactgattgtccaggagttttccatagcgtgtgccattcttgtagtctgctcctctggtgcccctcagtgtctgaagagttttcagagcatcttataatagttgctgccacagccagtgaccacagtttatcacaggggcagtgagaaattacttccacttttggaatggtttcattttctagtttctttgtttgtaatatgaaaaccaataaaaccacaaaagcatctctgtgcatcatatgtacaaactgaaagttcgtattccatatgaaatttgtaatcattaagcacatcattttcttactgccatataggaagccagaaaggcctgaaggaaaacacagaactatgaaaacaggtggccggagaagaacattttactttatggaaacttttaaatctttgaatgaaaatgaaggctgcagtcctaaactctcatttagttatttctcattggcttccttttaggcttccacagttctttgaaaatattagtgtcatgtttcagcagcccggaaacacaacctgtgttatactcaactattagtcaatggctctgaagtaggaaaaaaatagaagcacatgaaaaattagaaacatagtaactctccacttccttatttttcctattgggacttttgtcagtttttccaatgatagcatttgcccttctcacatctctaataagtaacttttaggaagattgccttgcatctaactgtacctgactgcggggggctgatgaggcaacagtctggcatatttgggtactttgtaatatgtcaaaagttggagaaaaggataaaataccttgaaaatgtttttctcaaagtacaaattaagactgcatttggtaaaggttttcagcttgcatgcaagtctgtggttcactttagaggcattgttcaatcttaatgagaacaaggaagctaaagaagaaaccaagttgcccgttcctctagatgatcaaaaggagaaaagagaaatagttcgtgtgagtaaactaaaagacatcgctgttttgtcatcagcttattagtacttgaaataaattaaattgtgatagcatatggctttcgttacagtctagaatagctctcgcgctattctctactaaattatggctgttttcttcaacctgtcattttacaggaaaatgttccttgaataggaaatgtaaggaaaactgaaaccaaaattatacagcaaagagaatacaatgactgtgtttcttatgactacatgattcatgaggctaatactttgggaatcagttcaaggaaaacaaacaaaaaatcatgaagacctatcatatctatatagaaaacaacactacaaataaaatattgagcattagaaaatatgtggttatttttcattctttgtacttgaagtttttatgggtgagtcaaagtgaagacatggaacaacgttttagatgattctgtcccaggattaagtttttaagaagcataagtttttgacaaagctttttcttgattccgtttatccagtcatctcactaaatctatcctaccccccggtgtggtggctcacgcctgtaatcccagcactttgggaagctgaggagggcggatcacttgaggtcaggagttgaagaccagcctgggcaacatggtgaaacccagtctctattgaaaatacaaaaattagctgggcatggtggcatgtgcctgtaatcccagctactcgggaggctgaggcaggagaattgcttgagcccgagaggcagaggttgcagtgagccaagattgcaccattgcactccagcctgggcagcagagtgagactccgtctcaaaaaaaaaaaaaacaatctatcctacccttgactgcagaaccaataatgctttagtgcctcaatgttatccctagccacttaacttcctcaaactttggcttctttgctatttctgaaactacattctcaattgatcttgtcttcattcaccttgattttcttcagccatacctacacctccctaaaaacctcatttcgcatatttttagaagagcatcataattttatgatctcatactgattcttcatctttctccttagcttttaactggtgatcaggttgttatgttagaaaactcctgaaagccagaactcagcgttttgctctatggcctcctacatctgagactttatgtgactctgtctcccttgtatacatctgtctttgatagcttacattattttttctctataattatttcattgcctgacttatcttcacagctatagactacatttccatctgcctgaggaacatctctaccttaaaatcctgttatccagtttcacaggggacttcactgacacaaggactattatgataggatctgcagagggaccttcattcaaggtcatgataaatacaaatgtgtctcctctcaatggagcatcttttctaatacattcacatttctctttaccattatgttatactaatttataaaatgtagctttttttaataaaagaattttcatttaaaaaataatttacagcatgtaaggagaatgaaaaaagtcatggaaataccaacatcactgaattcaccattaacgtttatgttattatgttttacagcatttttcatgcaaatcaattacattcaaatttttctgggcacttactagagtcaggaattttctaaaaactttgcttgtagtaactaattttacttttataattggcttatgaggaaactttcatgatatctctgaaagggaattaacgtgattcagattttgctaattaaggcccttagttgccaaaataaaacaaaattaaatactcccttaaggaagaaaacatcatcttagacctcaaagtactgatattgtttttatagatgtctaaaaatcactaaaaaataaccaggcgccagccgcggtggctcacgcctgtaatcccagcattttgggaggctgaggcgggtggactgcctgaggtcaggagctcgagaccagtgtggccaaggtgaaaccccgtctctactaaaaataacaaaaaaattagctgggcatggtggtatgtgcctgtaatcacagctactcgggaggctgaggcaggagaatcgcttgaaccagggaggtggaggttgcagtgagccgagattgtgccactgcactccagcctgtgcgacagaaggcgactccgtctcaaaaataaataaaataaaataaaataaaataaaataaaataaaataaaataaaataaaataaaataaataagtaaaataaaatactgaattggactgaaatagaagacaatgatgtgtgacaaaagtctgtccaggtgtgttgacaaactttagtcattcttcctgtaacatgagttaagttaatgaaaacacagaaaagggaccagaggtaattgttttcttctttggcagatctggacttaaggcaggtaagagaacttcggggaacaacttcttccagtgtctactggcttccgggagcctttaatttgaagtaaccagcatatcagagtgccatatttttgggtgtccttttctgagccccagtaattcccctgtttgaaacttttctaatgtttcatacacaaaaagttgagttggtagttgtagagagaaaaactgagttagtagctgaatggcaaaggatctcattaaaccagtcttctcacttctgggaaaaggccagtctaattagtcttctcacttctgggaaaaggccagttttgtcttatatcaggagatggctttgtagatgggatcttaaagctatgactctatatataatgcagacaaaaagatctacagtaagagccattttttacagaattggaagaaaaacaaaggttaatctttggagtagtttacaaactagtttcttctaaagtctgcaggacagctgagaatatcagtagcaatctgacagattttcctggattgtagcttgtgtgcaaagtttgtccatttataaaatgttgcagtgatttttcttcaaagccaagttagctagtatcagcttgtagagtcttaggaaaaagggaattttaacgtttagtgattccaagtcagaaatgtaggaggaaaattgaaaatgcttgcctggagattcaaagacagattttgataggactaacaatttaagatttagtttagattacaggcaaataaaaaaatctgagaaagaaagaaaaaacaaacaatgaactggaatctaattatagtttttttttctttcctgaaacatgatttttctctcttcagtcccccatttctaccaaagataaataaaagcaaagccattttatttgcatattaagttttcgtcttattgtacttggcctgattatttgcataaagtgcagtaagaatatcaatttgtaacacaggctccttttaagttcactttgctggaacttttcgtaaggaatctcagattaaacttttagaaacctcttcaggctagaaagccaagtcaaggattggatttgctcttagattgtgtcagtaatacctgtacaaattagtgaatttctcttttctcaaggtcccccaattaacttgaggttcctgggatgtcagaaagtgacattcttacttaccacaagcccattatgtgaaccgtgtatttaggatattagaccagtttttccaaaagctcctatgggcttcataatatcaacctcagtttcttaaagctgtctggtcacatctgaaaatatggcatttcagtcaaagccttggtaaaataaccagagtctccaactgtgttctgtggcaaaagggaacagattcttaatgaactgattcaaataactattttgccataaaatagaaatactcatagtttccaaattcaggatcaatcaggtagagagaaaagtgaatgtttcaattttgttcaaaaaagtatactttacccatttctgtaaagcttaacagaacaaacattttccttaactctgtaaagcaaaacataaaaagaatcagcaatattttaaacaaaaaagttattaaaattacattagtccaatgtaattagttgttttgcttgatgttgagttaacaattttatgactttttaaaaattagagttctgaaattgtttactcagtgctataatacaatcttaaaattataagaaacttgtattcaagagtacttgttttttgttttgtttgttttttgtttttgtttgtttgtttgtttgtttttgagatggaattttgctcttggccaggctggagtgcaatggcatgatctcggctcactgcaacctccacctcctgggttcaagtgattctcctgcctcagcctcctgagtagctgagattacaggcacctgccaccatgctggcctaatttttttattttagcagagacagggtttcactatgttggtcaggctggtctcgaacacctgacctcaggtgatccacccacctctgcctcccaaagtgttgggattacaggcatgagccactgtgcccagccaagagtacttgttgcagtcctttccatgagctttcttgaagacacaacactttaggatttgcaaagagctttcagaaaaaaaggatcagcataaaaaaattaattgtgagcaagactaaaaatggccgtggttaaagatggaattaacaagaaaactaggtcattttctccttttatgacctacaacaatttaacataatactcataattatgactaataacatataacaaaacaaatccaatttttaggaatctcatataattttggagcaaatactaataacatgacaatacaaatataattttgaaaaggttaaatattatttctttttttttttttttttttttttttttttttttttttgagacggagtctcgctctgtcgccctggctggagtgcagtggcgggatctcggctcactgcaagctccgcctcccgggttcacgccattctcctgcctcagcctcccaagtagctgggactacaggcgcgcgccactacacccggctaattttttgtatttttagtagagacggggtttcaccgttttagccgggatggtctcgatctcctgacctcgtgatccgcccgcctcggcctcccaaagttctgggattacaggcgtgagccaccgcgcccggccttaaatattatttcttatttgaaaatctttttacataatgaacatatcaaataagcctgtttattatttcttttggaagcttcagcagctttttggaatatctcaaagttagtttgaggtcaaaaatacttaattttagattttgaaatataattgtgagaagcctctcaaatacattaaaggtttcaaatacttgatcaaaataggatcataggtccaatgaaaaaataatagtcattcatttagccaaagtgataattagaagatttcaaaaagcaaaaacctttgctgtttgattgataagagactcggttttgcaaataatcaaaacaccttctgaagaagcatgacaagacatgaggcacacaaaatctgtttctctctcttgctttttttttgtttttttgcattttactcagaacatgtacaaaaatcttttctttttattaatcctatgcaaaaatattatttaaaagagaaaatcaaccactagctttgtctttgtgtactttaaatactaaagctaattttaatgacgtgtaaacaaatttctctgatatcagtcagctttgcacacaagataaacttttcataaaccttctataacctattataattttttcctactcttctactttttaaaagtctttatatccatttagttttacctatatcattttttttctccattcacttagtctgaagcaatctttatttattttttatttatttttattttttagagacagggtcttgtcactcaggctggagtgcaatggcctgatcatggctcacagcagccttgacctccccggctcaagtgatcctcccatctcagccctcagcctccacagtagctgagaccacaggtgtgcaccaccacacctagctaattaaaatttttttttttttttttgtagagacagggtctccctctgttgcccaagctggcctcaagaaatcctcccactttggcctcccgaagtgttgggattacagatatgagccactgtgcctggtctgaaacaacttttaagtaacctctaaactagacaaaattacttttcctttaaccaaaccacatactcatgacttccttataagcgttctcaccaaaaacgtatcttgcctttttttgtatacactttgcatacaaaattgtttaccttatttttagtggttttaattacatatattaattataatttaactcttagtatcttaatttttagtgaaaatctaagggaactctttcatatcagtatttgtaaatgaaaaccattttataattcttaaaaatatttcctcaatttttcatgtttatcaagagattcaaatatatttatcttttctatatcacatcaaaataaggtatcagagtattcaaacttaaacttatgcttaataattgatgtgtcagtattttaacttagaaataactcagatatttcactattaactattacttaatttaatataacatgactttaagactttaagagtgtcaattaccaaaaagatttttgaaactatgataaatttatttgtaaacatttactctatttgtatttacctaattgactcatcaacaattatgtctgaattcctcatgaaaaacaatagtagccatttaagcttaagctttttgtttgtttgggttttttttgttgctgttgttgtttttatgcagtcttgcgctgtcgcccaggctggagtgcagtggcgcagtcttggctcactgcaagctctgcctcccgggttcacgccattctcctgcctcagcctcccgagtagctgagactacaggcacccgccaccgtgcccagctaatttttgtatttttagttgagatggggtttcaccatattggccaggctggtctcgaactcctgaccttgtgatccacccgccttggcctctcaaggtgctgggattacaggcgtgagccattgtgcctggcctgtttttttgttttttgtttttttcccagctaaaccatgtcaaccctaaatcagccaatttcatcttgagcaaggcctttaagatactgggcacaggtatcctccccaatactctatcctccaggttgtcctggatccaaatgcccatgggcacccacgatggttatgaaaaggagggtccacctgggtcctggatttacacaccaagtgtaaagcccgggacagaggacagaactatgaagatgatgtctggaggatctgacccctcccagcatgaccaagaggaagagctggatgtgggaggatagggccctactgagcttgactctgccctgcagctggtagcccaggtgctgtggacacacatatatcttcaggcttcatcatggcaatctttctaggctccaagacctagaaactcaaaagcaaaaacataggctcacagtaagatgtgtgcaaggcattgggggagcccagccaccagctgtagtagctttagctcacagacaaatcaaagaagtaccaaaaatatcatagaagagatagttttatgaccttactacatttagcagagacagtccaaacctgcctgagcagtagccccaggcaaaaatgtataaattaaattctgaagaaatttttattttattttaccaataattttaaaagttttatttagcaaagattcttaaggtcatatgaatttgaaaagcattgaacctatttacttaatttatatgtgtttttattttcaagtcaatttattaccattagacaatatacaagcatatgtatagaaatataaatatgtgtagacataaaatacagaacacacagatatgtatccaaaagccagacatcagggggcttaacacaacagagggcaaatctttagacctgagaggaacctgcccatacctcttggagctctgtaatggagacagggaacatccccccgccccaagaggccagtggcactttttttgtgtgttcttcaaagggtcacagggtcccctcatgagagtcaaagtcctggttagaccccttaatgtaatattaaaggtggcaaaagaaaggtgaagtagaagtaaatgggaaaacaactcttagagaagcccatcgggaatattttaagcttttccaaaaagaccaatgaaattttacttttttttctcagtaaaaataattctaataagaaaggaagcaaaaaaaaggaccaaatgtataatttttaaaaagagcttcagttgactggaaaaacaaaaaagcccaaaacaaaacaaaacaaaaaccaacacagggtagaaagaagatccaaaagggaaaagtctttgtgaaaaataaaacaaagtacggccgggcaaggtggctcacgcctgtaatcccagcactttggaaggctgaggtgggtggatcacctgggtcaggagtttgagaccggcctggccaacatggcaaaaccttatctctactaaaactacaaaaattagcttgacatggtggtgggtgcctgtaatctcagctactcgggaagctgaggcaggagaatcacttgaacctgggaggcagaggttgcagtgagccgagatcatgctactgcactccagcctgggatacagagtgagactttgtctcaaaataataataataataataaattaaaaaaataaagtaaaaattatagcctgaatatcagcttttagttaagctgttttctgaccttagagttctttttttaaaaattggaatttattattatcagatttcagctgggacaaaaaaccagtattccttgtttttgaacttttatttctcctttctaaccaaaggtatctactgagtgactcagaaccaaagccagtaaatcctttatgaggtaacaaaggacagatatgaggcacctcaaagtggcatgaagaggaagtcctcacaagatctggagccagcccctaaagagacttcaataacagaaaagtaaaaatggtccataaaagggaaaaagatcaatatcaaatggtaatgtaactctccaaacagtcgagagtcacacaaacataaattcaaaacaaataattcaagctaattgttgtacatttttctttttctcctgagttgcaaagatctagatctctaagggtctgatttcctgaatgagaatccaatcccagatcacagcagtgaagagtagaatcctagcccctacactacaagctggggtatctttttgtaggttcagcgggaaccccaaagcaggcagtttgaagcaaaaagattttaagtacatttacaatctgctttctgcctttttgaaatcttgccaaaggagtttctaaggctacatttcttttgtttcttatataagtaccaataacagctgattaaggcaagagccctctaaaaagttttcacttaaatatagccagtttctttattgcaaagcaactgaagccaatcagcttttttcatgcaaagtcccagaggtaactttccaagtttacaatactatgaatgttaagtggcattttaaaaatcggttcagttgatgtagccctcatgattcctcaaaaattcactctcagaaataggctaaggtagcaaaagactcattaccacagatggcgcagggtgctgtctgtgtgtgcagcagtgccacactatcccacaaagttgtggggtgtgccagtcacagaccccttaatctgttgcaccagcagaccctcctgggtttggacttttccagaactaaccaggtagcatgtgttgagacaacaaaggtcctttatagataggacaaagtcccctgagagtctggcatattcagacctaagagtgtgctgcttaatatcttaggtgtctagggttctggccctttcagactggccaccagttatgtcccgaaaatcatactccccagatggtgaaaaacaagagcgagtgctcccaccagtaacaaacaagtcaagttctcacaaacacaaaacaagatataaggggaccctcatccagtttttatttcggggactcacagcacgtacaattgtacataggtctgatgaaactgtaaacatcaccagtctctcgggggccagctcagacaaggggcttatagagactttagacccatgttctatcctatgacacccatctttatgacaaaacaacacataaagacaaagacaatggagaaacaaaatctatttctgggagaaaaaagataagacaatatgaatatctatacaataaaatacaccagagttgctacacccaagaccagtcaaaaatgattttctcctgttaatgttacatatggaaagagagacaaacatggtttttttactatccgctcatccagattccaaagacaaacacagaccaagattctgactggaaagaatttcttacccttctgctggcttgccgggtcccaggttccctgactgcaattttcggaagagcagagcagttttggttgtcctgttcactgggccaaaactgttggagctgagggaaaactttccttttgccctctgaaggttcattgaaaatcaaatgacaaagcagattaataggagaaaaggcatgcaaattttatgttaatgtgcatagcatagggggattgtaggagaaggattacccaataacccgatgggggtagagatgcctatataccacttttcatagggaagaagtggggtaaatgtgacaatttggggtatataaaatgattttttaggggaaatgaatggacttggagaactcaaaaaggcctgtaacaaggtctgttgagcctgcagagcagacaatggctatgaaatgattttctttgaaatactgaattagactgaaatagaaggcgatggtttgtgacaaaactctgtccaggtgtgtctttcttcctttgatatgaattaagttaatgcaaacacataaaaaggaccagtggtcattgttttattctttggtagttccagactttaggcagataaagtaactccagagaacagttacctccagtgcatgttggtcaccaagggcttttaaa

SEQ ID NO: 47 - DNA, 36869 bp, Mus musculus
cattttccttatgtgtgtcagctcttggtgcagtctaataggtcgtggagctgttcagaggtgactcctggccttggaagtgataacccagccttgcttcccttcccacccagttcacttggcacttgccgctcagccctcacggtgcaccccacctctctgtgcccctgccagcatggaccaagcaattccggctgccatgccttctctaccacagcggactgaaattccccgaaaccataagcctagatctcaattatgttttccacaacactgaatatatatatgacttatatatatgactttaggatcaataaaaatgaaagacctaagtgtacatgtttcaggcccaccgggagatctcaacgccatgcttggctaaggaaattgcaactgtgcttagcgtgccggctggggcatggttgtcaccaggtgccttcagccatgctgatggcaaatgtaaaagggaaagtagaacagaaggatctgaaaacttgcggtttctgcacataagaatatttaaagcctcaagcacagcctgtgcaaacacggcagttgtcataggtgaacatgtcagcacccatatgcacagcttaaacgttgctatttcccaggccagcatagttttccgtttcctgctctccctaaagtgactcttggctttcacaaattctcggtgggaaaaaataattaagaaatagtttcagaaagtaattttattagcttttgagaacagcagagtgggaaagccatcaacctcagcagctgtccagaatagggacatggaagagatggagaggagggaagccacaccctttactacatagctagtgagtgaaaatattggctgatctcaaaaatcaaccctcaatcaatcaatatacttgtacaggctaggggaaatattgtcaatagatgcaagacaagaatgtgatagaatcaatgtatttaccttgtatatctgtacatcttgtacatttttacaagatcttgtcatttttctggcccatcctaacatgaccatctttatcagactcattctcctccatggttgaattttcctcagaacccagatcagctgcatccggcacgtgccgtttgagcatcgtctcttcctcctgcatacctgccctagatgactgtctcatacttttcccccctgggctgcctttttatatgcttggttcaaattctagtgacacctaagtcaataaaccataaacgagttaatctaaagccaacggtgtttgactcggatgcagaatagacttgtgggtccgataacttgtgggttcagaatcgtttcgccaaggaaaacgggcctgggtatgtctcatgtcgagtggtcagaactgacaggaatagggcaagcacaccatacatccacgtcaaatatctgattgcatcataaacacatcctccccacactgagaatcataacactgagtgtgcattagtctgcgttggcttcatgctccttctcttatagcaatagggagaggtgtacagtctcttcttttcaaacgttgttttgtgtagagctgtggtcctcaaccttcctaaatgcggtgaccctttaacacagttcctcatgttgtggtgagccccagccataaaattatttttgttgctacttcataactgtaattttgctacctgtttatgaatcataatgtaaatacccgatacacaggatatctaatatgggatccctgtgaaaggggtcatgaccccccaggttgagaactgctggtataaagagaaagagatggccttcccagcgttacctgaaggcagccagtgacagttggattctatccatctcagtaccatgcttatcttaaggcattgagatcactgtggaaacctaacccaatgaaatggccgtggattgaggatcatttctaggacaaataaatgaggtacccgctgtagcacagcccgaaccccttgactgtgttatgttctccatggcacaagtgcagaccaactatcgactttgcttctgtagtgtgggggacagataaagcagtaggtctgactctcttgattcccagcatcctcactaagatgagacccagcagaaaacggaacatttgtacacttccagtgcacttcttgtgagaccacgcaggggctggtctgtcaagccctggtcaggcagctataccctggggtattctccctctgcatggagaagcatggggtgatgacatcatagcaagtgagtgttgcattgggagaaaactcagcaagaagagagtgtttcctgaaccattaatccactggcagaaaggggcactgagttagggtcttagctatcctgatacaggaagtgtgagcagaaaccctgaacgacttcttttgtggtttgtattaatttggcagcaacggaaattgttgcttggcctaaagggcaaacatagcatttagcagcagggtctctggttgattgtaattgcatactggtctatccttttcagcccaaacttcatgtagaacactctgtggggttccttctttttcccagatgtagagagaaaaagactatttggagtcagagtggctacaggctggcaagttgcggaagctgcttcagagaaggtttcaggccgttctgacaaaaggttagaaagcaaggctagagatatgggttagtggttacagaggacaaaattaaagtctgacaacctatatcatgtagctcacaactgccagtaactcccactctggagaacttgatgtttctggcttctgtggacatctgcactcaggtactcatacctaaacacacacagacacatgcatatacatacatatgcacaacacacacatatgcatgcatacacacatgcacttaaaaactaataaaaataaatccttttttaaaaaattagacaggggagatggccctctccacatgagctcagaatccagttcgtactttagacttcgctccccgagagtccaacacagaagggagtaatactgtgccccgtaaaagctaagtgacctggatgccttcctcgctgtttgcagaaatccaggtgtcccttgtgcatttaggggagctgttggtggcaagttatggggaaagtgtttggggtcatagcacgtgttgccttttgaggctgtttttcccaaagccaccagttggttccgttgccactctttcacgtgccgcagaaaatcctgcccgggccctctctggaaccgcatatggtgctggagcaaccagtcccctgtgactcgcccctctccgacccgggggttagatgtgttgatctgaagagccctatgaaggtgccacacatcatggaatgcacatcctacacatccatgatgttcctggccacatagtagtcccctgagtactagtccagtagttcacagtgaaatcacccttcctacatcttttgttgatcagcttcagcaacttaaaatgtccaattgcactgtttgaattggccacaagatggcactgtacatttattgtaacaaaaagaaccaagcacctttatttatggcttagcctggcagagtcccattccttgatagcaaagcttctcttttggtttctatttaaggctaagaaatactatattttttttccattttttattaggtatttagctcatttacatttccaatgctataccaaaagtcccccatacccacccacccccactcccctacccacccactccccctttttggccctggcgttcccctgtactggggcatataaagtctgcgtgtccaatgggcctctctttccagtgatggccgactaggccatcttttgatacatatgcagctagagtcaagagttccggagtactggttagttcataatgttgttccacctatagggttgcagatccctttagctccttgggtacattctctagctcctccattgggagtcctgtgatccatccattagctgactgtgagcatccacttctgtgtttgctaggccccggcatagtctcacaagagacagctacatctgggtcctttcgataaaatcttgctagtgtatgcaatggtgtcagcgtttggatgctgattatggggtggatccctggatatggcggtctctacatggtccatcctttcatctcaaggctaagaaatactatattttaattttttgtatgcagatattgcatacacaaagtgtggatggacaatttatgcagcgaagttacaaagtacaaagttgaaatgtttaattctattattaaatatgtatacgagagtattcatgtatgtgtgtgtatctgtgtatgtgcctgtgtgtttctgtttttgtgtgtatgcatgttcctattgctatgataaaacaacttcactataggcaacttgggaaggaaggatttgcttttgctaacagttccatatcacagtgcatcatggagggagggcagggcaggaacctggaggcaggaactgaagcagaggccgcggactgggccctgcaccatcaatcactaatctagaaaatatatcacgggcttgtccagaagctaatttggtgggagcattttctcaattgacatccccattagcttgtgtcaagttgacataaaaccagacagcacagtgcacgtgattgtgtgtgtgagtctgtgtgagcgcgcttgcacctgtgtgtgagtgtgtgtgagagagtgagtatacgtgtgtgagtgtgtgtttgttgtgtttgtgcgtgtgagtgtgtgtgagcgtctctgtgagtgtgcatgcacgtgtttatgagagagttactatgtgagtgtgtgtttgtgtgagagtgagtatgtgtgtctgtgtttgagtttgtgtgagtgtgtgtgtgtgtgactttgagtgagtgtgtatgagtgtgagtttgtgtatgtatatatatgtgtgtgtgtgtgtatgatatgtgatgtgtgtgtgtgtgtgtgtgtgtgtgtgtgtgtgtgtgtgtgtgtgtgtgtaggctgaggtctgtatcaagtaccttctagtattctctgtcttattttctcagacagggtttcttatagaacctggttcttgtgacttacttagaccggctggccactctatgctagtgatcttcctggctacagatcccagtactgagatgtcaggtgctcctaccatacatatgggcattcttatgtggctgctgagggctcggctcacctccccatgcttgcactacaagtacgttgctcactgaaccacggccacggtcccggttttaaggtggacagccccacagcacgcaccacacccacgctcaagcccctcccgcattgcaccttcctagcagcaggacccgaggacctcagttgactctgccccttggtaagcttgctttctgctcctttgctttttacatgcgagccgccccggtgctgcaaagtgccacgtcagtgtttccatgtccccgatgctggcatcgctgagtcttttcttgatttgatgggcttctggcgaggcaggagctgctgttcacacacacacagcggtgctagctgcacagagcaaagcaactgatggacacagctcaactgtcacccaagagcagcgaagacagtcaaccctatactttggtcacgatcacagcaaaactcgttctctggaaaggagcaattgaaaactcgaaactgtcgtcggaactcaaacttccaacctgagctactgaatggaagttctttccttgctaacctctgttcctcaaccttcctaatgctgtggccctttgagtacagtccctcttgttgtggtaatccctaatcataaaattatttttgttgctacttcataaatgtaatttttgctactttcatgaattgtagtgtaaatatctgtgttttctgatggtcttaagcaacccctgtgaagggggcgtgacccacaggtggaggatcagtgctcttctcacttgtggactctatattaatacacacacatacacacacatacacacacacacatacatacacacacgcatacacacacacatacatacacacacgcatacacacacacatacacacacacgcgcgcatacacacacatacacacacacatgcacccacatacacacacacacatacacacacacatacacacacatacacacacacacacacacacacacacacacacacacacgcatacacatacacaggcacacgcacacatcacttagtttccttaaaccacgactttacccctaagaaagtaaaagttaaactgagcagaccaggacgttcacacttataaccccaggatttagatggaggcagaaacaagaagttgcagcttcataaaatccaccagtctttcaaacaaacaaaaggaagaaagaaagaaaagaaaagattcaaacgtagaaaaagaaatgtgtccttgttgtctcttggccataatctgtttgcccaaaatgtagattctaataaataactagataaaaacgtacatgttctctctctctcttttgcacttcttggacagttccctagaattaagctggttggtcaggggttaatttttcatgtttgtgttaggtgggaacccagcatcaggcctggctcctgacccagttgtgaatctttcctttcctctttgttccagccattcattgcaccagaaatcggccaaggaagctagcagttgatggacccaaggaggaagtgtgtgttctaaccgctctgttaccggtggatacactttaaatctcagacttttggaaaataaaactgatatatgcacgagtgaggctcttatgtgtctcttccaaggccgtggatggcaggtgacatggagtgggtcagggtggctggtggcaacatcccaagtcctccctactgcaaaatcctagatccacagatccaggccggaacagtttaatgtttttaagagggacaaagttgggggaagagttgggagtgaaaaccaattagagtttgtactataggaagagagaaagggcatgggttaagtccaaaggtggccatgggtccaaagataataactctttagtgggatcttctagaacaagggaaagagaaggcagccacaagagcagcgagagaagggggagggggagggcatgtagacaagtgcacagggcaacggtgtcggttacattacgggcaacatgggatctcacatagaatggaaagccccacccaacctcaactaccaaacccaagtcagaacaagtgagtggcatcagtagacgtctactcaataatgaaatacggtcatttcgaaacatttccagaaagattgctgtagacccaaatagcatcaaagataagttctaaccaacatcaaaggggaagttgataccaattcaacaaaaattcttccaggaaacgaagatcattatgcccacccacccctgcccccaataataaagagcatcacatggtaaacaaaaactttctgcagaatttctgctaacaagactttggcaaagagaaaaacttaggatctgtgaacaccaaatccaggtcgccagaactcagatggacctggcttcatagcacagggcaattagggagcctgtgaaccttagggaacttcagaggcaccagggggagcgtgtgagtgctgtccacaggccatataacctttccaactgttttaccctcctcctcctcctcctcctccttctcctcctcctcctcctcttcttcttctcctcctcctcctccttcttcttcttcctcttcttcttcttctcctcttcttctcctcctcctcctcctcctccttcttctcctccttctcctcctcctcctcctcctcttcttcttctccttctcttccttcttctcctcttcttctcctcctcctcctcctcctcctcttcttcttctcctcttccttctcctcctcctcctcctcctcctcctcctcctcctcctcctccttttcctccttctccttcttctcctcctcctccttcttcttatttaacattttccaagttatccattctactcagaattttgtttatgtttcttggaacaatgctgtgcagttgtgtgaacgtgcctgtcatttttctctcccctgctcccagcccctgagcaccttttaaggtcatcttttgctacatagagagtgcaaggctaaccttggctagaacactgtttcaaacaaaaataaaagcatatgtccttatatctgtttgttggcatggccaagtatctagacacggaccgagcatggcttcaattctacagtttcatgccagtgttatgaatgtagtccctcaacttagtggtccccagtgattcttcatattctctgccatcgaatttcatatgaccctgtgcatcgaggacacacaaaatacaaaacaaggtctaaaacttcacttgcttgaggcctagggagaatactttgtgaataagacattcgcaacacaaatgggagaaccagaaattagacacccagcaccaagaataaatcatgttgccgaggctggccttgaactttcatcgatcccccattctcccagcctccccagctctggaattaagactagtgccagtgtaaccaggggccctttcttgaccacactaagaagttcatgggatccatctcataccgaaatcacatcatttctccacgaaccacagactgatttgtgggcagagcaaggcgtgcttatggccagcattggtgtcctgcgacttggccagcaatgatgtcctgtgacccatggtagcaggtcaggggttgtgtttgaacactttgtaagcagcctgctgcctcgaagttacagaccatgcagaacaattgctggtctttccaggtttaatgaaagaactaagaaaaacagcagcgaagaaatgaattaactttttttttccaaattttcttttgaaacagtcttacagtgtaattcaggttatcctcgaatttgccaccctcctgcctcagtctcccaagtgttgcaattataagcatttcctgccaaagtcggcttgactatttttttttaagaggaaagattggaagggaaaaatgatatctgtcttggtttctaccaggatatgtgttgttcgtgttgtcacaaaatctttagaactgctaaaatctaacacagtttggctcataactaattatgagtagaatttctccccctctaaggtggatgctttatcactgtgctgtttcccaaggtttctgagcttggtggtaaaagcctgggggataccagacattctgccaaaaattacattagtttctaaactcactcccctcctaactgccaactggacagagtctggagtcacctaggagccaagcttccaagcacactcccaagggattatctaggttaaggtcagcctcggaagggcactgtagtgtaaaggattgctttgactgtgttaattgatgtgggaagatccatttttgactgtggtcactactgttgccagggcagggccctgagctgtgcaagacagagaaagctttctagctcacgatgaggtcacggggaagaggtcaagagcaagaaggggaccgtgtacgagagcacgggattgagatgttctccaggaaccaggtatcagcaacactcagcaggcaaagcgctgagaacaacgtagtttcagaaaccaagaagacaggataggaagactgtagtttcagatgtacgaaaaggggcaggtcttggaggatgtgacgtaaaacaggacgaagtatctaaagcatgtatgtgtgacatcataggtggtctggaggcacctgggtaagcaggctgcaactggctttacgaacatggctctttggagctgctcctgagattttacccaagtcagaatcttctagaacttctttcccgtgtttagaaagagcacatttttcacttgtctttgttgtgttagaatctttgctttctagtagaaaagacaggaccccatgtacatgccttgccctatgtcatcctttgaggatacaataaaactttacggccccacttttcacttggttccaaatcaatcagccccatctgtcactcagtttacaaaggcttgactcattgcaccctctctgctgggttatttttggtttcgattttccctgccattgttttttataaggagcacatattcttggaaacctgactgttcaaagaaaagccatcataaactaacaatgtcagagctgctctagacctgttccagagccatggttcattaatttgcttcaagagctaatggtctgtttgataagcctgcacattgtcttttaatgtgctatacgatttttttaaccctttctggtcatcaaaagggatgatgtggtttctggtttggttcggtatttcacaagaacaagtcatggctctacagagcgagacactttcttttatatatatataaaaatatatatattttattacgtattttcctcaattacatttccaatgctatcccaacagtcccccacaccctcccccccactcccctacccacccattaccactttttggccctggcgttcccctgtactggggcatataaagtttgcctgtccaatgggcctctctttccagtgatggctgactaggccatcttttgatacatatgcagctaaagtcaagagctccggggtactggttagttcataatgttgttgcacctacagggttgcagatctctttagctccttggatactttctctagctcatccattgggagccctgtgatccatccaatagctgactgtgagcatccacttatgtgtttgctaggccccggcctagtctcacaagagacagctatatcagggtcctttcagcaaatgcttgctagtgtatgcaatggtgtcatcgtttggagactaattatgggatggatccctggatatggcagtctctagatggtccatccttttgtctcacctccaaactttgtctctgtaactccttttatgggtgattgtttccaattctaagaaggggcaaagtgtccacactttggtcttcgttcttcttcagtttcatgtgttttacaaattggcgaggcactttcttaaaattaattaattaattaattaattaattaaaaacccatacaaaacaaaacaacaacaaacccaaaatccatttcatcaaagtggacataaacttaggagttctctgtacacctttaccagagtctcaattttgtattgcaaggaatgtttttagttatttgacgctgctctttacttttgaacacattagagaatctccaggtgggcagggctgagagcttgtcaggagtcggtccctggcagccagatagagtaggaaaggtggaccaccttccaagatatggcttacaaatcatgtgaagaagtgaaccctccattagccttagcacagacaagaacctagggaagaaaactagggggaagggtctggtgatgatccccctctgtgctacttctgaggctgactctcctgtgtgtcccaggttgtgtttcagagctggagagacaaaacactgacatttaaaacaggacataagttccctcgtgtgaaagccaataacggacagctattgctagttcggctgtctttattttaaacccaaactctgaacgttttctaaagcaaaatgcattctcctggtcacctgtcctcatggttcttgtcatgtgagttgggcactttgtggcttgaacacccaatcctcctgctggggtaacaggtggccacccaaaccactgatggggtggtttccagggccgaggcctgagtgtgcactcggtcaccataattggcactgggaagctgaggccatcagagccaacagttgatgtccttatgggataaatctgataagaaacacaaatgtttagtttcttcatatgacgaagagagatcctttgtggtttggttgtttatcaaattgcaaatacataaaacagaaaatgaaactgtcccaggtggaagccacttctccccgagtattacgtgtcagctgtggggtttggctaaaccctataagagatgctgggacattccttcagtggccaagtggggggtcagtggagtagacagcaatggcactcagtaaaatatctcctacagaaggttctagaaggatccttgaagaccaccacatagatgaagatgtgggctttgctctaccacatccactggtaagaaaagtgaaaatctgctttgtcctcattatttatctcgacagatgaatttctaagtaagcagctctgtctcaggttctcttaagcgaatgagtgatgtcaaattcagagcccacttacaaaaagggagcctggctgctcttcagtgtttcttcttcttcttcttcctcaaaatccagcccttactttcttaacctggaaatgtgaagtggtgagggaaggggcacatgagaagtctttttagtttcgtgaaggaaacgggctcatagaagggaagccagtttgtcacaatgacttttccagcacggtgtcctgaaacagcaacattcaaatgcccagagccatagaaacatttctcttctgaaccttatcaaatggatcgatctgtgctcctcactgatttcagtatatgagatgatagatcaagcaacttttgtttcatactaataatgcttgtggtttgccaagcataatccaaaggaaggtatgaacaaccttgattgtgcttttgtgcaagttttggaatccaagtgcggtgcatgtgggggaaatgcctcgtgtctcaaccaggtacagtgggaaacaactatagttccatcacccaggagtcagaggcaggggcatagcctcaaattcaaggccagacagtcttaaataaaacaaaagctgagaacgcactgaacaaacaaaaattatgtcattaaattggactgcaaaaacgccacgcataccaatttatcattcacatcttcattatcaacacttacggaaaatagcaaagaagcaaaatactcgtttagaggtgccccatgctcacctagtctcactaagacccgaacagagtaagtagtcagtcgcacgttttgagctcgggtgactctaggacccagacgcaaagagccatggagccaggaaggcacagatctaggggcagtgggctagagactgggatcagatatggaaaaccaaggcagttcccgggaaggcgaggcacgggtacactgcagaattaagggtagcagcgagcctgtatcagctcgcccagccgggagcgatctgaagcatgcaccccgcagtgctcacgaggagcatcctgcgcagctcccatccaatccagtggcttgctgcttggggcgggactacagtttagcatgcagcctcaggctctcccgtctttgggcaccaagcctgatatccttgctacaagtgtcctggcgcctgcatctttgggtgccctggcgtgcctggttttgaggttttcgtgtatccggtcacgaatgtggaactgaccacctcagggtttagcgctgcagttctcaaccttcttaatgctgaaaccttttctaaagttcctcatgttgtgatgaccccggacggtaaaattattttcgttgctacgtcacaactgtaattttgctactgttttgaattgtaatgtaagtatctgtgttttccgatggtcttaggtagtcccaaaaagaatgcagcctcaaaggggtcacgacccacaggttgagaaacactgctctaacaggaagcagccctaggggtgggacattaggacagcactgggtgtggttccaagttctggagttcatctggggacattgcctgcatctatgtagtatttatttgtgtcatgtgatagtaaatatgagattcaggagatacctttatttggatttctttttcatttggggtggggctgaagttacgtatggtagaggaagtagacaccacctatatagcagtcccctccggcatcaatagcttcgcttttttctttctttctttctttctttctttctttctttctttctttctttctttctttctttttttttttttggttttggtttttcgagacagggtttctctgtatagtcctggctgtcctggaactcactccgtagaccaggtagaccaggctggcctcgaactcagaaatcctcctgcctctgcctcccaagtgctggggttaaaggcgtgtgccaccactgcccggcactccctcctgcagcaccctaggtcctagacccatgctcccagtattggggtgcctatgttcacgcaacttgtaccttacttaaaatccccaaagcacatgcacactatgtgtcagaggagcccaagacccattgagtgtctcttttacgtgacaaggtgaccattctctaatatatacacatacatatacatatctgttaaagttgctaagatttatggtaagaataagtctgtctaaaattgtgatagggaaaaaatggctacaagttagaaagatggctcagtcagtgttatgcatgtaagagaatattaatccaataccaagaagtcacattttaaaaagccaaagccaggattaggtcgtgtacactcaaaataccagtggatccttaggatttgctggccaaccaggctaacctcatgggtgggctccagagcagtgagagtcctagtctcaaaagtaaggtgagggacatgtctaaagttgtcctctggcctacacacaggtgtacatgcatatacacacatactcatacactcacacacatacacacatgaacaaacatccacacacatgcacacatgtgtacatacccataaacacacacacacacatgcacacccacacacacatacacattcacatgcatgtatatacatacactcacacacatacacacatgaacaaacatccacacacatgcatacatgtgcgtgcacccacaaacatgcacacacatgtgcacacacacacatacacagaatctatcctagttctgctgttctacctcaaactgcacaagttatagcaacaccccttaaagctaccgttagggtggaaatggtattaagtgaccagtaatatcctaggcccttcaagaaatatattagaagcacagtacagccttaattctgaatgttggaaatgctagtttgagttacaaatgaattattcacaaagtagcatttggacttttaaaataagtgacagaaagactacttcttgggccataagaaatataggcatgggtctgagttcctaatttgctgacaaccttaaagccatctcattctttttcccactcaaaaaatacctgagaagaaagaaagtaacagaaaataagaaaataagtaacagaaaataatgaaaaccgtaatccctgggctccacagagaggagcctggtgtaagacggagaagcgagaaaggcttcggtagaattgttggctgaattttggctcctgccagagcctggactggtccttctagaccatgtttgttgggggcccaaatggagctggagacaagatagaccgtccatggggaagcctgaattactctaagtgacctccgtgagcaattcaaacaaaatggttttattggatcttattttctctcccaggtggagctgcccgacgcatacagcccctgggtccttgtggctagaaatctgcctgtgctgattgagaacgggcagcttcgagaagaagttgaaaaggtttgaaaacctgtacaatcgcctttctgtgtggtttctccacatctcaatcgtggctttaaggcctacagcatccactaccggggctgaggttagtcacatctctccgtctcttctcagctgcccacactgagcacggacggactgagaggacacaggttacagcgcctggcacacctggccctggggtacatcaccatggcgtatgtgtggaaccgaggggatgacgatgttcgaaaggtttggagactttctggtacttctcacatggtgacttttcattagcatgaatgcagattccagcttgccaagtgtctgggctcggaaggtaactcggtggtggtggaatgcacgcctgccacgcggaaggtcccgggtttgaaccctagacccataagaagttaaatactagaactgtagtattatcattgtcgtttgtaatgctggcggtgggtgcttctggaaggaggcactacggtttgaacctcaggccttgtgtgtgttaggctccactgggcttccatttttaaaatttgcatcaggaggaaaatagagcacttcctcactgaattatcataattacattgtaaatatctttcatacagtagacaagcatttaatagctcgatgcagacacatgccctgctttttaagtttcataacactgtgaatgttttatagttaccatacaaatttaggtggcactcagaatcacatgaaatccacaaagactacatctccatatttcaagtcacaaaggaatagcattggtttctcagtgccttttgccatatagtgacaagcgtgactgatgctttcttcagatacttttattgccacatgcagtttaaagacagagacacacatacaatccacccatgcagtcagccagctcctggggtacggagaggaataagacaatctgtgtaaccatgggagcaccctgaacttggttacactcatctattagcatccaattctgcttgtgagtaactgctgttttgcgtattgaggcaggggtatccgtattagcacaggatccagaactcaccttgtatcctgggatggctttgaagtcttaactctcttgtatcatccttccaagtcctaggttagcaggtctacaaggcaccaatgccaagtattgtgaagtttacagaaaacagaataaacatacaacgctctctctctctctctctctctctctctctctccctccctctctctctctctctctctctctctcacacacacacacacacacacatgagtgtttctgtgtgctctgagacagcactctgcttgtatttctcacgtgagtcacatccagtgtccttagcaaagcctacaagtccagagacaacttgagttttcctttctcactgccactagctaacatggtgtcctgtgggacagatgggtaaaggacagagtgaaaataacacagggtcatttgaaaataaaacctaaagtctccttatcttattttctttcctacctgggggcccagctatgccctgaacaaccaacatctcaaacaggagtgttgaaccaccgccgggattatgttatgaaacaagggagagaaaaattacacatatgggcttccaagtgctgtctatgctccataacaagtttgaacagtgagatgagaagaaaatataggatgttttagtggctaaaaaaaatgacccagtttgttttcaactaggtgctgccccgcaatattgctgttccctactgcgagctctcagagaagttgggcctgcctcctattctgtcttatgcagactgtgtcctggcaaactggaagaaaaaggaccccaatgggtatgtgaccccgagcaaaaagcagatgctgttagctgggcgaatttattccttaacttttggcaacgcagcttctgttgttggttatggtttgcttgtttgttggttatagatcgttgtgtctataactacgaacgtattacccgtgagcttgagaggagcacctgggcgtatatgggaaaatccagagagccttcgtgtgcactctggagtgtgcagacttcataaagccaccgcccaaagctagcaacaggagtgtgtcagtcactccagaaaatacttccatgcttcttttcatcctattccttcctctgcacccagaaaatacactctcgattgttgttattgggttagggtctagcaaggtggctcagcaggccaacgaacttgcagcacaacattgtcaacctacgtttaaccccctggacgcaagtaaaagtgaagaattgactccacaaaatttccctctgacctctacatgtgcgccatgaaacacgtgccctccacatcaggcccacagagaacgataatatattatggtttttaaatttttagttggtttgtattaaaatgttagttgggatatgaggagggttattactattttgtttgtgttttgttttatttgtctggcttttgacaatatcttaccacataccccaaagtgaccttgagcttgtctgtcctctgcatcagtctcctgctctctaggatgctgagtgtgcaccacaacacctggcaaattggatttcagatcaataaaagccattgtcatcgctatggtttctattgctgtgatagaacagccagactgagagcaacttgggaaagaaagggttttatttcaccttggttgtaagttcgtcatccaggaaagccagagcagtaactcagagggaacgtagtaacaggaactggagcagaagccttgggggaaccctgcttacatgcttgctctctgttctctctatggcttattcagacaactgaatgtgccaattggaatacgggcaccacctccactgagctggcccctctcccatcaatcatcagccaagtacggcttgcccacaggccagtctgagggtggcatcttctctaatgatgtcccctcttctaaaaacaactctagcttgtgtctcgtaaacaaacattcgccagcacaagcattgaatgtggaattcttaatgtatggtttcctttcattcgagtacttttaagagtccacaaacttaatttccagggagcaagttacattcaagagggcacacatctcagggggagaagcagaaacgtgtgagctttcaggacagcctgctcaggagtcagctagtaatggaacctacaacaagaagaggctaacagccctggtagctttaagcttgtccctgtgagatgcaagaggctaacaatagtctctgtggctatcagcttgtatctatgagatgaagtctgcatatgggagtgtcttgctgtagaaggtaacttcacagtaacagatgcccctgagtgtgtgctctttgattactcaatgtttaagccggtgtttttcaacctgtgggttgtgaccccattgggttcacatataagatatcctacatatctgatatttatacaacgatttgataacagtagcaaaattacagttatgaagtagcaataaaaatgattttatggttgggggatcaccatcacatgaggaactgtgttaaagggtcacagcatcaggaaggttgagacccactggtaagcaatcttgagaaatataaattccatgtttttcttcattaaacccacgtctcagtactgatggatcatagtatacgagccaattctcaaattcacctgatttgataactgttttttctctcttcccaattggcacattgttttgtggctgctctcctaaggcccatgacatacgagtaagtatttggtttttttttttttaacataaaaattatgtttcatccagagtgaatgtaggcttacaggatgttccaaatgattagatttagtaagaaggtaattgaaataattatttaaaagaccaatatatgactatgtctgtaagaaactgtagctgtagattcttgccaccctgctatttgcatctgcatgtttgaaacttatatgaacagatacgaagagtagatgcctctatgcatgtgtgatccagtgacctctgtgactagatgtacttaacaatgtcacccaatagacttatgtctgctcttttaacccaacccttaccatgtttgatctctattctacactttattaaaagttggggaactggggctggagagatagctcagcagttaagaacactgactgctcttccagaggtcctgaattcaattcctaacaatcacatggtggctcacaaccatctataatgggatccgattccctcttctggtgtgtctgaagatagctacagtgtattcacatacataaaataaataaatcctaaaaaaaaaaaaaagttgaggaactaagacatatgacaccagtgtaatcttacctagatgaagttaggctaaaaatatgggtataaatttataaaagataaaatcatgagcactgttcaaacagaatattgaaaggggaatccagaagacagagtgcttgtcccctaaggcacaggggtgggaaggaaggtgtcggaggcacggagcttctggagtattaccagagctcgagacctcctagctagcaccaccgtaaaccatgaggagctcaaataaaactgcgggataggaaaaacacaaagagaacggttccacaggtctctgttggtgatggccaagagtttgagcagtacctttaagcagtgagctttctgacacggggtctcacagtggacatacagtagcatagccagatttagaacccaggaatctaaaccacttcaaaattcataagtactcaaattctaaagccaccattataccaatgccaaaacatcagtagaaaagaaaaaaaaacaaacaaaccggggctggagagatggctcagaggttaagaacatggactgttcttctgaaggtcttgagttcaaatcccagcaaccacatggtggctcacaactatccgtaatgagatctgatacccacttctggtgtgtctaaagacagctacagtgtacttatatgtaataagtaaataaatcttaaaaaaaaaaacacagaatctaaccagtgtgtgtgtgtgtgtgtgtgtgtgtgtgtgtgtgtgtgtgtgtgtgtgtgttgggggtaaagtgtggacagagttgaaagagaaataaactcagggctttgagaatgtatttgtgataacatgcatacctgtacaatgaatggacacagacctgttatcaggtttctaggcctatgctctggaataaaattccaagtatgagcatggccttacatgcatatgatctttagacaatgcattcaatatacttggttttcagtgttttcaaatatatagtagagacagtagggtgggcatataccactctggcacagtttgtttgggaattcaaaaagtacgaataaatatactgggaaagtatgtttccctacagatacagtattggttttcctacattgtttgccaaatgtgactgcttttcttaggaacatggacattctgttctcatttcctggtggggactgcgacaagggcttcttcctcgtctctctattggtggaaatcgcagcttctcctgcaatcaaagtatgtctgttccctcttagctgggtttctttctcccccattcatctaaacaaaattatgtagaaagtaaatcacaatagcaaggttcactttaccctgattgaaggtagcatcaggtcgtataactggagacaatacatgctttactaaaaaagacattttttttttggcacatcaccctgaaatataaaatctaggggtgatgtatttagaatcaaatttgaaatttcagcaagaaatgaaaatcttcaaagggatttgtcattagtttgcagtgatgtaaatccagttgctctaactggaaagagaatggcagcctgctggggggtggcttagtggatgaagtgcttgccctgcagtctggtctcctgacggaaaagctgagcacattgacattcacttgcaaggcccggaggtgctccctgggactcgggaggtgctccctgggactctctggccagccaggcagcctattcagtgagctcctggccagtgaatggttctgtcttatagaacaaaggattaatgattctgggtgttaagttcaggcctccacatgagcacaagcacatatgtgtgcacccaccggtgcatacaaattcacctgcatcatgtacatgcaatagaaatggaaacataaacttgattttctgagtaagtcacaatttattttgtgcctatgtttaatgcttgctagaacacctctctctctctctctctctctctctctctctctctctctctctctctctctccttcatttttaaactttatttttaaaggcaatccccactgtatccagtgcagtagagcgtcaagacctgaaagcattggaaaaggcactgcacgacatagctaccagtctggagaaagccaaggaaatttttaagaggatgcgtggtgagtattgttggcagttcacattctgggctcacagccattggtgcctggtgtctgatgcaaagagttgctgtcgaggaaaaggaagggcaaggtacctgctgctgggtgtctgtctacctcactgcatctttaggcttctttgtgtagtgcatctaattatttccatttgcagaaaagaaaacctaaggtaaaaataaaaaaaaaaaaatgacttaaggttatactactggcaaacgaggaacccagaattccaaactgggtcttgttaacgctgagaaactttcttgcctgatactaaaatctatgaggaaacccatggaaggcaaaggcaacttcaagtgttgaaaaacctagattctagtctgacttaattctgtttcttcacaaatccactctggggataacagagaaatgaactgtttcaaaacagacttagaaactctacctaaccaggaagtgtgtaagagtaatttgggaaggaaatctgccttcctgcctcaatttaacaagtgggattttgtttgtgagtttgaagctgctggtggttgcttgttgtgggagagaactcatctactcaaatgttagtgagctttaggaagactcataagaggatctcgtgggggctcctgtgtgtgtgtgtgtgtgtgtgtgtgtgtgtgtgtgtgtgtgtgtgtgtgtgtgtatgtgtgtgcatgtgtgcttgtgagtgtttatccgtgctgctgtgggtgatgatggagctcagatgctaagaaaggacatgaccactgaggtccatgtctagccctggtttgtttttgcaagcactgcatgtgctgtgccagtaagcacagagtgatgctattcagtgctgacagattcatttcgatgacagtactgtataggtgatattacttggtccctttgcagacccaatatggaagtacaggagaggtagtgagtgggacagaagagagttgcgctgcccatagagacttcctgggtttgcctgatgcctttattagagtctgtactgaagttcggacacttgtctgcagtacgcctgatgctgctttgtacctactcccatcttttcacagactttgtggacccagacacgtttttccacgttctccgcatatatctgtctgggtatgtattccgaggcttgactttattttctcaactcatagaaagaacagactagatcccattagctggcctccgggattctttgtgttgagataaaaatttgtattgctcacacccatgttgtagagaaaaaaagcacaggcttttctctctggtgattcttggccagggaggccctgggacgggagtgggaaaatgattccgagcaaacagagagaatggtctgaaccagagtggagcaaggctcccctcagaaagaacgtcaaaactccctcagaactgtgttactatttttatgaacttgagtgacagggtgggtggaagagccacttcttctataagatcttctacctggtaactaatccaaatgatttttctttcctttttcatctagctggaaatgcagctccaagctgccagaaggtctgctgtatgagggggtctgggacaccccaaaaatgttttcagggggcagtgcaggccagagcagcatcttccagagtcttgatgtccttctgggaataaaacacgaggctggcaaaggtaggtgggaatggccatgtgtcctttcttttcatctaacagaactatatcttaatgcaggttaaggatcctcccgggcagaagtgttgcaaactcaaaggcatcgtgtgctaccaccctgaaatcctgtccagtaaaaccaagtaaaggaagagcgagggagtcacggaggcgtggggggaggggagacaaggaaggataacaaagcaaaaccaagcaaaatgtggtattaggaaactgttacttattctgtcttcaggaccaataggagtctaaaggaacaggcattgctaggagcaagctgtttagcctggcctttgcttcaaagcctcctatggtggctatgatcacccagccttccagaccttgccctctttctttcctagccgaggaaggcctttcttcccccaaccccttacctgtctttgttttgctgtagaatctcctgcagaattcctccaggaaatgagagagtacatgcctccagcccaccggaacttccttttcttcttagagtcagctcccccagtccgtgagtttgtcatttcaagacacaatgaagacttgacgaaagcttataacgagtgtgtgaatggtctggtctctgtgagaaagttccacctcgcaatagtagatacttacattatgaaaccttcgaagaagaagcccactgatggcgacaagtcggaagagccctcaaatgtggaaagcagagggactgggggtacgaatcccatgactttcctaaggagtgtgaaagatacaaccgagaaagctcttctgagttggccttagtgtagcaagctccacttctatcagggcacagaaaacaccttcatcctgtcatagctcattaaatcagatccaccaagtaagactatagaataatttgcctgttgtatattatgtagatttcaaaaatcatctgtgcattccctgtaggaaaataatcaagctgaactatttaatgatattaaaatgatataagaaataatataaaatatatttatgattgaaatacaacaatgagacccagtaaataaaagttattgtgaagttgactaactcttgtgtcctttgtagcgataattaaagattcctccaatggatatctacttaccagggctgagtcctgtagttccaaaatatttatactatgctttctcatcttgactatctcgttagtctgaattatcaacacacaagaagctttgggcgccagactattgtttgccagccttagcaaatatctcaggaatggatatgtaaaagaataaatgagttgtgaaaccaatcatggggtgaagaacaatgaagagtgcacctttgtggtggtctgaatgaggactgtcccccataggttcccatatctggacacttgcttgctgggtggtggcaccatttaggggtggttatggactttagacagtgtagctttgctgtctgaagtggactttgaaggtatagagccttgtcttacttgcagttgaccgtggttaaaccagtcagctttttgcttcggctgcctgcttcaatgccttcccaactcttacagacaccctctctggggacataagccccaataaactattttttacataagtggcttcaggtcatggcacttcaccacagaaacagaaaagtaataatctccataatgcagcttctcctgagagcctgggttattggcactcacactctaacatgagttgatttcatatgggatcctgtagtggtaagtcaagaggaattgaagcagagtatagtggcttgtgcctgtaatcccagtgcaatggcacagagctaacactccaataccaaactctgaagctccatggcctgcgtcctgattttgttctgggactgagggtgctgtaaaataaaatagtcttttatagagaaaatagttattaatttccttaacctacatgatctgctttgtacatctaaacccattagcaatgatttgccttccgacacaaagcagattcaagcatacagcaggtctttaagtcgtatttattcaaatggacaggttatgttacttatattagaagtcctaaccaacaaaaggctagctagcatctggtcgagagtgagtgtgcgtagaattactatcaaggttaccagcacaatgacttcaacgacagaagtccttttgaatttcgatttttttcttttattggatattttctttatttacatttcaaatgttatccccattccagatctcccttccataaacccctccctcccccttcttctatgagggttgctcccccactcccccacccacccactcctgccttcccatcttgacattgcccctacactggggcatcgaactccctcaggaccaagggccacttctctcactgatgtccaacaaggccatccgctatcacatatacagccagagctatgcgtccctccatgtgtactctttggttgatggtccaatccccgggagttctgggaggtctggaggttgacactgttgctccccccatggggctgcaacccccccccccagctccttcagtcccttctccaactcctccatcggggacccagagctcagtccaatggttggctgtgagcatccttctctgtatttgtaaaagcatgaagtatttttactggacatccattagtcctccagctcctcttttcaggcaaaagaagaaccaagtctctaatttagtttgactttacattgtagacagtgcaatttaggaaaaatgaatgccagaattacccatcttttgatgagaatacccttcggagaatcagagaatattatactctggacccttcccttctccaaggatgggtgtggactgggccttgatcacgttcatagaacccgcctctaactgctcaaaagtgatgcgatgaagtcatttttcatttatccaaaacaaagggggtaacttttttttttttttaccagcaaaacgtctttgttttgctgagtaaactatttgaataaaagctaaataatcaacctcaaaatataaacaataagtaatttagacctaagtgactctccagtagtcagaaggaaagctcacaagggtggttaatggtggcccaaaagtaacccagggagatagatctgaagtgtacaggaaccctagtacaggaagacatgggaggaagttgcagatgcatttgagagacagtccaagctggtacttattaggtggctactgcagtgtaagaaatgttccagcaataaatggcaatgccctgaagtgtggcagaggattggaaacagagcattgtcagtgcagaagggttagggagactgataaactgctgctttcagaggtggctttcaggtcagctccaggaggtcaggaggcactggtgtgtgcaggaggcactggcctgcaggctctcctagtttacctgatgttcctttgtctttatatcttcatacttcagagcaagagaactagttagggtcattaccaagccccatcaatcacatctaagtttctgagagacaccgcccaccaagatctgaaggaggtaacagttctgttctggataggaagtgggaggtaatcacttccattgcaatctgtccctaagcagagcgcctgctgagccaggccttcagctagtggctgtggctctcatgtattgctcctgccttacttagaagatatctagtaaactacatgagctgagatattttctgtgaaaccactggttctcaaccttcctaacgctgcaaccctttaatacagttcctcctgctgtggtgaccccgtccataaaattactctattgctaattcataactgtaatttcgctactgttatgaatcataattctgatattcaggatatctgacaggtaacccttaaaggggtcatgaccccacagttgagaaccactgctctagagaatacaagggacaatgtccagcagatggatggtctgtgggcctggagatagggcaacacaactgaagcccagaactgctagcagccaggctagagaggattgcagaggtctttgatgagatcggagagggaaggtgagaagttaggcctgaattgtgcagctccagaagatggctggtgatggtctagaccagatttgacatcctggctttattgcttataggacatgtgacacctggctttgttgtgacacatctgagctgcagtgtcctcctcagaggagatgtggggggaatgacacctgtgactgactcagttgtgttgggagttaagtgggttcttggtaggtagttctgaccataggacttagcaaaaggcaaaccggtgattgttagatatgagttgttgtcaaggaggaggttaatataaagcaggaaggaatagctattgagagggaaggttaaacacaagagtaaccacagtgccagatgtctgaacatctagtcaaggaactggccacttaaagaatttttagctgttagaacagcttgagcctttgaccctcagcgtaggttgcttcttggatgtctgggaacagaaccccattaaacatgagaacaaagaagcaataataaaatgggaaagaacactcagtgctgcctgggctgagtcttgggtcatttagattcagaattcatcaagttagaaactgaaagtgtagctgatggttttacaagtcaacctaggagtggtgccctacaatactcatttctgaatgtgttttcttcatttcctaaaaattcactagtccagttctcaaagatccaaatttgtgctctacaaggagtgaaagccttgttgtgtcatgaaccttctcatgactactgtgagtcctgaaaatgcagattctggaacccaaggaggaatatttctacacatggtcaacttaactaacttctaaaagataaacaaaacagacaccagaagtgggtttggtgtggtttgtttgtttgtttgattgattttacagtgtatcccttggtttcctactgctggtttaagtttttggggcccagtctaaagtgttaaatcaaggtggggaatggaagtctgtgataatcatgtctatcccatgggaggccctggatttgatatacagtataaaggtccatgatttgctgaagaatgacaccccagactcaaatgatatgtaaacacaaagagtgttttattctgcagaagtccagcatgctggggtctcccattaccaagacagagagacaaacaagtgagctcacagactcaattcaaagcacattggagttccagggtagatgagctttgtcttactctatctctagacattccagaaccattatgcggcattgaaggctggagcctgggggttttctattagtaattgacttgcctgggcttgcttggacttgcccagttcttagtcctagtctccttaacagcctaatctctcatggaatcagtctagctttatcaacagcacaagagatgtaaataagtaaataacatggctcatcatagccaggcacagtggtctgcactctaggtccttgttataaacttgtgacctctacagtgagaatgagacatggttcacccagaacatctcttctgttcctgatgctgggcttgcaaataatttcagatacaaagctgggttaggtatgggttttgtagtggagaaggctaaaaggaaacaccaggtggacacattagtgatgatgagaccagggagaccctgacaggataggatggacaggtaagctgcttagggaatgttgataggaaggaacagttctgccaagaaaatcatgggaagatctgaactgggatccttctttcttaagagaaaaggagaattccgatacggggacaagcaaaaagcatctcagagacaggagagctgggagcagacagacaaaagaaaggaaccagactctggctgtttctagggcagctcattggtttttgatgacttgaacccagctagaaatgggcacctttgaatgcaaggtccaaggagcacgggcttttatttcacgcaacgtgatattcacagaccccccccccaaaaaaaacaacatggctgtggacctcagagcgacatagtcaagtctggagatcagaaaccaaggctagaattggtggttacaggtagagcgcaatgcctaaggacaccaaagtagaggacatcagaagagcacaccaagagcccctgggtattcagactcagtgtacaaagtgtcagaaagacgcagtcagcacagagaaaagaaaaccggaaacatggtgggagagagaacacgctgaaaggtggcgctgcctatttgaaccccaccacttctctcctgatttctcaagtgctcagcacaatgtctctgggataaacattgttattcctggaaatgtgaaaacaggtgtggaattttaaccctctcctcaaaaggccatacaaacaactacaggctacagagcagattcctgcctgagtttacagtgggcaggtcctgagccatgaatcccgggtgagtgttgataccagcagcccaggcatcacgtgacaaatcattgggctcccaaaaatcttggtttactaacatgacacttcctaatttactcatctagtctatattgtccctttcagttcttgtatgcgatgatttgatggctttataacgtcaaggacaattcttgagaggacagagagggaatcaatgaaaataacgtggatagaactgtaaagcaatggcgattgaaaaaaaaaaaaaagaaataaaaaagaaagggcttgacttctctaagggatggtggaggagaaggcttattgtaggcagacttcgggacatctgggagagtccagactgaatataaccctgagttaggtcatctgaggtgaagggggaaaggaaaggagagagccaggagggtcaagagtagacaagaatgagcaagtaaccaaaatagttggattatatagggaagcacaacctagcccctgggctggagaagtttaaggtagggggcaaggtatgccagccataccctataacaggtagagtatggactgagggattctgtgagaatgtggcagctaggtcctctttgaaatgttaaacaggccacccctagtgcaatgtctactttcaaaagcttactctggaacaggagacatgctctcccacgcacaggggaagccttctacttgactctccaacattttcatgtccaaaggaaactccaattcccaaacccaaactcccaaggcagtccgaagatccagaaatgagttcagcctggcctgttaggaggactcctcgggaatttgtgaagctggcttccctggaccaaaaggagtcatttcccttccctccggcagaagggacaggtgacatcctgtcagtatacagaagcccatgctgacctccaggctccctcagtatctgttacaagaatctgttacacgtttcaaagcccaatgcaggcaccccagcccttcccacctcctcctctaccttctacctcctccagctcacgggcttctcttcccccagctgctcgtccttataacccagctaatctcaccactctttgctcctgttcactatgcccgctctctgctctctatctccagtcatctctgctctcttacagacagccctggccatgcccagtctgctggccatgttcagtctgcctttatttttatttttatttttattttctttttctgctccaaactcttccagatgcctttggatattttccctctcatatctgaaaaaagaaagaaagaaaaagaaaaaacataaagcaaaagcaagaaaaagaaaccttccccttcatcataccatagagaggtcatattggcaatgtctttactgtaacttcattgtatacaaatgtcaacttgtcagccctgagatcttatatatacaaataacaccaaacagactgagaagactgtactcctatatttatatgtgttagttagaaggcagctcgtttccagacagatcatgccgggccagcacagttccacgaggagcgatttttttggatgggggaagaaagtgaagaagaggagaaagaggaaaagggggtgaagggtcgcggtctcagtcttttatttgtgccatgacatagatgccaggtaatgaatgatgaatgatgcgcacaggtgaagcataggcctgcctggagtgtatggtggttgccatggcaacagacccaagagggtccttgtcgcttagggatgatgtcatagctggattccgaggctggttgtaaagcagtttctgatgctaacaatacatatatatgtaatgataacaaagaaaaagaggccatgaatttgaaaggaaggaaagaagttaggaaggaaggaaggaaggaaggaaggaaggaaggaaggaaggaaggaaggaaggaaggaaggaaggaaagaagatgggaatttggagagatgaaagggaagaatgatataaatacattttaatttcagcaaataaatacattttcaaagataaaaagccaataaagagaaaccctgtctcgaaaaaacaacaacaaaccaaaaacaaacaaacaaacaagccaataaaactgactcctagtttagtcattttgatacactgtcagaatccctcaggaaccaaactcatgttgagtatggatctgcacagccatagctgagagttaagttcgtgtctcccactttgtccctggatttaacagcccctttctcatactttatgaatgagaagggaaagggggtgggggcttctcttggagtcagcattttaattcctaatcttcattgttgacttactacttggctttctttcagaataaatttgcggccatcctggagttcaacctcagggcaaggttctcccctaccgctgaagcaccgcacaagtacaaccacacagaagacacagctggaaagctccctggcctgggcattcctctggggcagagacctcacgcgaaaatatggagcctcaaagtcagagcatgacgctggaggtgccgttgtccttggggagataccacatttctgaggaatatggctttctccttccaaatcctctggtaaggattggcttgtcctggtcagcacatgtgtctggattgttagtctttaccttatgtggttattggaaggttcggtataagtcaccagctggaggaagagtgggaatacagtcctgtgagtcccggaagagcagaggcaactgctactggggacagcacaaagccagtggtcccctccccccagcccccaaagtttccttaaatctatggtagttagcactgactaatcagaagcaaaggtgctatcagagaggagagactggatggagacatgccctaaggacaattagaaccctataactacagcaaagagtggacatgcacacaaccacatggtgtgacacagaataatggagtggccccactgtatatccactctgctttggagacaggttcgccatgcatcccagacctaagcagccaaagggcttagccttctgtgttgatgcaaaccagtttatcttacttgctggtgacagcagagataatgggagacctgcaatgtttttagagccagtaagaagattagatgttatcgggaatttccgatactcgtgaggaatgttggaaaacaagcaggcctgactttcagtccaactgcacagcagtctctagtatacctgctcttgttaagtgtagtctgggcttgggagacatatgccggcaaagtgctagtggcaaagcccatgcttttggcatcttttaaaaactgaccgtacctaagggagggtgaaggccactgagttaaaagtccagggacccgatgttgcagtcgcggtaactgctgatcagcaccaactcacctagttcctctcttacttgtgattaaaaatatcagggtctcaaacacctatcacagtgagactcttgttgttttgaaacagagaatattgatttatgtagcccaggctggccacttgcctccacttccttactgctgggaccatagctgaactcccacagcagatccttttgtgttgaacggtactggagggatctaattgaagagaactaagttctccacagaaagatgtcagctacgacatcggtcatagacatctgcaagctgtccaggttaggggttagtcattagaaccagggccagatctcacagcttgaatcaagccaggccttcctgctgctctctcacggacagttaggaagcagactgtactctgacatgatagcttgcagccgacggctcccggctcctctgtgctccttgtcacgcaggccctgctataaactaaagtgtctgacatgacttcctggtgcctcgtaaagttattaaaagtcagatttctcctttgttctcggaattggttcgagagccctcaggggatttgctgagggtgtgtgtgtgtgtgtgtgtgtgtgtgtgtgtgtgtgtattctaagagtgcttccctaaaagggtcctctgtactgtcaacggatctttcatagtctctctctccctgtctccctgtctctctgtctttctgtctctctgtctctctctgtttctgtctttctgtctctgtctgtctgtctgtctgtctatctctgtgtgtgtgtgtgtattttgaaggtaggaggatctgagcctgaactacacacagctagatcctgtgactctgtctcaaaacagagacacaatcaaactctcaactaatcgaaacaccacaaggcacactccattctgggtgtgtggtctcagtccagcgtattcccatccttccaagtttacaggagaggaagggctgatggcagatacacccttgtcattactgggcatgtgtcctgagtttggaaagagaacactgccaagcaggggaacgaatatcagggcaggccatagctctggggctttctgggctgctttcctctttgtaaatactgggaccaggcagacatacagataagacacaatagcaacatcaagtttcccccctatttgttagaaaggttctatggtatggtgtgatggatgggtaccccttaaaagaggtccctagtgctgttcacacagaaaggaaatattccctgtcccacccagctactcatttatagcccagtaatttcaatatgattctttctgtttcaattttctttcattcaagtgatggttttcaatgtcttttttgttaaaggaagaggaagaaaccttgactaggatcaggtcctggctgctccaaaggtcaagacagactcagttcgacttcactggacaaacagtcctgcaactttacactggttgggaaagaacagtgggtttggcccagtccagtgccctagggcatagccaagacctgttcttcttgggccaagggcaagtggtaggtggcagaccttccccatctctttcagaaagtctcacttaagaaaacctagctggctagcaagttcaagggtataaattaccctatccagctgtttctatcaattcaaagacttccaatttttagtgtctctatggaactttgctcctcgaatctgtaaaaataccacaagaattctttgctaagacatctgtcctctgtgtatatttgggaggacaagacatctttttcagatgaagaatgtgaggaaatcagtttgcaggagaggaggcagttaagaggaggcagcaagaggctggcctgcagcagagctatgaccccaagtgccaggcccactctgaaaattgatttaacacccttcctaaacacaatgtgactgctacttgagtcatttcctctcacagcactaagggcagggcaggttagagcagtgggtcctgggctgtggggtgagacctttaggggagtttcaacaaacaatccagatgccagagccccaccctgtttattcagactctagacccaagagctgtacgctgggaaggccagatagggagaacaagccagagaatgccagacagggagcacaagccagcaaagtcagccgtgaaggtgccacggccaatagagactcctaagtgcgaaaataaataaactgatgacatgcccactccatgcttaaggggaaagtagatcagagagggagagagagagagagagagagaggcacccagaggcagaggcctctggacgattccgtagtagatagagaaagcagactgaagatggccaccagactggacatggccaaggctacctgggaggaaaggaagaacaacagaagtcagagaatagagaaaacctagtgagagaagcaggaaggggttgggggggtggatggagagaagttagcaatgacagcagggttctaagaagaaagagttggggaggggagatcctgtgagctggagggagtggagtgagtggaggggaagagctgagaagggacagatgctagcaggggctttgagatgtacagcaggtacttgtgataggtgactggaggccactggtgaccacatgtcccttctgcaagaggtaagggaaaacattcctttaggtagagggaaaccagtgtcacaagtccctgaggaaagctggctttttatctaacccccagaaatcctcctgtagtccaggtgaagctcatttctggacatacagactgccttttggagtttggggaactggagtttcctttggacctgacagtcaggagacgttgcacatgtaacgtaggggtagacacaagactgacaggaatggcaatgagagaggacaacctccagggaaaaaccaacatgtcccttctcattcagaaattctaagcacttggttgaagcattgggccacagctggagagaagaccggataggaaattaattgccacggacatctgtatttttcagataagacaaaaaggaagaggtctaacattgtcctgaaatatgaggttgccactgatgatctctggacacatcagactagtcagataggggacttgaaacacaatgaatccagagtctgtagtagagacaaagaggccagattgcaaaatggttaatcttgatcaaggctggaaaatgtgtatggaaataagagagactgtaatatcttaagaatgg

SEQ ID NO: 48 - DNA, 36869 bp, Mus musculus
ccattcttaagatattacagtctctcttatttccatacacattttccagccttgatcaagattaaccattttgcaatctggcctctttgtctctactacagactctggattcattgtgtttcaagtcccctatctgactagtctgatgtgtccagagatcatcagtggcaacctcatatttcaggacaatgttagacctcttcctttttgtcttatctgaaaaatacagatgtccgtggcaattaatttcctatccggtcttctctccagctgtggcccaatgcttcaaccaagtgcttagaatttctgaatgagaagggacatgttggtttttccctggaggttgtcctctctcattgccattcctgtcagtcttgtgtctacccctacgttacatgtgcaacgtctcctgactgtcaggtccaaaggaaactccagttccccaaactccaaaaggcagtctgtatgtccagaaatgagcttcacctggactacaggaggatttctgggggttagataaaaagccagctttcctcagggacttgtgacactggtttccctctacctaaaggaatgttttcccttacctcttgcagaagggacatgtggtcaccagtggcctccagtcacctatcacaagtacctgctgtacatctcaaagcccctgctagcatctgtcccttctcagctcttcccctccactcactccactccctccagctcacaggatctcccctccccaactctttcttcttagaaccctgctgtcattgctaacttctctccatccacccccccaaccccttcctgcttctctcactaggttttctctattctctgacttctgttgttcttcctttcctcccaggtagccttggccatgtccagtctggtggccatcttcagtctgctttctctatctactacggaatcgtccagaggcctctgcctctgggtgcctctctctctctctctctctctccctctctgatctactttccccttaagcatggagtgggcatgtcatcagtttatttattttcgcacttaggagtctctattggccgtggcaccttcacggctgactttgctggcttgtgctccctgtctggcattctctggcttgttctccctatctggccttcccagcgtacagctcttgggtctagagtctgaataaacagggtggggctctggcatctggattgtttgttgaaactcccctaaaggtctcaccccacagcccaggacccactgctctaacctgccctgcccttagtgctgtgagaggaaatgactcaagtagcagtcacattgtgtttaggaagggtgttaaatcaattttcagagtgggcctggcacttggggtcatagctctgctgcaggccagcctcttgctgcctcctcttaactgcctcctctcctgcaaactgatttcctcacattcttcatctgaaaaagatgtcttgtcctcccaaatatacacagaggacagatgtcttagcaaagaattcttgtggtatttttacagattcgaggagcaaagttccatagagacactaaaaattggaagtctttgaattgatagaaacagctggatagggtaatttatacccttgaacttgctagccagctaggttttcttaagtgagactttctgaaagagatggggaaggtctgccacctaccacttgcccttggcccaagaagaacaggtcttggctatgccctagggcactggactgggccaaacccactgttctttcccaaccagtgtaaagttgcaggactgtttgtccagtgaagtcgaactgagtctgtcttgacctttggagcagccaggacctgatcctagtcaaggtttcttcctcttcctttaacaaaaaagacattgaaaaccatcacttgaatgaaagaaaattgaaacagaaagaatcatattgaaattactgggctataaatgagtagctgggtgggacagggaatatttcctttctgtgtgaacagcactagggacctcttttaaggggtacccatccatcacaccataccatagaacctttctaacaaataggggggaaacttgatgttgctattgtgtcttatctgtatgtctgcctggtcccagtatttacaaagaggaaagcagcccagaaagccccagagctatggcctgccctgatattcgttcccctgcttggcagtgttctctttccaaactcaggacacatgcccagtaatgacaagggtgtatctgccatcagcccttcctctcctgtaaacttggaaggatgggaatacgctggactgagaccacacacccagaatggagtgtgccttgtggtgtttcgattagttgagagtttgattgtgtctctgttttgagacagagtcacaggatctagctgtgtgtagttcaggctcagatcctcctaccttcaaaatacacacacacacacagagatagacagacagacagacagacagagacagaaagacagaaacagagagagacagagagacagaaagacagagagacagggagacagggagagagagactatgaaagatccgttgacagtacagaggacccttttagggaagcactcttagaatacacacacacacacacacacacacacacacacacacaccctcagcaaatcccctgagggctctcgaaccaattccgagaacaaaggagaaatctgacttttaataactttacgaggcaccaggaagtcatgtcagacactttagtttatagcagggcctgcgtgacaaggagcacagaggagccgggagccgtcggctgcaagctatcatgtcagagtacagtctgcttcctaactgtccgtgagagagcagcaggaaggcctggcttgattcaagctgtgagatctggccctggttctaatgactaacccctaacctggacagcttgcagatgtctatgaccgatgtcgtagctgacatctttctgtggagaacttagttctcttcaattagatccctccagtaccgttcaacacaaaaggatctgctgtgggagttcagctatggtcccagcagtaaggaagtggaggcaagtggccagcctgggctacataaatcaatattctctgtttcaaaacaacaagagtctcactgtgataggtgtttgagaccctgatatttttaatcacaagtaagagaggaactaggtgagttggtgctgatcagcagttaccgcgactgcaacatcgggtccctggacttttaactcagtggccttcaccctcccttaggtacggtcagtttttaaaagatgccaaaagcatgggctttgccactagcactttgccggcatatgtctcccaagcccagactacacttaacaagagcaggtatactagagactgctgtgcagttggactgaaagtcaggcctgcttgttttccaacattcctcacgagtatcggaaattcccgataacatctaatcttcttactggctctaaaaacattgcaggtctcccattatctctgctgtcaccagcaagtaagataaactggtttgcatcaacacagaaggctaagccctttggctgcttaggtctgggatgcatggcgaacctgtctccaaagcagagtggatatacagtggggccactccattattctgtgtcacaccatgtggttgtgtgcatgtccactctttgctgtagttatagggttctaattgtccttagggcatgtctccatccagtctctcctctctgatagcacctttgcttctgattagtcagtgctaactaccatagatttaaggaaactttgggggctggggggaggggaccactggctttgtgctgtccccagtagcagttgcctctgctcttccgggactcacaggactgtattcccactcttcctccagctggtgacttataccgaaccttccaataaccacataaggtaaagactaacaatccagacacatgtgctgaccaggacaagccaatccttaccagaggatttggaaggagaaagccatattcctcagaaatgtggtatctccccaaggacaacggcacctccagcgtcatgctctgactttgaggctccatattttcgcgtgaggtctctgccccagaggaatgcccaggccagggagctttccagctgtgtcttctgtgtggttgtacttgtgcggtgcttcagcggtaggggagaaccttgccctgaggttgaactccaggatggccgcaaatttattctgaaagaaagccaagtagtaagtcaacaatgaagattaggaattaaaatgctgactccaagagaagcccccaccccctttcccttctcattcataaagtatgagaaaggggctgttaaatccagggacaaagtgggagacacgaacttaactctcagctatggctgtgcagatccatactcaacatgagtttggttcctgagggattctgacagtgtatcaaaatgactaaactaggagtcagttttattggcttgtttgtttgtttgtttttggtttgttgttgttttttcgagacagggtttctctttattggctttttatctttgaaaatgtatttatttgctgaaattaaaatgtatttatatcattcttccctttcatctctccaaattcccatcttctttccttccttccttccttccttccttccttccttccttccttccttccttccttccttccttccttcctaacttctttccttcctttcaaattcatggcctctttttctttgttatcattacatatatatgtattgttagcatcagaaactgctttacaaccagcctcggaatccagctatgacatcatccctaagcgacaaggaccctcttgggtctgttgccatggcaaccaccatacactccaggcaggcctatgcttcacctgtgcgcatcattcatcattcattacctggcatctatgtcatggcacaaataaaagactgagaccgcgacccttcacccccttttcctctttctcctcttcttcactttcttcccccatccaaaaaaatcgctcctcgtggaactgtgctggcccggcatgatctgtctggaaacgagctgccttctaactaacacatataaatataggagtacagtcttctcagtctgtttggtgttatttgtatatataagatctcagggctgacaagttgacatttgtatacaatgaagttacagtaaagacattgccaatatgacctctctatggtatgatgaaggggaaggtttctttttcttgcttttgctttatgttttttctttttctttctttcttttttcagatatgagagggaaaatatccaaaggcatctggaagagtttggagcagaaaaagaaaataaaaataaaaataaaaataaaggcagactgaacatggccagcagactgggcatggccagggctgtctgtaagagagcagagatgactggagatagagagcagagagcgggcatagtgaacaggagcaaagagtggtgagattagctgggttataaggacgagcagctgggggaagagaagcccgtgagctggaggaggtagaaggtagaggaggaggtgggaagggctggggtgcctgcattgggctttgaaacgtgtaacagattcttgtaacagatactgagggagcctggaggtcagcatgggcttctgtatactgacaggatgtcacctgtcccttctgccggagggaagggaaatgactccttttggtccagggaagccagcttcacaaattcccgaggagtcctcctaacaggccaggctgaactcatttctggatcttcggactgccttgggagtttgggtttgggaattggagtttcctttggacatgaaaatgttggagagtcaagtagaaggcttcccctgtgcgtgggagagcatgtctcctgttccagagtaagcttttgaaagtagacattgcactaggggtggcctgtttaacatttcaaagaggacctagctgccacattctcacagaatccctcagtccatactctacctgttatagggtatggctggcataccttgccccctaccttaaacttctccagcccaggggctaggttgtgcttccctatataatccaactattttggttacttgctcattcttgtctactcttgaccctcctggctctctcctttcctttcccccttcacctcagatgacctaactcagggttatattcagtctggactctcccagatgtcccgaagtctgcctacaataagccttctcctccaccatcccttagagaagtcaagccctttcttttttatttcttttttttttttttcaatcgccattgctttacagttctatccacgttattttcattgattccctctctgtcctctcaagaattgtccttgacgttataaagccatcaaatcatcgcatacaagaactgaaagggacaatatagactagatgagtaaattaggaagtgtcatgttagtaaaccaagatttttgggagcccaatgatttgtcacgtgatgcctgggctgctggtatcaacactcacccgggattcatggctcaggacctgcccactgtaaactcaggcaggaatctgctctgtagcctgtagttgtttgtatggccttttgaggagagggttaaaattccacacctgttttcacatttccaggaataacaatgtttatcccagagacattgtgctgagcacttgagaaatcaggagagaagtggtggggttcaaataggcagcgccacctttcagcgtgttctctctcccaccatgtttccggttttcttttctctgtgctgactgcgtctttctgacactttgtacactgagtctgaatacccaggggctcttggtgtgctcttctgatgtcctctactttggtgtccttaggcattgcgctctacctgtaaccaccaattctagccttggtttctgatctccagacttgactatgtcgctctgaggtccacagccatgttgttttttttggggggggggtctgtgaatatcacgttgcgtgaaataaaagcccgtgctccttggaccttgcattcaaaggtgcccatttctagctgggttcaagtcatcaaaaaccaatgagctgccctagaaacagccagagtctggttcctttcttttgtctgtctgctcccagctctcctgtctctgagatgctttttgcttgtccccgtatcggaattctccttttctcttaagaaagaaggatcccagttcagatcttcccatgattttcttggcagaactgttccttcctatcaacattccctaagcagcttacctgtccatcctatcctgtcagggtctccctggtctcatcatcactaatgtgtccacctggtgtttccttttagccttctccactacaaaacccatacctaacccagctttgtatctgaaattatttgcaagcccagcatcaggaacagaagagatgttctgggtgaaccatgtctcattctcactgtagaggtcacaagtttataacaaggacctagagtgcagaccactgtgcctggctatgatgagccatgttatttacttatttacatctcttgtgctgttgataaagctagactgattccatgagagattaggctgttaaggagactaggactaagaactgggcaagtccaagcaagcccaggcaagtcaattactaatagaaaacccccaggctccagccttcaatgccgcataatggttctggaatgtctagagatagagtaagacaaagctcatctaccctggaactccaatgtgctttgaattgagtctgtgagctcacttgtttgtctctctgtcttggtaatgggagaccccagcatgctggacttctgcagaataaaacactctttgtgtttacatatcatttgagtctggggtgtcattcttcagcaaatcatggacctttatactgtatatcaaatccagggcctcccatgggatagacatgattatcacagacttccattccccaccttgatttaacactttagactgggccccaaaaacttaaaccagcagtaggaaaccaagggatacactgtaaaatcaatcaaacaaacaaacaaaccacaccaaacccacttctggtgtctgttttgtttatcttttagaagttagttaagttgaccatgtgtagaaatattcctccttgggttccagaatctgcattttcaggactcacagtagtcatgagaaggttcatgacacaacaaggctttcactccttgtagagcacaaatttggatctttgagaactggactagtgaatttttaggaaatgaagaaaacacattcagaaatgagtattgtagggcaccactcctaggttgacttgtaaaaccatcagctacactttcagtttctaacttgatgaattctgaatctaaatgacccaagactcagcccaggcagcactgagtgttctttcccattttattattgcttctttgttctcatgtttaatggggttctgttcccagacatccaagaagcaacctacgctgagggtcaaaggctcaagctgttctaacagctaaaaattctttaagtggccagttccttgactagatgttcagacatctggcactgtggttactcttgtgtttaaccttccctctcaatagctattccttcctgctttatattaacctcctccttgacaacaactcatatctaacaatcaccggtttgccttttgctaagtcctatggtcagaactacctaccaagaacccacttaactcccaacacaactgagtcagtcacaggtgtcattccccccacatctcctctgaggaggacactgcagctcagatgtgtcacaacaaagccaggtgtcacatgtcctataagcaataaagccaggatgtcaaatctggtctagaccatcaccagccatcttctggagctgcacaattcaggcctaacttctcaccttccctctccgatctcatcaaagacctctgcaatcctctctagcctggctgctagcagttctgggcttcagttgtgttgccctatctccaggcccacagaccatccatctgctggacattgtcccttgtattctctagagcagtggttctcaactgtggggtcatgacccctttaagggttacctgtcagatatcctgaatatcagaattatgattcataacagtagcgaaattacagttatgaattagcaatagagtaattttatggacggggtcaccacagcaggaggaactgtattaaagggttgcagcgttaggaaggttgagaaccagtggtttcacagaaaatatctcagctcatgtagtttactagatatcttctaagtaaggcaggagcaatacatgagagccacagccactagctgaaggcctggctcagcaggcgctctgcttagggacagattgcaatggaagtgattacctcccacttcctatccagaacagaactgttacctccttcagatcttggtgggcggtgtctctcagaaacttagatgtgattgatggggcttggtaatgaccctaactagttctcttgctctgaagtatgaagatataaagacaaaggaacatcaggtaaactaggagagcctgcaggccagtgcctcctgcacacaccagtgcctcctgacctcctggagctgacctgaaagccacctctgaaagcagcagtttatcagtctccctaacccttctgcactgacaatgctctgtttccaatcctctgccacacttcagggcattgccatttattgctggaacatttcttacactgcagtagccacctaataagtaccagcttggactgtctctcaaatgcatctgcaacttcctcccatgtcttcctgtactagggttcctgtacacttcagatctatctccctgggttacttttgggccaccattaaccacccttgtgagctttccttctgactactggagagtcacttaggtctaaattacttattgtttatattttgaggttgattatttagcttttattcaaatagtttactcagcaaaacaaagacgttttgctggtaaaaaaaaaaaaaagttaccccctttgttttggataaatgaaaaatgacttcatcgcatcacttttgagcagttagaggcgggttctatgaacgtgatcaaggcccagtccacacccatccttggagaagggaagggtccagagtataatattctctgattctccgaagggtattctcatcaaaagatgggtaattctggcattcatttttcctaaattgcactgtctacaatgtaaagtcaaactaaattagagacttggttcttcttttgcctgaaaagaggagctggaggactaatggatgtccagtaaaaatacttcatgcttttacaaatacagagaaggatgctcacagccaaccattggactgagctctgggtccccgatggaggagttggagaagggactgaaggagctgggggggggggttgcagccccatggggggagcaacagtgtcaacctccagacctcccagaactcccggggattggaccatcaaccaaagagtacacatggagggacgcatagctctggctgtatatgtgatagcggatggccttgttggacatcagtgagagaagtggcccttggtcctgagggagttcgatgccccagtgtaggggcaatgtcaagatgggaaggcaggagtgggtgggtgggggagtgggggagcaaccctcatagaagaagggggagggaggggtttatggaagggagatctggaatggggataacatttgaaatgtaaataaagaaaatatccaataaaagaaaaaaatcgaaattcaaaaggacttctgtcgttgaagtcattgtgctggtaaccttgatagtaattctacgcacactcactctcgaccagatgctagctagccttttgttggttaggacttctaatataagtaacataacctgtccatttgaataaatacgacttaaagacctgctgtatgcttgaatctgctttgtgtcggaaggcaaatcattgctaatgggtttagatgtacaaagcagatcatgtaggttaaggaaattaataactattttctctataaaagactattttattttacagcaccctcagtcccagaacaaaatcaggacgcaggccatggagcttcagagtttggtattggagtgttagctctgtgccattgcactgggattacaggcacaagccactatactctgcttcaattcctcttgacttaccactacaggatcccatatgaaatcaactcatgttagagtgtgagtgccaataacccaggctctcaggagaagctgcattatggagattattacttttctgtttctgtggtgaagtgccatgacctgaagccacttatgtaaaaaatagtttattggggcttatgtccccagagagggtgtctgtaagagttgggaaggcattgaagcaggcagccgaagcaaaaagctgactggtttaaccacggtcaactgcaagtaagacaaggctctataccttcaaagtccacttcagacagcaaagctacactgtctaaagtccataaccacccctaaatggtgccaccacccagcaagcaagtgtccagatatgggaacctatgggggacagtcctcattcagaccaccacaaaggtgcactcttcattgttcttcaccccatgattggtttcacaactcatttattcttttacatatccattcctgagatatttgctaaggctggcaaacaatagtctggcgcccaaagcttcttgtgtgttgataattcagactaacgagatagtcaagatgagaaagcatagtataaatattttggaactacaggactcagccctggtaagtagatatccattggaggaatctttaattatcgctacaaaggacacaagagttagtcaacttcacaataacttttatttactgggtctcattgttgtatttcaatcataaatatattttatattatttcttatatcattttaatatcattaaatagttcagcttgattattttcctacagggaatgcacagatgatttttgaaatctacataatatacaacaggcaaattattctatagtcttacttggtggatctgatttaatgagctatgacaggatgaaggtgttttctgtgccctgatagaagtggagcttgctacactaaggccaactcagaagagctttctcggttgtatctttcacactccttaggaaagtcatgggattcgtacccccagtccctctgctttccacatttgagggctcttccgacttgtcgccatcagtgggcttcttcttcgaaggtttcataatgtaagtatctactattgcgaggtggaactttctcacagagaccagaccattcacacactcgttataagctttcgtcaagtcttcattgtgtcttgaaatgacaaactcacggactgggggagctgactctaagaagaaaaggaagttccggtgggctggaggcatgtactctctcatttcctggaggaattctgcaggagattctacagcaaaacaaagacaggtaaggggttgggggaagaaaggccttcctcggctaggaaagaaagagggcaaggtctggaaggctgggtgatcatagccaccataggaggctttgaagcaaaggccaggctaaacagcttgctcctagcaatgcctgttcctttagactcctattggtcctgaagacagaataagtaacagtttcctaataccacattttgcttggttttgctttgttatccttccttgtctcccctccccccacgcctccgtgactccctcgctcttcctttacttggttttactggacaggatttcagggtggtagcacacgatgcctttgagtttgcaacacttctgcccgggaggatccttaacctgcattaagatatagttctgttagatgaaaagaaaggacacatggccattcccacctacctttgccagcctcgtgttttattcccagaaggacatcaagactctggaagatgctgctctggcctgcactgccccctgaaaacatttttggggtgtcccagaccccctcatacagcagaccttctggcagcttggagctgcatttccagctagatgaaaaaggaaagaaaaatcatttggattagttaccaggtagaagatcttatagaagaagtggctcttccacccaccctgtcactcaagttcataaaaatagtaacacagttctgagggagttttgacgttctttctgaggggagccttgctccactctggttcagaccattctctctgtttgctcggaatcattttcccactcccgtcccagggcctccctggccaagaatcaccagagagaaaagcctgtgctttttttctctacaacatgggtgtgagcaatacaaatttttatctcaacacaaagaatcccggaggccagctaatgggatctagtctgttctttctatgagttgagaaaataaagtcaagcctcggaatacatacccagacagatatatgcggagaacgtggaaaaacgtgtctgggtccacaaagtctgtgaaaagatgggagtaggtacaaagcagcatcaggcgtactgcagacaagtgtccgaacttcagtacagactctaataaaggcatcaggcaaacccaggaagtctctatgggcagcgcaactctcttctgtcccactcactacctctcctgtacttccatattgggtctgcaaagggaccaagtaatatcacctatacagtactgtcatcgaaatgaatctgtcagcactgaatagcatcactctgtgcttactggcacagcacatgcagtgcttgcaaaaacaaaccagggctagacatggacctcagtggtcatgtcctttcttagcatctgagctccatcatcacccacagcagcacggataaacactcacaagcacacatgcacacacatacacacacacacacacacacacacacacacacacacacacacacacacacacacaggagcccccacgagatcctcttatgagtcttcctaaagctcactaacatttgagtagatgagttctctcccacaacaagcaaccaccagcagcttcaaactcacaaacaaaatcccacttgttaaattgaggcaggaaggcagatttccttcccaaattactcttacacacttcctggttaggtagagtttctaagtctgttttgaaacagttcatttctctgttatccccagagtggatttgtgaagaaacagaattaagtcagactagaatctaggtttttcaacacttgaagttgcctttgccttccatgggtttcctcatagattttagtatcaggcaagaaagtttctcagcgttaacaagacccagtttggaattctgggttcctcgtttgccagtagtataaccttaagtcatttttttttttttatttttaccttaggttttcttttctgcaaatggaaataattagatgcactacacaaagaagcctaaagatgcagtgaggtagacagacacccagcagcaggtaccttgcccttccttttcctcgacagcaactctttgcatcagacaccaggcaccaatggctgtgagcccagaatgtgaactgccaacaatactcaccacgcatcctcttaaaaatttccttggctttctccagactggtagctatgtcgtgcagtgccttttccaatgctttcaggtcttgacgctctactgcactggatacagtggggattgcctttaaaaataaagtttaaaaatgaaggagagagagagagagagagagagagagagagagagagagagagagagagagaggtgttctagcaagcattaaacataggcacaaaataaattgtgacttactcagaaaatcaagtttatgtttccatttctattgcatgtacatgatgcaggtgaatttgtatgcaccggtgggtgcacacatatgtgcttgtgctcatgtggaggcctgaacttaacacccagaatcattaatcctttgttctataagacagaaccattcactggccaggagctcactgaataggctgcctggctggccagagagtcccagggagcacctcccgagtcccagggagcacctccgggccttgcaagtgaatgtcaatgtgctcagcttttccgtcaggagaccagactgcagggcaagcacttcatccactaagccaccccccagcaggctgccattctctttccagttagagcaactggatttacatcactgcaaactaatgacaaatccctttgaagattttcatttcttgctgaaatttcaaatttgattctaaatacatcacccctagattttatatttcagggtgatgtgccaaaaaaaaaatgtcttttttagtaaagcatgtattgtctccagttatacgacctgatgctaccttcaatcagggtaaagtgaaccttgctattgtgatttactttctacataattttgtttagatgaatgggggagaaagaaacccagctaagagggaacagacatactttgattgcaggagaagctgcgatttccaccaatagagagacgaggaagaagcccttgtcgcagtccccaccaggaaatgagaacagaatgtccatgttcctaagaaaagcagtcacatttggcaaacaatgtaggaaaaccaatactgtatctgtagggaaacatactttcccagtatatttattcgtactttttgaattcccaaacaaactgtgccagagtggtatatgcccaccctactgtctctactatatatttgaaaacactgaaaaccaagtatattgaatgcattgtctaaagatcatatgcatgtaaggccatgctcatacttggaattttattccagagcataggcctagaaacctgataacaggtctgtgtccattcattgtacaggtatgcatgttatcacaaatacattctcaaagccctgagtttatttctctttcaactctgtccacactttacccccaacacacacacacacacacacacacacacacacacacacacacacacacacactggttagattctgtgtttttttttttaagatttatttacttattacatataagtacactgtagctgtctttagacacaccagaagtgggtatcagatctcattacggatagttgtgagccaccatgtggttgctgggatttgaactcaagaccttcagaagaacagtccatgttcttaacctctgagccatctctccagccccggtttgtttgtttttttttcttttctactgatgttttggcattggtataatggtggctttagaatttgagtacttatgaattttgaagtggtttagattcctgggttctaaatctggctatgctactgtatgtccactgtgagaccccgtgtcagaaagctcactgcttaaaggtactgctcaaactcttggccatcaccaacagagacctgtggaaccgttctctttgtgtttttcctatcccgcagttttatttgagctcctcatggtttacggtggtgctagctaggaggtctcgagctctggtaatactccagaagctccgtgcctccgacaccttccttcccacccctgtgccttaggggacaagcactctgtcttctggattcccctttcaatattctgtttgaacagtgctcatgattttatcttttataaatttatacccatatttttagcctaacttcatctaggtaagattacactggtgtcatatgtcttagttcctcaacttttttttttttttaggatttatttattttatgtatgtgaatacactgtagctatcttcagacacaccagaagagggaatcggatcccattatagatggttgtgagccaccatgtgattgttaggaattgaattcaggacctctggaagagcagtcagtgttcttaactgctgagctatctctccagccccagttccccaacttttaataaagtgtagaatagagatcaaacatggtaagggttgggttaaaagagcagacataagtctattgggtgacattgttaagtacatctagtcacagaggtcactggatcacacatgcatagaggcatctactcttcgtatctgttcatataagtttcaaacatgcagatgcaaatagcagggtggcaagaatctacagctacagtttcttacagacatagtcatatattggtcttttaaataattatttcaattaccttcttactaaatctaatcatttggaacatcctgtaagcctacattcactctggatgaaacataatttttatgttaaaaaaaaaaaaaccaaatacttactcgtatgtcatgggccttaggagagcagccacaaaacaatgtgccaattgggaagagagaaaaaacagttatcaaatcaggtgaatttgagaattggctcgtatactatgatccatcagtactgagacgtgggtttaatgaagaaaaacatggaatttatatttctcaagattgcttaccagtgggtctcaaccttcctgatgctgtgaccctttaacacagttcctcatgtgatggtgatcccccaaccataaaatcatttttattgctacttcataactgtaattttgctactgttatcaaatcgttgtataaatatcagatatgtaggatatcttatatgtgaacccaatggggtcacaacccacaggttgaaaaacaccggcttaaacattgagtaatcaaagagcacacactcaggggcatctgttactgtgaagttaccttctacagcaagacactcccatatgcagacttcatctcatagatacaagctgatagccacagagactattgttagcctcttgcatctcacagggacaagcttaaagctaccagggctgttagcctcttcttgttgtaggttccattactagctgactcctgagcaggctgtcctgaaagctcacacgtttctgcttctccccctgagatgtgtgccctcttgaatgtaacttgctccctggaaattaagtttgtggactcttaaaagtactcgaatgaaaggaaaccatacattaagaattccacattcaatgcttgtgctggcgaatgtttgtttacgagacacaagctagagttgtttttagaagaggggacatcattagagaagatgccaccctcagactggcctgtgggcaagccgtacttggctgatgattgatgggagaggggccagctcagtggaggtggtgcccgtattccaattggcacattcagttgtctgaataagccatagagagaacagagagcaagcatgtaagcagggttcccccaaggcttctgctccagttcctgttactacgttccctctgagttactgctctggctttcctggatgacgaacttacaaccaaggtgaaataaaaccctttctttcccaagttgctctcagtctggctgttctatcacagcaatagaaaccatagcgatgacaatggcttttattgatctgaaatccaatttgccaggtgttgtggtgcacactcagcatcctagagagcaggagactgatgcagaggacagacaagctcaaggtcactttggggtatgtggtaagatattgtcaaaagccagacaaataaaacaaaacacaaacaaaatagtaataaccctcctcatatcccaactaacattttaatacaaaccaactaaaaatttaaaaaccataatatattatcgttctctgtgggcctgatgtggagggcacgtgtttcatggcgcacatgtagaggtcagagggaaattttgtggagtcaattcttcacttttacttgcgtccagggggttaaacgtaggttgacaatgttgtgctgcaagttcgttggcctgctgagccaccttgctagaccctaacccaataacaacaatcgagagtgtattttctgggtgcagaggaaggaataggatgaaaagaagcatggaagtattttctggagtgactgacacactcctgttgctagctttgggcggtggctttatgaagtctgcacactccagagtgcacacgaaggctctctggattttcccatatacgcccaggtgctcctctcaagctcacgggtaatacgttcgtagttatagacacaacgatctataaccaacaaacaagcaaaccataaccaacaacagaagctgcgttgccaaaagttaaggaataaattcgcccagctaacagcatctgctttttgctcggggtcacatacccattggggtcctttttcttccagtttgccaggacacagtctgcataagacagaataggaggcaggcccaacttctctgagagctcgcagtagggaacagcaatattgcggggcagcacctagttgaaaacaaactgggtcattttttttagccactaaaacatcctatattttcttctcatctcactgttcaaacttgttatggagcatagacagcacttggaagcccatatgtgtaatttttctctcccttgtttcataacataatcccggcggtggttcaacactcctgtttgagatgttggttgttcagggcatagctgggcccccaggtaggaaagaaaataagataaggagactttaggttttattttcaaatgaccctgtgttattttcactctgtcctttacccatctgtcccacaggacaccatgttagctagtggcagtgagaaaggaaaactcaagttgtctctggacttgtaggctttgctaaggacactggatgtgactcacgtgagaaatacaagcagagtgctgtctcagagcacacagaaacactcatgtgtgtgtgtgtgtgtgtgtgagagagagagagagagagagagagagggagggagagagagagagagagagagagagagagagagcgttgtatgtttattctgttttctgtaaacttcacaatacttggcattggtgccttgtagacctgctaacctaggacttggaaggatgatacaagagagttaagacttcaaagccatcccaggatacaaggtgagttctggatcctgtgctaatacggatacccctgcctcaatacgcaaaacagcagttactcacaagcagaattggatgctaatagatgagtgtaaccaagttcagggtgctcccatggttacacagattgtcttattcctctccgtaccccaggagctggctgactgcatgggtggattgtatgtgtgtctctgtctttaaactgcatgtggcaataaaagtatctgaagaaagcatcagtcacgcttgtcactatatggcaaaaggcactgagaaaccaatgctattcctttgtgacttgaaatatggagatgtagtctttgtggatttcatgtgattctgagtgccacctaaatttgtatggtaactataaaacattcacagtgttatgaaacttaaaaagcagggcatgtgtctgcatcgagctattaaatgcttgtctactgtatgaaagatatttacaatgtaattatgataattcagtgaggaagtgctctattttcctcctgatgcaaattttaaaaatggaagcccagtggagcctaacacacacaaggcctgaggttcaaaccgtagtgcctccttccagaagcacccaccgccagcattacaaacgacaatgataatactacagttctagtatttaacttcttatgggtctagggttcaaacccgggaccttccgcgtggcaggcgtgcattccaccaccaccgagttaccttccgagcccagacacttggcaagctggaatctgcattcatgctaatgaaaagtcaccatgtgagaagtaccagaaagtctccaaacctttcgaacatcgtcatcccctcggttccacacatacgccatggtgatgtaccccagggccaggtgtgccaggcgctgtaacctgtgtcctctcagtccgtccgtgctcagtgtgggcagctgagaagagacggagagatgtgactaacctcagccccggtagtggatgctgtaggccttaaagccacgattgagatgtggagaaaccacacagaaaggcgattgtacaggttttcaaaccttttcaacttcttctcgaagctgcccgttctcaatcagcacaggcagatttctagccacaaggacccaggggctgtatgcgtcgggcagctccacctgggagagaaaataagatccaataaaaccattttgtttgaattgctcacggaggtcacttagagtaattcaggcttccccatggacggtctatcttgtctccagctccatttgggcccccaacaaacatggtctagaaggaccagtccaggctctggcaggagccaaaattcagccaacaattctaccgaagcctttctcgcttctccgtcttacaccaggctcctctctgtggagcccagggattacggttttcattattttctgttacttattttcttattttctgttactttctttcttctcaggtattttttgagtgggaaaaagaatgagatggctttaaggttgtcagcaaattaggaactcagacccatgcctatatttcttatggcccaagaagtagtctttctgtcacttattttaaaagtccaaatgctactttgtgaataattcatttgtaactcaaactagcatttccaacattcagaattaaggctgtactgtgcttctaatatatttcttgaagggcctaggatattactggtcacttaataccatttccaccctaacggtagctttaaggggtgttgctataacttgtgcagtttgaggtagaacagcagaactaggatagattctgtgtatgtgtgtgtgtgcacatgtgtgtgcatgtttgtgggtgcacgcacatgtatgcatgtgtgtggatgtttgttcatgtgtgtatgtgtgtgagtgtatgtatatacatgcatgtgaatgtgtatgtgtgtgtgggtgtgcatgtgtgtgtgtgtgtttatgggtatgtacacatgtgtgcatgtgtgtggatgtttgttcatgtgtgtatgtgtgtgagtgtatgagtatgtgtgtatatgcatgtacacctgtgtgtaggccagaggacaactttagacatgtccctcaccttacttttgagactaggactctcactgctctggagcccacccatgaggttagcctggttggccagcaaatcctaaggatccactggtattttgagtgtacacgacctaatcctggctttggctttttaaaatgtgacttcttggtattggattaatattctcttacatgcataacactgactgagccatctttctaacttgtagccattttttccctatcacaattttagacagacttattcttaccataaatcttagcaactttaacagatatgtatatgtatgtgtatatattagagaatggtcaccttgtcacgtaaaagagacactcaatgggtcttgggctcctctgacacatagtgtgcatgtgctttggggattttaagtaaggtacaagttgcgtgaacataggcaccccaatactgggagcatgggtctaggacctagggtgctgcaggagggagtgccgggcagtggtggcacacgcctttaaccccagcacttgggaggcagaggcaggaggatttctgagttcgaggccagcctggtctacctggtctacggagtgagttccaggacagccaggactatacagagaaaccctgtctcgaaaaaccaaaaccaaaaaaaaaaaaagaaagaaagaaagaaagaaagaaagaaagaaagaaagaaagaaagaaagaaagaaaaaagcgaagctattgatgccggaggggactgctatataggtggtgtctacttcctctaccatacgtaacttcagccccaccccaaatgaaaaagaaatccaaataaaggtatctcctgaatctcatatttactatcacatgacacaaataaatactacatagatgcaggcaatgtccccagatgaactccagaacttggaaccacacccagtgctgtcctaatgtcccacccctagggctgcttcctgttagagcagtgtttctcaacctgtgggtcgtgacccctttgaggctgcattctttttgggactacctaagaccatcggaaaacacagatacttacattacaattcaaaacagtagcaaaattacagttgtgacgtagcaacgaaaataattttaccgtccggggtcatcacaacatgaggaactttagaaaaggtttcagcattaagaaggttgagaactgcagcgctaaaccctgaggtggtcagttccacattcgtgaccggatacacgaaaacctcaaaaccaggcacgccagggcacccaaagatgcaggcgccaggacacttgtagcaaggatatcaggcttggtgcccaaagacgggagagcctgaggctgcatgctaaactgtagtcccgccccaagcagcaagccactggattggatgggagctgcgcaggatgctcctcgtgagcactgcggggtgcatgcttcagatcgctcccggctgggcgagctgatacaggctcgctgctacccttaattctgcagtgtacccgtgcctcgccttcccgggaactgccttggttttccatatctgatcccagtctctagcccactgcccctagatctgtgccttcctggctccatggctctttgcgtctgggtcctagagtcacccgagctcaaaacgtgcgactgactacttactctgttcgggtcttagtgagactaggtgagcatggggcacctctaaacgagtattttgcttctttgctattttccgtaagtgttgataatgaagatgtgaatgataaattggtatgcgtggcgtttttgcagtccaatttaatgacataatttttgtttgttcagtgcgttctcagcttttgttttatttaagactgtctggccttgaatttgaggctatgcccctgcctctgactcctgggtgatggaactatagttgtttcccactgtacctggttgagacacgaggcatttcccccacatgcaccgcacttggattccaaaacttgcacaaaagcacaatcaaggttgttcataccttcctttggattatgcttggcaaaccacaagcattattagtatgaaacaaaagttgcttgatctatcatctcatatactgaaatcagtgaggagcacagatcgatccatttgataaggttcagaagagaaatgtttctatggctctgggcatttgaatgttgctgtttcaggacaccgtgctggaaaagtcattgtgacaaactggcttcccttctatgagcccgtttccttcacgaaactaaaaagacttctcatgtgccccttccctcaccacttcacatttccaggttaagaaagtaagggctggattttgaggaagaagaagaagaagaaacactgaagagcagccaggctccctttttgtaagtgggctctgaatttgacatcactcattcgcttaagagaacctgagacagagctgcttacttagaaattcatctgtcgagataaataatgaggacaaagcagattttcacttttcttaccagtggatgtggtagagcaaagcccacatcttcatctatgtggtggtcttcaaggatccttctagaaccttctgtaggagatattttactgagtgccattgctgtctactccactgaccccccacttggccactgaaggaatgtcccagcatctcttatagggtttagccaaaccccacagctgacacgtaatactcggggagaagtggcttccacctgggacagtttcattttctgttttatgtatttgcaatttgataaacaaccaaaccacaaaggatctctcttcgtcatatgaagaaactaaacatttgtgtttcttatcagatttatcccataaggacatcaactgttggctctgatggcctcagcttcccagtgccaattatggtgaccgagtgcacactcaggcctcggccctggaaaccaccccatcagtggtttgggtggccacctgttaccccagcaggaggattgggtgttcaagccacaaagtgcccaactcacatgacaagaaccatgaggacaggtgaccaggagaatgcattttgctttagaaaacgttcagagtttgggtttaaaataaagacagccgaactagcaatagctgtccgttattggctttcacacgagggaacttatgtcctgttttaaatgtcagtgttttgtctctccagctctgaaacacaacctgggacacacaggagagtcagcctcagaagtagcacagagggggatcatcaccagacccttccccctagttttcttccctaggttcttgtctgtgctaaggctaatggagggttcacttcttcacatgatttgtaagccatatcttggaaggtggtccacctttcctactctatctggctgccagggaccgactcctgacaagctctcagccctgcccacctggagattctctaatgtgttcaaaagtaaagagcagcgtcaaataactaaaaacattccttgcaatacaaaattgagactctggtaaaggtgtacagagaactcctaagtttatgtccactttgatgaaatggattttgggtttgttgttgttttgttttgtatgggtttttaattaattaattaattaattaattaattttaagaaagtgcctcgccaatttgtaaaacacatgaaactgaagaagaacgaagaccaaagtgtggacactttgccccttcttagaattggaaacaatcacccataaaaggagttacagagacaaagtttggaggtgagacaaaaggatggaccatctagagactgccatatccagggatccatcccataattagtctccaaacgatgacaccattgcatacactagcaagcatttgctgaaaggaccctgatatagctgtctcttgtgagactaggccggggcctagcaaacacataagtggatgctcacagtcagctattggatggatcacagggctcccaatggatgagctagagaaagtatccaaggagctaaagagatctgcaaccctgtaggtgcaacaacattatgaactaaccagtaccccggagctcttgactttagctgcatatgtatcaaaagatggcctagtcagccatcactggaaagagaggcccattggacaggcaaactttatatgccccagtacaggggaacgccagggccaaaaagtggtaatgggtgggtaggggagtgggggggagggtgtgggggactgttgggatagcattggaaatgtaattgaggaaaatacgtaataaaatatatatatttttatatatatataaaagaaagtgtctcgctctgtagagccatgacttgttcttgtgaaataccgaaccaaaccagaaaccacatcatcccttttgatgaccagaaagggttaaaaaaatcgtatagcacattaaaagacaatgtgcaggcttatcaaacagaccattagctcttgaagcaaattaatgaaccatggctctggaacaggtctagagcagctctgacattgttagtttatgatggcttttctttgaacagtcaggtttccaagaatatgtgctccttataaaaaacaatggcagggaaaatcgaaaccaaaaataacccagcagagagggtgcaatgagtcaagcctttgtaaactgagtgacagatggggctgattgatttggaaccaagtgaaaagtggggccgtaaagttttattgtatcctcaaaggatgacatagggcaaggcatgtacatggggtcctgtcttttctactagaaagcaaagattctaacacaacaaagacaagtgaaaaatgtgctctttctaaacacgggaaagaagttctagaagattctgacttgggtaaaatctcaggagcagctccaaagagccatgttcgtaaagccagttgcagcctgcttacccaggtgcctccagaccacctatgatgtcacacatacatgctttagatacttcgtcctgttttacgtcacatcctccaagacctgccccttttcgtacatctgaaactacagtcttcctatcctgtcttcttggtttctgaaactacgttgttctcagcgctttgcctgctgagtgttgctgatacctggttcctggagaacatctcaatcccgtgctctcgtacacggtccccttcttgctcttgacctcttccccgtgacctcatcgtgagctagaaagctttctctgtcttgcacagctcagggccctgccctggcaacagtagtgaccacagtcaaaaatggatcttcccacatcaattaacacagtcaaagcaatcctttacactacagtgcccttccgaggctgaccttaacctagataatcccttgggagtgtgcttggaagcttggctcctaggtgactccagactctgtccagttggcagttaggaggggagtgagtttagaaactaatgtaatttttggcagaatgtctggtatcccccaggcttttaccaccaagctcagaaaccttgggaaacagcacagtgataaagcatccaccttagagggggagaaattctactcataattagttatgagccaaactgtgttagattttagcagttctaaagattttgtgacaacacgaacaacacatatcctggtagaaaccaagacagatatcatttttcccttccaatctttcctcttaaaaaaaaatagtcaagccgactttggcaggaaatgcttataattgcaacacttgggagactgaggcaggagggtggcaaattcgaggataacctgaattacactgtaagactgtttcaaaagaaaatttggaaaaaaaaagttaattcatttcttcgctgctgtttttcttagttctttcattaaacctggaaagaccagcaattgttctgcatggtctgtaacttcgaggcagcaggctgcttacaaagtgttcaaacacaacccctgacctgctaccatgggtcacaggacatcattgctggccaagtcgcaggacaccaatgctggccataagcacgccttgctctgcccacaaatcagtctgtggttcgtggagaaatgatgtgatttcggtatgagatggatcccatgaacttcttagtgtggtcaagaaagggcccctggttacactggcactagtcttaattccagagctggggaggctgggagaatgggggatcgatgaaagttcaaggccagcctcggcaacatgatttattcttggtgctgggtgtctaatttctggttctcccatttgtgttgcgaatgtcttattcacaaagtattctccctaggcctcaagcaagtgaagttttagaccttgttttgtattttgtgtgtcctcgatgcacagggtcatatgaaattcgatggcagagaatatgaagaatcactggggaccactaagttgagggactacattcataacactggcatgaaactgtagaattgaagccatgctcggtccgtgtctagatacttggccatgccaacaaacagatataaggacatatgcttttatttttgtttgaaacagtgttctagccaaggttagccttgcactctctatgtagcaaaagatgaccttaaaaggtgctcaggggctgggagcaggggagagaaaaatgacaggcacgttcacacaactgcacagcattgttccaagaaacataaacaaaattctgagtagaatggataacttggaaaatgttaaataagaagaaggaggaggaggagaagaaggagaaggaggaaaaggaggaggaggaggaggaggaggaggaggaggaggaggaggagaaggaagaggagaagaagaagaggaggaggaggaggaggaggagaagaagaggagaagaaggaagagaaggagaagaagaagaggaggaggaggaggaggagaaggaggagaagaaggaggaggaggaggaggaggagaagaagaggagaagaagaagaagaggaagaagaagaaggaggaggaggaggagaagaagaagaggaggaggaggaggagaaggaggaggaggaggaggaggagggtaaaacagttggaaaggttatatggcctgtggacagcactcacacgctccccctggtgcctctgaagttccctaaggttcacaggctccctaattgccctgtgctatgaagccaggtccatctgagttctggcgacctggatttggtgttcacagatcctaagtttttctctttgccaaagtcttgttagcagaaattctgcagaaagtttttgtttaccatgtgatgctctttattattgggggcaggggtgggtgggcataatgatcttcgtttcctggaagaatttttgttgaattggtatcaacttcccctttgatgttggttagaacttatctttgatgctatttgggtctacagcaatctttctggaaatgtttcgaaatgaccgtatttcattattgagtagacgtctactgatgccactcacttgttctgacttgggtttggtagttgaggttgggtggggctttccattctatgtgagatcccatgttgcccgtaatgtaaccgacaccgttgccctgtgcacttgtctacatgccctccccctcccccttctctcgctgctcttgtggctgccttctctttcccttgttctagaagatcccactaaagagttattatctttggacccatggccacctttggacttaacccatgccctttctctcttcctatagtacaaactctaattggttttcactcccaactcttcccccaactttgtccctcttaaaaacattaaactgttccggcctggatctgtggatctaggattttgcagtagggaggacttgggatgttgccaccagccaccctgacccactccatgtcacctgccatccacggccttggaagagacacataagagcctcactcgtgcatatatcagttttattttccaaaagtctgagatttaaagtgtatccaccggtaacagagcggttagaacacacacttcctccttgggtccatcaactgctagcttccttggccgatttctggtgcaatgaatggctggaacaaagaggaaaggaaagattcacaactgggtcaggagccaggcctgatgctgggttcccacctaacacaaacatgaaaaattaacccctgaccaaccagcttaattctagggaactgtccaagaagtgcaaaagagagagagagaacatgtacgtttttatctagttatttattagaatctacattttgggcaaacagattatggccaagagacaacaaggacacatttctttttctacgtttgaatcttttcttttctttctttcttccttttgtttgtttgaaagactggtggattttatgaagctgcaacttcttgtttctgcctccatctaaatcctggggttataagtgtgaacgtcctggtctgctcagtttaacttttactttcttaggggtaaagtcgtggtttaaggaaactaagtgatgtgtgcgtgtgcctgtgtatgtgtatgcgtgtgtgtgtgtgtgtgtgtgtgtgtgtgtgtgtgtgtatgtgtgtgtatgtgtgtgtgtatgtgtgtgtgtgtatgtgggtgcatgtgtgtgtgtatgtgtgtgtatgcgcgcgtgtgtgtgtatgtgtgtgtgtatgcgtgtgtgtatgtatgtgtgtgtgtatgcgtgtgtgtatgtatgtgtgtgtgtgtatgtgtgtgtatgtgtgtgtattaatatagagtccacaagtgagaagagcactgatcctccacctgtgggtcacgcccccttcacaggggttgcttaagaccatcagaaaacacagatatttacactacaattcatgaaagtagcaaaaattacatttatgaagtagcaacaaaaataattttatgattagggattaccacaacaagagggactgtactcaaagggccacagcattaggaaggttgaggaacagaggttagcaaggaaagaacttccattcagtagctcaggttggaagtttgagttccgacgacagtttcgagttttcaattgctcctttccagagaacgagttttgctgtgatcgtgaccaaagtatagggttgactgtcttcgctgctcttgggtgacagttgagctgtgtccatcagttgctttgctctgtgcagctagcaccgctgtgtgtgtgtgaacagcagctcctgcctcgccagaagcccatcaaatcaagaaaagactcagcgatgccagcatcggggacatggaaacactgacgtggcactttgcagcaccggggcggctcgcatgtaaaaagcaaaggagcagaaagcaagcttaccaaggggcagagtcaactgaggtcctcgggtcctgctgctaggaaggtgcaatgcgggaggggcttgagcgtgggtgtggtgcgtgctgtggggctgtccaccttaaaaccgggaccgtggccgtggttcagtgagcaacgtacttgtagtgcaagcatggggaggtgagccgagccctcagcagccacataagaatgcccatatgtatggtaggagcacctgacatctcagtactgggatctgtagccaggaagatcactagcatagagtggccagccggtctaagtaagtcacaagaaccaggttctataagaaaccctgtctgagaaaataagacagagaatactagaaggtacttgatacagacctcagcctacacacacacacacacacacacacacacacacacacacacacacacacacatcacatatcatacacacacacacacatatatatacatacacaaactcacactcatacacactcactcaaagtcacacacacacacactcacacaaactcaaacacagacacacatactcactctcacacaaacacacactcacatagtaactctctcataaacacgtgcatgcacactcacagagacgctcacacacactcacacgcacaaacacaacaaacacacactcacacacgtatactcactctctcacacacactcacacacaggtgcaagcgcgctcacacagactcacacacacaatcacgtgcactgtgctgtctggttttatgtcaacttgacacaagctaatggggatgtcaattgagaaaatgctcccaccaaattagcttctggacaagcccgtgatatattttctagattagtgattgatggtgcagggcccagtccgcggcctctgcttcagttcctgcctccaggttcctgccctgccctccctccatgatgcactgtgatatggaactgttagcaaaagcaaatccttccttcccaagttgcctatagtgaagttgttttatcatagcaataggaacatgcatacacacaaaaacagaaacacacaggcacatacacagatacacacacatacatgaatactctcgtatacatatttaataatagaattaaacatttcaactttgtactttgtaacttcgctgcataaattgtccatccacactttgtgtatgcaatatctgcatacaaaaaattaaaatatagtatttcttagccttgagatgaaaggatggaccatgtagagaccgccatatccagggatccaccccataatcagcatccaaacgctgacaccattgcatacactagcaagattttatcgaaaggacccagatgtagctgtctcttgtgagactatgccggggcctagcaaacacagaagtggatgctcacagtcagctaatggatggatcacaggactcccaatggaggagctagagaatgtacccaaggagctaaagggatctgcaaccctataggtggaacaacattatgaactaaccagtactccggaactcttgactctagctgcatatgtatcaaaagatggcctagtcggccatcactggaaagagaggcccattggacacgcagactttatatgccccagtacaggggaacgccagggccaaaaagggggagtgggtgggtaggggagtgggggtgggtgggtatgggggacttttggtatagcattggaaatgtaaatgagctaaatacctaataaaaaatggaaaaaaaatatagtatttcttagccttaaatagaaaccaaaagagaagctttgctatcaaggaatgggactctgccaggctaagccataaataaaggtgcttggttctttttgttacaataaatgtacagtgccatcttgtggccaattcaaacagtgcaattggacattttaagttgctgaagctgatcaacaaaagatgtaggaagggtgatttcactgtgaactactggactagtactcaggggactactatgtggccaggaacatcatggatgtgtaggatgtgcattccatgatgtgtggcaccttcatagggctcttcagatcaacacatctaacccccgggtcggagaggggcgagtcacaggggactggttgctccagcaccatatgcggttccagagagggcccgggcaggattttctgcggcacgtgaaagagtggcaacggaaccaactggtggctttgggaaaaacagcctcaaaaggcaacacgtgctatgaccccaaacactttccccataacttgccaccaacagctcccctaaatgcacaagggacacctggatttctgcaaacagcgaggaaggcatccaggtcacttagcttttacggggcacagtattactcccttctgtgttggactctcggggagcgaagtctaaagtacgaactggattctgagctcatgtggagagggccatctcccctgtctaattttttaaaaaaggatttatttttattagtttttaagtgcatgtgtgtatgcatgcatatgtgtgtgttgtgcatatgtatgtatatgcatgtgtctgtgtgtgtttaggtatgagtacctgagtgcagatgtccacagaagccagaaacatcaagttctccagagtgggagttactggcagttgtgagctacatgatataggttgtcagactttaattttgtcctctgtaaccactaacccatatctctagccttgctttctaaccttttgtcagaacggcctgaaaccttctctgaagcagcttccgcaacttgccagcctgtagccactctgactccaaatagtctttttctctctacatctgggaaaaagaaggaaccccacagagtgttctacatgaagtttgggctgaaaaggatagaccagtatgcaattacaatcaaccagagaccctgctgctaaatgctatgtttgccctttaggccaagcaacaatttccgttgctgccaaattaatacaaaccacaaaagaagtcgttcagggtttctgctcacacttcctgtatcaggatagctaagaccctaactcagtgcccctttctgccagtggattaatggttcaggaaacactctcttcttgctgagttttctcccaatgcaacactcacttgctatgatgtcatcaccccatgcttctccatgcagagggagaataccccagggtatagctgcctgaccagggcttgacagaccagcccctgcgtggtctcacaagaagtgcactggaagtgtacaaatgttccgttttctgctgggtctcatcttagtgaggatgctgggaatcaagagagtcagacctactgctttatctgtcccccacactacagaagcaaagtcgatagttggtctgcacttgtgccatggagaacataacacagtcaaggggttcgggctgtgctacagcgggtacctcatttatttgtcctagaaatgatcctcaatccacggccatttcattgggttaggtttccacagtgatctcaatgccttaagataagcatggtactgagatggatagaatccaactgtcactggctgccttcaggtaacgctgggaaggccatctctttctctttataccagcagttctcaacctggggggtcatgacccctttcacagggatcccatattagatatcctgtgtatcgggtatttacattatgattcataaacaggtagcaaaattacagttatgaagtagcaacaaaaataattttatggctggggctcaccacaacatgaggaactgtgttaaagggtcaccgcatttaggaaggttgaggaccacagctctacacaaaacaacgtttgaaaagaagagactgtacacctctccctattgctataagagaaggagcatgaagccaacgcagactaatgcacactcagtgttatgattctcagtgtggggaggatgtgtttatgatgcaatcagatatttgacgtggatgtatggtgtgcttgccctattcctgtcagttctgaccactcgacatgagacatacccaggcccgttttccttggcgaaacgattctgaacccacaagttatcggacccacaagtctattctgcatccgagtcaaacaccgttggctttagattaactcgtttatggtttattgacttaggtgtcactagaatttgaaccaagcatataaaaaggcagcccaggggggaaaagtatgagacagtcatctagggcaggtatgcaggaggaagagacgatgctcaaacggcacgtgccggatgcagctgatctgggttctgaggaaaattcaaccatggaggagaatgagtctgataaagatggtcatgttaggatgggccagaaaaatgacaagatcttgtaaaaatgtacaagatgtacagatatacaaggtaaatacattgattctatcacattcttgtcttgcatctattgacaatatttcccctagcctgtacaagtatattgattgattgagggttgatttttgagatcagccaatattttcactcactagctatgtagtaaagggtgtggcttccctcctctccatctcttccatgtccctattctggacagctgctgaggttgatggctttcccactctgctgttctcaaaagctaataaaattactttctgaaactatttcttaattattttttcccaccgagaatttgtgaaagccaagagtcactttagggagagcaggaaacggaaaactatgctggcctgggaaatagcaacgtttaagctgtgcatatgggtgctgacatgttcacctatgacaactgccgtgtttgcacaggctgtgcttgaggctttaaatattcttatgtgcagaaaccgcaagttttcagatccttctgttctactttcccttttacatttgccatcagcatggctgaaggcacctggtgacaaccatgccccagccggcacgctaagcacagttgcaatttccttagccaagcatggcgttgagatctcccggtgggcctgaaacatgtacacttaggtctttcatttttattgatcctaaagtcatatatataagtcatatatatattcagtgttgtggaaaacataattgagatctaggcttatggtttcggggaatttcagtccgctgtggtagagaaggcatggcagccggaattgcttggtccatgctggcaggggcacagagaggtggggtgcaccgtgagggctgagcggcaagtgccaagtgaactgggtgggaagggaagcaaggctgggttatcacttccaaggccaggagtcacctctgaacagctccacgacctattagactgcaccaagagctgacacacataaggaaaatg

SEQ ID NO: 49 - DNA, 86925 bp, Homo sapiens
attttgtcgccagcaggcctgccttataagaactcctgaaggaagcactaaatgtgtaaaggaaaaactggtaccttaaagatcatcaacactatgaagaaactgcaccagctaatgggcaaaataagcagctaacatcataatgataggttcaaattcacacataacaatattaaccttatatgtaaatgggctaaatgccccaattaaaaggcacagactggcaaattggataaagagtcaagacccaccagtgtgctgtattcaggagaccaatctcacatgcaaacacacacaggctcaaaataaagggatggaggaagatttaccaagcaaatggaaagcaaaaaaaaagcagaggttgcaatcctagtctctgataaaacagactttaaaccaacaaagatcaaaaaagacaaagggtattacataatggtaaagggatcaatgcaacaagaagaactaactatcctaaatacaccacacaataatagtaggagagtttaactccccactgtgaatattagacaaatcagtgagacagaaaattagcaaggatattcaggacttgaactcagctctggaccaagtggacctaatagacatctacagaactctccaccccaaatcaacagaatatacattcttctcagcaccacatcacacttattctaaaactgaccacataattggaagtaaaacactcctcagcaaatgcaaaagaatagaaatcataacaaacagtctctcggaccacagtgcaatcaaattagaactcaggatcaagaaactcactcaaaacttcacaactacataaaaactgaacaacctactccttaatgaatactgggtaaataacaaaatgaaggcagaaataaataagttctttgaaaccaatgagagcaaagacacaatgtaccagaatctctgggacacagctaaagcaaggtttcgagggaaatttatagcactaaatgcccacaggaaagaggagaaaagatcaaaaattgacaccctaatatcaaaattaaaagaactagagaagcaagagcaaacaaattcaaaagctagcagaagacacgaaataactaagatcagagcagaactgaaagacatagagacacgaaaaacccatcaaaaaaatcaatgaatccaggagctggttttttgaaagattaacaaaatagatagactgttagccagactaataaggaagaaaagagagaagaatcaaatagacacaataaacaataataaaggggatatcaccactgatcctacagaaatacaaactaccatcagataatgctataaacatctctatgcaaacaaactagaaaatctagaagaaatggataaattgctggacacatacaccctgccaagactaaaccaggaagaagtcgaatccctgaataaaccaataacaagtactgaaattgaggcagtaattaatagcctaccaactaaaaaaatctcaggaccagatggattcacagccaaattcttccagaggtacaaagaggagctggtaccattccttctgaaactataccaaacaagagaaaaagagggactcctccctaactcattttatgaagccagcatcattctgataccaaaacctggcacagacacaacaaaaaaagaaaatttcaggccaatatccctgatgaacgtcaatgcaaaaatcctcaataaaatactagcaaaccgaatccagcagcacatcaaaaagcttatccatgatgaccaagtcagcttcatccctgggatgcaaggctggttcagcatatgcaaaccaataaacataatccatcacataaacagaaccgatgacaaaaaccacatgattatctcaagagatgcagaaaagtccttcaataaaattcaacagcccttcatgctaaaaactctcaataaactaggtatcagtggaacatatctcaaaatagtaagtgctaattatgacaaacccacagccaatatcatactgaatgggcaaaagctggaagcattccctctgaaaaccagcacaagacaaatatgccctctctcagcactcctatccaacacattattggacattctggccagggcaatcaagcaagagaaagaaacaaagcatattcaaatgggaagagaggaagtcaaattgtttgtagatgacatgattgtgtattaagaaaaccccatcatctcagccccaaatctccttaagctgataagcaacttcagcaaagtctcaggatacaaagtcaatgtgcaaaattcacaagcattcctatacaccaataacagacaaacagagagccaaatcatgagtgaactcccattagcaattgctacaaagagaataaaatacctagaaatacaactaacaagggatgtgaaggacctcttcaaggagaactacaaaccactgctcaaggaaatcagagaggacacaaacaaatgaaaaaatattctatgctcatggataggaagaatcaatattgtgaaaatggtcatactgcccatagtaatttatagattcaatgctattcccatcaaggtaccattgactttcttcacagaattagaaaaaaaaaaactactttaaatttcatatggaaccaaaaaaatgcccgtgtagccaagacaatcctaagcaaaaggaacaaagtggaggcatcatgctacctgactttaaactacactacaaggctacagtaaccaaaacagcatggtactggtaccaaaaccgataaatagtccaatggaacagaacagaggcctcagaaatagtgccacacatctacaaccatctgatctttgacaaacctgcaatggaggtttttgtcctgacaaaaacaagcaatggagaaagggttccctatttaataaatggtgctgggaaaactggctagccatatgcaggaaactgaaactggaccccttccttataccttatacaaaaattaactcaagatgaattaacaacttaaatggaagacttaaaaccataaaaatcttagaagaaaacctaggcaatactattcaggacataggcataggcaaacactccataactaaaacaccaaaagcaattgcaacaaaagccaagattgacaaatgggatctaattaaactaaagagtttctgcacagcaaaagaaactatcatcagagtgaacaggcaacctacagaatgggagaagatttttgcaacgtatccatctgacaaagggctaatatccagaatctacaaagaacttaaacaaatttacaagaaaaaaacaaacaaccccatcaaaaagtgggcaaaggatatgaacagacacttttcaaaagaagacatttatgtggccaaaaaatatatgaaaaaagctcttcatcactggtcattagagaaatgcaaatcaaaaccacaatgagataccatctcatgccagttagaatggcgatcattaaaaagccaggaaacaacagatgctgaagaggatttggagaaatagaggaaatgcttttacactgttgatgggagtgtaaattagttcaaccattgtggaagacagtgtggcaattcttcaaggatctagaaccagaaatacaatttgacccagcaatcccattactgggtatatacccaaaggattataaatcatgctactataaagacacatgcacacgtatgtttattgtggcagtattcacaatagcaaagacttggaaccaacccaaatacccatcaatgatagactggataaagaaaatatggcacatacataccatagaatactatgcagccataaaaaagaatgagttcatgttctttgcagggacatcattctccgcaaactaacacaggaacagaaaaccaaatgtcgcatgttctcacttatatgtgggagttgaacaatgagaacacatgggcacagggatgggaacatcacacaccagggcctttctggcgtgggaggctaggggagggatagcattaggagaaatacttaatatagatgacaggttgatgggtgcagcaaaccaccatggcacatgtatacctatgtaacaaacctgcaccgtccacacatgtattccagaacttaaagtataatttaaaaaatacacatccacataaacacacatgtatatgctacattttcagtcaacactaagaacagatggtacaaagagcacctatcaatcatgtttccaatcattgttttgggagacttttcctgactgtaaaatacctgcttaaggtaaaaaaaaaaaatgcaaaaaagtattagaggtgctaaaaatcacttgcctcatgctacacaaaggttcatagtcccacatagggtcaggcacagagtcagtctctagaggcataaacatgttgtaaaagctctctctcattgttgctaaagggcaggaaatcatcccaactcaaatatcaccttaggcttgaaacttctctccattggtctaaacagctaactttcttatgagggaatgagtgtacttcttattatctagagaaactaagcacaggtgcctatttttgtatttgtttgcatgtgtttgagtgctgtgtgcgttctagaataagacaaaaaaaaacccactgtttattttcttgttgccaatgagtgtcatcttcatacaatattaatgacacagccaagtcaagtggtcacaacttctctttggaaatgatcaagaaacagtaagtgcaggagccacaggtgaaagaaaaatgagtaagaaaacttagaattggaaaatataatttattaacttgggttttcttttttgccacttggaaaatagtattattactactcagttttagtgagggaggaccagtgagcgcaccttttgagaggcactgatacgatggttaattttatgtgtccacttagctaggccacagtacccaaatactttgtcaagcatcattgtacatgtctctgtgactttttaaggtgagattaacatgtaagtcagtagactttgagcaaaggagattacctccataatgcgagtggtctcatctaatcagttgaaggccttaataaaaagagactgacctcttcctcagaagaagaaattctgctagcagactgcctttgctcccctccctggttctccagcctgctggtctaccctgcagactttgactttccaagctgccacaatcatgtgagccaattccctaaaataaacctctctatatatacttgtatacatcctgttgattttggttctctggagaaccatgactaatacaactgggcttaacattttatctggagctccgaaagaagctgaggtcttcaccaaggtattatgaaaggagcaaagggtgtcctaagaatatctgagtgtctgcaaggtgtttaactcgtgttaaagggtttgtgctgggcagaggacaaggtactttttttttttttttttttttttgagatggagtttttctctcgttgcccaggctggagcacaatggcacgatcttggctcaccacaacctctgcctcctgggttcaagcgattctcctgcctcagcctcccgagtagctgggattacaggcacccgccaccacaccccgctaattctttttgtatttttagtagagatggggtttcaccatgttggtcaggctggtcttgaactcccgacctcaggtgatccgcccgcttctgcctcccaaagcactgggattacaggcttgagccacagcacccagacaggacaagatactattttgaagggtatgtgcttcccaggtagagcattacaaagggctcttctggatgcagcatccccgctgcaattgagtgtcctaacttctgtttataaaggggaccccaacaggaagcaccctgagaagtttccccagttagccaccttgaggtaaaagattgagtctggggctccatgccctgctttcacggagcataataaaacttccttaatcagcccacatgaagtatgtgatgctctgatgaacctgcattcctagagagttcactgctccccagaaacaagatcttgcctcaactcttacagtgaaaaatctttatcaagtgtaatcattaaaatctacctcccaaagtataaacactgcaattaagctttacaaatggaatatctggaaaggtgaatagatgatcaataggtacctcagttcttacccaggcctgcctcttgtgggcctaggctctgatgtaacccacgtctgctattacatatttaccttgaggcactgtgccattcccagagttaatcacagacttagttacacacaaatctttgtgtacaagggaacatgaggaaattaagactgttttcaagtcatccaactgtgtgaaggaggctactgacggggagtgggaggtaaaagggttccacaggtaggactctgagctcacagccacagcctcatctcccacatccccccatcactgtgaactttctcatgcctacgtaagtttgctcatgctgttccctctgcctggaatagcctttatcattgtttttccatcttggtggtgaattcatgcttcaaggcctaactcagatgcttttctgtctgccaacccctcttcaacatttccagtctctatgaaagactgaagtgaaaaatgagtgagcttaatggagatcaaaattatctagaaatgtaattaatgcatttatatggtggcatctttttatgtagagggtctttgttccctgtctttatgttgtggctatgtatttgtttttctaacacaatgacatgttattgtagtgatttccaaacatcagggtttcaaacaccacctacaattgtgtgtcataacggtcggccacctgtcaaattatttacttactttaaatatatatgtttttcttgacttgatgttcttaagacttatatacatacattttaaaactaaactttaaaatatcttttttaaatatagcatcatttgccttaaatagaagttttgcttaaaagcaaattccataaaaacaaaataggaacttctgtctggaaagattttggacttgagattcactttttggttgttaaaacgagaggtttttgcaacacaaaggataaatgtttgaggggatggatacccaattctccatgatgtgtttatttcacatttcatgcctgtatcaaaatatctcacgtgtcccataaatatatatacctactacatacccacaaaaattaaaaattaaattaaaaaataaaataaagagagactaatgagtgctagggaagcactgaagacagactagcgccaaactgagactttctcctttggagattcaggatcagaaagggaattgtaaatggaatcatctctatacttaagtgattctttaacgccacgtctttgaccaggggtgttataacccacattttgaaaactaacatgatagaaatactgcagaacagacaaggagactgggtttgaattctattttgtgagcacctaaatttgtcttgcttctcgagaagtcatttttctatcctccaacagcccctcttcctggtcttatttttcttataaaatgaggaggttggttattttactcttaaagagtttgtgcaatttttatattttacctttatcatcatttgttttccagacttgcattcattcaacaaaatgttttgagctcatgcacccggagttaagtgctgggaatatggccatgaggaatccatccatgccctgatgaagtttatgatctttctttcccccttatcaatcttcccctttttaaactacagtgagttgaacatctatcttacttatttcaaaagacttaataaaactaaagataagtgtagcttaaaatgtatttaaatccagagctttcaaaaaaaaaacccactcctgccagaacgcatccacggtcaagagtgcagtggcagtttctcagaagtccactagagggcgcgcacatttttttattccccaagaaagcatttatgtgggtcctgcccctgaagtttggcgttggtgtctcttttccccacattttatgcaacgtggggcaagcgtgacgagtcctcaagttctctcactccaccaacccatccttaccccatgccgtgacttctcctctgccataacgaagaattactttgctcacacaaccacaacagtttcgtttctgtttccagtatttgcccttttgacattttagaagaaataagatccaagtttgatgttgaaaagaaagcattgatttctttagtgagaggatttctcctccctatttctgttttccctagtcgtgggcgaaacacttctttaaggagttagagcagctcctttgagcaaatcttcctggggaatcacaggaatctttctgagcagatgttttggagctgacattaggccccttgctcggcagcatgttgagtttttgaggccctgtctttcctctgagttttatattctgaattgacaagttcttgacctccaacattagtttgagcaacccatgaccaaccctcctcacaaaccatgatccaaaagaaacatccaatagtttcccccaagttctttgcctggtggttgccctagaaccttaagcctcaccctttatttgattccaaaattcccttacctccaaatgtccattctgagctttccttgggagtaagcaaagacattcatgaaataaattgtaaatatgccctattgtacatggatatgaaattaccttttggatgaacgcctctccagttaacacaggaaagactgggaacatggcttgagaagaaaaaaaaagttggggggaagacagggagggcctccttgcccaccccacccctgctttctgtgtaccttagccagctcaccctttaaggaaatgaacaattttttctgtgtgtgtgcgaaaggtgtcagaagttttctgaggctgtagctttatgcaaatatgctactcaagaagaaggctttaggggagagttatttatatcccacaggcattacacatgcaaaaggtgaaactgtgaatctctgaatttccaggagtggatgttcttatgataagcacatccttgcggttagctattttggtggccatatctcactgtcagatttttgcaggcaggagactacataatcattccatacttttataatgaccctagatgtttctctccaatgggacttcataacctgaactcctcttgggctttagatttactactaccttggatttgtagtaataggtgcattcatttcttttactcctaaacaggtacatcacttagccattaaaaagtaatctggtggcatgtttattgctctttcattttcatattgactcctggaattagccaagaaaatgaccttttctctaggaattattgccctgatccattgctggctcaccctgtccaaaaatatagaccattctccaaattgaaatatacattaatcacctcaggaaattgcttcccccattggaaactgatagctctcattggaatgtttccaaagcacagctgatgacaattacgactcactgaaatttcagttttctttgattgtgacataaaaactaggacataaattaaaacctaattatcctttaagggtaattggggttacaaaaccgagagactgtgagtcagtgtgtcaatatcgctggagtacagcatctgtccccaaaacagcctttcatatgaaatgcttgtggataaggttatatctgtgcaccgagcatgccaagagagaacatcaaaatgggtgatagacttggagacatatagttagcttctaggacatcttggaacaattaaagtatgctaaaactgcagtgggaaggggttaaacaaagtcctggccttcacctgtaatggtgtccaatgttggaacaagaacttagcaccaagactccagccagtatctgactctccaaacttggttaaagaggttttttctcatctggaagacaggtgagatcagctctattgttttatacaatctacatcctcaaagtctgtaagagaatagacatttttcagaaagggtgtgatccacaaaaactgcagaaaagaaaaagatttgtcacaaatcaagtgtacaaagagagcttattaaaggaagccacggattattattaaatgcagggattactcacacatctgcacatgtggataatccctgcattaagaataatccagggccacctactaggccacctcttgatgatacctcttagtgtgctctttgggtcaaatcccacccactgaaatttcccaacatggtaccccaaagcctctcatgacacaatctgcctccctcattttggattttccaaaagattttactcccctgtcttcccagagaatgtgtcactccctctcattgtgcactgttcatgtttttaaaagagcacatgcccatcatatgactgtgaagttttcctctttgtctctgacattcagctgaaagcccctgaagggacttgaccatatcttattcctctttgttttcctagggatgttgtagttgggcacatagtagagctcacaaaatgttgctgaacatagtgcaccattgacacaacataattccagatttctaactttgatttctgaaaggtaaacattgctacaatgtattaaccacacagaagactcaaacaaacccaacccccttccaaacaaagcaggtttgtttgttttttgttagggcacccacttctacaaacaaatttctggccccaggataacacaaagagccagagtaggatttcaagcagaactgtgttttcagttgatgtgtcagtcccctgagagtcatgtggaaaaaaaaaaaaagaaaaaattcaaggtccaggttatttccaccactcctgggaaaccaggcctggagagctctctagggaaagaggtatgtctgctctgggcttttgcaaccttattttataattcactttcttatctactgcttcacaaaaccaaagggaaataggtacaaactgtatcgacaaaagatcagaactgaattctcaatggcaaaggcaagtgtacattataaatagcaaaacagctggcttggaccatgttgccggccagtcacccagttgagggatttgaatgacatcataaccctcgagagggtattgctagccagctggtgttatttagaatacacaaaaatcagagaaagaaaacacactctggcacacagactccctctgtcatacacacacacacacacacacacacacacacacacacacacaggtttgagttatatggaaaattcaaacaacaggaaaattgtttgccccccaggtacccttctcccagagtggtggggtggggaggggacagtgacaggcagcctagtagaagaataaagaaaaatgttctatttcagttgggttttacagctcggcatagtctttgcctcatcgcaggagaaaaagtatgagacagtgccctaaagggaccaatccaatgctgcctgcccctccataggttctaggaaatgagatcacacctctcacttggcaactgggacaaggggtcacccgagtgctgtcttccaatctactttaccccagtcacttcagggttaaaattgtagagtttgctggagagggtcttatcgtcctttctttctttttttgttttaaataatgcatttgctctagaatctaaaattgctctcccatcccccatattcctttaatactggtaaggtgtattagcagacgtttgtgtcttcatgcccagcagaaagttaatcagaaaacagatccttattttctatggcagcataagtattttaatgtctgcgaaccctgtcactaacacacattcttttaagggaaaaaaatgcttctgtgctctagttttaaaatgcaaaggtatgatgttatttgtcaccatgcccaaaaaagtccttactcaataactttgccagaagagggagagagagagaaggcaaatgttcccccagctgtttcctgtctacagtgtctgtgttttgtagataaatgtgaggattttctctaaatccctcttctgtttgctaaatctcactgtcactgctaaattcagagcagatagagcctgcgcaatggaataaagtcctcaaaattgaaatgtgacattgctctcaacatctcccatctctctggatttctttttgcttcattattcctgctaaccaattcattttcagactttgtacttcagaagcaatgggaaaaatcagcagtcttccaacccaattatttaagtgctgcttttgtgatttcttgaaggtaaatatttcttactctttgaagtcattggggaattctatttaaattgtgtactgtttgcttctgcctagaactgttcttcactttaaaattttcattgtttcggaaccgagagttatttataaattgctgaatatgcaattctgtggaatctgaaaaatagctcggggagatggatgcatttgcacagatatctgtatgagtagaaactattgcaaggtacttatgctaaatcctccacttctgcagggcttccgtggtgtcattacagaagattcctttaaatcctctctatggctaagggctatagagcatggatatgaacttggggattttttttttcttttgcaggtgcagatgttttatttttaagaccatgttcttttgcatgtgtgtatgtgtctctgtgtgtatgtgtctctgtgtgtgtaactcatcaggactttatttacaaggcatgctatatatgaagggttgtattttagatgatattaaagcttttaaatatgatctttggagctaaggtcccggaactctgcacttatgcccagagagagtgttaaagttagagtaaagtgtaatttgttcttccaaaaaagaactccttgacaactcttgctgaccttgcatatttgtataatttaaacaaatacatactgtatatggaaagcagaaactttctaagagctgcttgcccaacttttctgtttagaagaggactttcatgggcaaagtttggacttggggttctgtgttataaaactctgattttatattcagtgtcgtgaagtccctttaggtaaatctggctgctgctgtcagtgcaccgacttctcgtttccgattgctggccgtagttctagtttccattctcagcaaaattatatccttcaagacttgtgtttttttttcaatttgcaagcgcttttaagctgctgtcactggctccaccgattcaattgcctgagggctcaattcataagacgtctctgccacttagtgcagcattcagttgctgctttcaaacacttcaccactacgactttccctagtcaagtaagtggctccaggagttaaagatacacccttgtcaggcacctgattctgctgttcctgagatgccaacacatgcaggccaccttgctttcaaagaaatgacgtcactgtgcatacatactatgtgatctagcagctggagtttttgtctccttacttaggggatcataaaagaggctgtggagcgttatctctgcattaattacaagttaagaaaattgtttccaaatgcacttttcatgctgtgtatgctgaacacttcagaagtggagctcttaataagttgttacttttttctgtacttgaagcaggaagtggtttgagggagctgcgtggtctttcacatgtaattcagtgggtaaaggtgtcctgcccagaggcagagctcaccagctgattgtactctgactctcaaggtatttccaagtgagtgagtcgggggaagggagtaagggagtggactggagcttgggtcactatctgggctgctacaataggcatacaatggaaataggtggcttgactggggggaaaagattgacttaaatcccagctgtgcaatttgttcattgtttcaatggacaaaaggcagtttacccaggctcataatagcatacctgcctgggtgtccaaatgtaactagatgctttcacaaaccccacccacaaagcagcacatgtttttaagacttcagttttctattcacatcggcctcataatacccaccctgacctgctgtaaaagacctggaacaaacaaaaatgattacacctacagtgagtattttcttatgactgttgccctcaaattttacagggcattttcattgtggcccagacatctggaatcaattaatattccatttatctaagattaaaaaaaaaagaacttttaaaatttgggtttgtgaatgatttttgagaaagtgttttctgatttttttttctttttttctcatgtctttctgattcttcccttttttttctatcatatctttcctttctctctattgatttcttttgtgtttggcaaaataaaaggccaaggaaataatgaacatatgggaccacttgtttcacactttaaactcctaagcaagttcggtattgttttcatttgtgggaacataaaattctctggttctctgtgggtgtactggactgttccctacactaaaggaaaatgcactagaggttctgtcttgtcctagaactgtaagtactgagatttatctgacaatataactcagcaaaaaaaaaaaaaaagaaaaagagaaatctatttaaaaaaaatcttaaattcttaagttccagagacttatatgtatcgctgcacttaaatgtgttatactagaactattaaaaatatagttttgacatctaatgaagtttgaaattcactaaggctataacttgagtaatttttttccctggatttcacaaaaactgaagaacttgaaggcatctacagttgcaggtgcttagccttcagcattgctatgaacgcaacaaagaagggaggggtggagaaataggattcggtagaataacatactttctagaactggcccattcccgcagtgtgggggtatgctctgcaagatcaatcacaggtttgttcttttgaaaaatgccacgaggtccaggtgggttggatttgttgaggtttccaatggaaatattgaacaggaaaaccccactaattttacaaccaaaaaaaaaaaaaaatgagaactggatgataacatgcttcttccagtcccagtgttttgggctatgtagggggtggaagatttccatgcggagatcttgttgagaaaaatgcagtaaatgttcagttgagcttttacctcctcttctattttatgtccattatttatgatcatttgcaaatagagggcgcttttcatcttcaactgctttacaaccattaactgaatatttatattttgttaacgagagacaggggttttggttttttttttttttcctcagttgctgaggtgaaggtctgactacaaaaaatggaaatcatcattagaatgatggggaaaattttgccactgatatagagccactaaattgagagtccatggagggcaaggagggtagtcagaaaataaatgactgtttctccaaaagtgatggggttgaatggacctgccactactctgaggttcaaaaaaaatgctcttcttataattatagcttccagcatgactccacaacccttttaatagcgcccctcacctaacaccctgtcagggactcttcccatgatgctgaaagtagatgcatctgagagaagtgaagccactcaccttgagaggcttcttggaaaaagccacatctttgtgccacaagtaacaatatggaaaaacttaatgatcatcttagcatggtttctactacttagagtgaggatgaagacttgagccacaggactgctgcttttggcaaggctgccgtttggcagtctatcattgactaagtcatgccaaccaggggtcccttggtatattttgctataaaatagatacagtgacacataagtccctccaagagatgaagccataattcctgtgactaaaaataaaataaaagatttttgccagtttgagcccagtgccctatacacagaagggattctcaacacgtgttgatttgatattggacttgaggccagggactttagaatacaggagtggtttctatttgagccaatttcattcttcgattctcatatttttttctgtttctgttattttcttctatttgtggttgtgtcaactgctgatatgccccaggtaaggaatcagtctctctctctctctctctctctctctctctctcatattgaggaaacaaaacaaaaacaaaaccctgtgatgatatatagtattgtcaaaagccattttttggccatagtaaattatttttagtcaaaaatagggaatgatgttttggttaaaaatattctgctcaataatgaatgcatataccatctatggatggccaatattgagagaatttaaattaacaaaacttatttggccccaaatctgtactgagcacaatttaacctttgataattcaaaagttctaccagggtctcagagtgatatgggatcccactgtaataatagcatctttcatttccgtagtaaacgtttctagatattttgtctcaattcattgaaataggaacccataaagaaagggttcagggaggactcctccaaagatccacagtagccaggggaataaacacaggttgttggatgccgagacacgctccatccacaactccctctgggttctcatgtactctattggcttctgtgctgggtagtcctgattaatgacagtcgtggaatcgtgggagtcaatgcacttctgtcccaccccactccccttgcaaggatcaaggaggaaacctgaccctccctctgtttcttgggcaggtgaagatgcacaccatgtcctcctcgcatctcttctacctggcgctgtgcctgctcaccttcaccagctctgccacggctggaccggagacgctctgcggggctgagctggtggatgctcttcagttcgtgtgtggagacaggggcttttatttcagtaagtagccctccctctcaatgtgctgctcaagtctaaagtgtacagctctgtggatttacaaccgcagggagtgtgtgaataactgaatgagtgcccgtatctggcagccatcctaggcctctgagattcctcaccttaaagtaagcatagtgttttggcgggactttggcaggttttgcagatctaggatggaattttcctccttaacaattcgtctttaactacttcctgctaagccttctttcaactattatgatccacctcactattccattcctttcaatgaaaggacaggacaaaataaccctgaggtattgatgtttttgttttcaaaacctatgggcgcacatataaacatatggaacacatgcagggctgctttaagtgctatgtgatttggagtaaaatagtaaggactctccagtcatgtggatctgggaaaaaaaatattaaagggcatatcctagatgtctccattcaatatgaaatcaccatgaacagacagaaggttaactccccttaaaggcaggcctgtttgcaaatacacagactgtctctaaatgcaaactgaaatgccatactgatttgccctctatgccacttgaccttgatttttttgttgttgctctcttttggcatagttcttctccgggacccatcaatgatatcaccatctggaaaagggtctctgacaagtacagaatcacttatctcttaaatagctcttaggtgattagaaagtcaacagccagtaaaaagtagacagccaagtcaaggcgtataaataatacacacaagcaaaagtcaatgattcctgtgggaactgatcacttaaagaatctagctcccatgcatctatctcactgtatattataggacagagaaagatttaaagccagatgcttgttccttataattctttggagttttagagagttccaggaaactgagcatgagtcattcttaaaggttcatatcactccagtgtagacagcttacctcagttacccactatgctttgaatagctcctgtgatgactcacacacttgaagtctctctcatccttcccaaatgtcagcctctctctaggcaggtggggtatgtgtgtgtatgactggcagggtagagggtggcctgtgtataccagtctggagatcagtaagggagatgggaagaaagaggcttgtgagggtattggcgatcagtacttacagtggatttggcaacaaatagtttttaaatcactagtgacaaagaatcagaagtgccttctactatttgaataggcaaattcccactatttgcttccagccagtcctttaattgaacgaactcatttatttttctggcaataaagcaattctatccagttctctgttgcagagcagatgaatgagtgcattgggtgagtgattttccaatagcagacttgttttacctttaaaatatcctgtggaagataactgtgggacatcacatgatccaacagtgggtcataattattctataatttgcagctactgatcctcattttttaaagaaatgaaaaagtggttctcacttattatgcccaaggggactttttttttccttgataatccatttgtgcaatttcctttgatccagttcactaggtaattgccaagcctagaagtgtcctctgttacgtgccaggttgaattgtgatgttcaacacgacattgctccagaatttccatgcacagtgcatgaaaactggatctttctatgcctatgatgtttgcattaaatgatgaaaaattagaatggaaaaaatgattgttcctaagtaactgtatgatacttataagtgtttgcacagacacttaaggatattggacaactaaaatggaaaccaatttccaggttctcttattctgttactgcaacaatcaaatttcagcaaatttttaaaaattgtatctcaataacttgaaaaggaaatgttatatatagcaaatcttgattcttactatatgactttagctagaaagtggctttgtaaatcatatgttcttgtcagtattgtcattgaaaatatgtgtgtcatgagttttgccttatagaattccatgacttatgttaatccgacataccctcatgcacagaagtgtccaacataccttcatgcccaaaagtattcttgctaactttctagtcaactggacaatcttatttgcccaaaagaaattagtccatttagattattttcatgtaattcaaaacattgatggagcatctgttatgtgtaagcattgaatgagatatgaatgagatgcctagaaatgaatgagagattgaccttgttttcaaggggcttacagttgagtggtaaaagaaaaatgcaactaagtattattgtcataagagaaaaataaccatggagaataaattatatcctttatgtttttcttgaatattttggtctaccctgccaagaataataccctgtcaatgggcttcttgatgccaaaggacatatttatttacatttgaatccaagtgtctagctcatagcctggatgctatagtagctgcccatatttgattgttgaactgacaggattgaattgaattgaattgagtctagttgaatccaatcgaatagaatggaattacttgtttgggatcttggtcttaagaaccatcaagaattaaggttgtcaagtactgtggacaatacttctcacctcatggttatctagttatttaataaaactgcttttatttttttttgaactgaaaaaatatatactaacaatgacttagaggctgctgcattttggtcatccccaggctacattgatgtctgttttgtgtctgagccaattattcctacaggcatcaattgttgtcaacaaatttcattcagtttccttttcatccgctgagatttactgtgtgtggagaagtcagctctaagcacatagtctttgaaatactttttagagggaagcattcttccccacctctatacactgtcagttgactcctattattctctttacacttattttcaaagttttattgtggctgtgacttttattttaaactgcttcaaatccattttggaagtacaatttttttagtagtagaaggcagtttctgattttagtttgaaattcaaacatctaaaagaaaattgcctccatatctatcatttttgtcaatctgcaatatttaacaaggagagtttttttttaactctattagaactgttctgaataaaatattttgtaatgcttactgtgtgtagattgacccaatgatgtgaattgagctcatattccccttcaagcccaagttccactacagcaagtgaaagcaaccttctagattatctgtttgtgaacattatcccatcataaatggaacagttcatgtataattaatgcagcttccctagacattttatgaaatgaaagacccaatgaagagctaattactcattctttcctatgcatcatagggaagataggagagcctatcagccagccttgtgttcttgcagtcctgtgagaaaaatggtggcataatggagatgaaagcacattgggaaggagctagcgattttcttactagattgatggagcccttataaagggtggctcattacaacctcattttgcatgaaaaacaccaagagaaaaagagcttcaaatgaaataggagaagtgaagcttaccatagatataatttttgacagccatggtgattaaccattttaacatgctgctatgggcctgtggaatttctctccttggagattcttaaaaaattgacagacaaccaaccatcttggatggtttcaattaagagcaactgaaagaaagagagtttctggggtctttttaagttttaagagtctataaacagtcccttaaataaactgtatatgctttaccttggcggtctggggaaatggagaagtaaatcaattagaaaagccaagttggatattctttcagctcttcaggatttatagcttttgtaaaacatacttccaatgtatagttattaagaacaggtctgaataaacgaatggcattcttcatgggttaaaacagactgttttgtaagagctttaagtgaaactttacaatgaactttcattgttattgattgcaacaaccttcttagatctaggttattattattaagtcaagcttctttcctttgatatatactgcccagaaaactactcccagacctgtcgttcattagttgtaggagtttggcaggcatttaaacttcctgggtctaaacgtccttgtccatagaacaagggaattttattaaaataaatgacctcttctagctttaacagactcatagtctaggttgtatttaacaaagctctggtgctattcaagaaagaacaaccttggatttaagtagtgaccaaataacatttagtctcttttatcttatttacatagtttctgttggtccccagagataggagattccacccagttaaagtaagaggagccagattcttcgttttgttttgctttaagctggatttcaacccctcggggatggaatagaagcttagatatgaccaaatacatgcaggtcttttggactaaggagccaaagaagcacacgcttcatgaaaacagactgtcatttttctttgttaggatagacccactgacagttctcatctttacattctctcactctcctgactgtgaggtcaagtgagtatgtacatttttagatgccctttattaaattagaggggacaaataagaatctacaggtttctaaaccttcaccaaaagcctcttcccagcctattaccttttcaattaaagaagagagtgtataattggtgaatttgacatcacactcacccaccattagcattgttttgagtggggctggatttgagttgcatcattttcattccttttattggtaccccttagactgcctgctatgcatctgtgtgacagctggtcaaagttaggggtacagtcactagctgtgggaaagcttttctctttgaaactaattggtacatgtggggtttgaccttatgaccctggcctcattagtaccactaagctaataggctacagatattattaaagagaagcaatgtgtttttatattgaccccaaatgcttgttcctgtctttaaatagtaaaggaccagtttctgcaaccataggaccactaagaaaatgatgcaaaattagaaaataatttgcatttttttctgacatgctaatgcccttcaagaccatctccctcctgatggagagttataaacaggagagcgaagggttcaagaccaagggcatggcctctattgccaaacacttcaggtttgaaccccagctctgcaacttacttggtgagtgatcttgagcaagttatttaacctgtttgttcctcaattttctcatctgtaaaatggggcctgccttatagagttggtgttaggattaaattagttattatattggaatatgttaacttagaatattgcctggcacacagtaagcaccacatatgtgagctattacacttaattattctcttctgagatcaattgcagaatctattgccaatgctgaggtatatgaacggcccaattaattacacactcattttctctccttggcggcagctgattaaaaacctattatgagtagtaagaattatgtagtagtattagtaataatcacatgaagaatgttatgtttatctagtatatttactttttcaaaatccagttgtatcagctctctcactttgtcttgactccacttttggtgggcaaagattattgcttcatgggacaaatgagaaatgtgagacatgaacattttgtaacttaccccactgaatggttccagaaacaaagctaggttctcttgcctccaagaagtgtgtagcatagggagatgcttccaaaatcccagtagtcttctgggagataaggagcaagaatcccagggtgactaaattgattttgaacactttcttgaaaagaggcatgagagagatatctatgtaatgaccctatattttagcttctggaaaaattgaggaaattctaagaaaacttcctcaggatgcacaagaaaagtcttcttttagaagaggctaattagaggctgctgctgtacaagacccttcacagactgaattcagacagaacactgcaactcacctgtatacaccaggatatgcagtaggatctggggagcttctcttctgcccaacttcaaatcttcttcctcttcctgcaaacctcaagtgcttcattacttgcaactatttgtttaattggtctttctcaaagacctactaaaaaaatgctgtttaattggaccaaactttttcttggggtgctattagagtcgtagtaatgggaggtggtcacagacaccataatccaggcaggaagaaacttccccaaaataaaggagatgtgggagcagccagtggttgggatgcaagaccgccacctttgctggtattactcaacgagctgtttgaagaccattggtattgaaatgtatcctatctccagtggctggtaggggagacattttggatccaggagagaattttggcattctgctaattcaatgggcctccaatactttgaccagacatcttgtgtcgtgccatcattgcccaagatctccattagagctgacttcatctcttcagcagccttccttctggttttacagcccacaccacagattcagacacagtgaaaatagccacaaggtctctcccaaggagatgtctcattgttctcgataacagcctgcaagggctttgctcttttgtgcagccagacatctttgacaacccatggtggcaaaaaatcgttttcgcattgagctgccgccctggcagagttccatcgtacacctctccatgagacatcccaaagaattactttaggttgcctggaaagttcaaacccccaggccttattagctgttagactaaggagatgacaacacaacattttgtttgtctttatctatacatgagatcatgtttaaaacatagcaaagaggtgttatttgacaagcaattccctaactgcagtaagttgtatgcctatttaatgcattgtttagtctcacattggctaaagccacttaaagaagcacttggcaagctctagcttttcattcttggcatagctgcccctcttactttttcactgaaccttaaataccaagaaaaacccttcacttactttacatctggcatattgctttctgcaactggccagaacctttgcatgtggccctctgcatttgtcctaaggtaattaatggctttgcaatatttgatcatcagcagcacagacacaaagagaaattgtgcaaccagcagagaccaaacagcctcttttaaattaaaatcttttgcattaaatgctcaggcattctgcaggaataaagatttccatgccaaaaaaaagaggggtcaaaaagaggggaggaaatacccaagaacctgattattgattaagtatacatctctgtaatctctccctcttaaaactacccgattgttcaaagaaaataaaattgaagattgctacaaacttagaagtccttgaaaaataaacttgtcaatattatgcaatctagtcatgtatcaaaactgcacttttaccccatacattcatgtacatgaaaatgataataataagaattagccaaatgctgactgaaatccagagagaagtgacatgtgcaaagtcacacagctaattagtgacaaagggagaagatactgtgattctcttttctcatcccactgcagtattcctccatttagcaacaattagccatgtctgtgtcaaagttacctggtaaattaaaatgaccaagagaagccaccaatcaaattcatccaaatgagcatagatcttgttggttccttcctttcaataaattcacctgagacttaggttaacacttttgctccctcgctgtggaaatttgtacaaactaaagtgattccctgcctgtctcctatatggtgtgcaaagccttcacatgtactttgggcattccgtccacttaaggtcataatttgactattattgtatattatactattctgactctatggtcactctctccaatgtcaactttggtagaaatgctttggaatgacttagcaaagctgcgctcctggaaaatctgaaacagtctgacgagttgttggatcagctttttttttctggagatttctctgactgtcccaaaccaaaagaaatttacacctgatttttttgcagactcccaagcaaatactctatgaatctcttctggttttcttctttcatctctggtctttatgaggtactaaaaggctctttgagggacccttttaaactttgaaaatttgtcagacatagaagcaatccggagagtattgctgggaagatggtactacctctgtgccatttaccctgatgaaatgggtctttcatcagaggcaagtgatttagaaagtctgcactgagccaacccacatgcagccaactcctgattacctgtaaaactggggaaaggagcaccaagacttagaattctggattaaatggatttaaggacactatagatttttcttctccctccttgctgaacctatccccaacctctttatgagaccaagtgatgtgggttttttcattttggtttttgtttttttgagacagggtctcagtccattgctcaggctagagtgcagtggtgtgaacaaagctcactgcagcctcaacctcccaggctcaagtgatcctcctaccacctcagcctccccagtagctgggaccataggcgcatgccaccacagctggctaacttttgtatttttttgtagagatggggttttaccatgttgcccatgctggtctcaaattcctgggctcaagtgatctgcccgcctcagtctcccaaagtgctggatttacagtcatgagccactatgcccagactgttttaaaatcttaccttattctcatactcctcagtcaactttccccaagcgccattggcaacagagtttttcagcctcaacactattgacattttgggtcagactattttttgctgggagagggagctgccctgtgcattatacgataactagtaacatacttggcctctatccactaggtgccagcagtcccttcctcccagtcacgaccatcaagaatgtttgcagacattgccaaatgtacccctgggggcaaaatcacccccgagtcgagattcctagactagacaagtctccagaagagaggcaattagagagattggaaaaccatgagtgaaagtaacacatcaattctcagtcactgtttaatccagagcctatggtccattgcctggagcaagccatgagaagagtcattgtggttttgaaagcttttctctgaaaaataaaagttcttcctataggctatttaaaaccttttgcaggccttttctttcttgccttatagccatggaattcatgtattttagtaagagaaggaagggcaggcagaaatggttcagagtagaaccctgtgcttagaagtttgattgagaccacctggagcaaattaaaaagaagttggttatctttatttatttatttatttatttatttatttatttatttatttatttatttgaaacagagtcttgctctgttgcccaggctggagtacagtggtgcaatctcggctcactgcaacctctgtctcctaggttcaagcaattctcccgcctcagcctcccgagtagctgggatgacaggcatgcaccaccttgcccggctaatgtttgtatttttagtagagacggggtttcaccatgttggcctggttggtctcgaactcctgacctcaggtgatccgcctgccttggactcacaaagtgctgggattacaggcgtgagccaccgcacccagccagttgtctttgaccttaacatatgtggctgttcccttgtcaggcacataataaataaactcaattcctcacaagtgaaaaagcctggttcaaaggtaatgaccaaatttttctccttttttcttgtgcctttcctatctgagtcctatcacagtcattcaattgctcagaaacagtcagaagttccccatttgggcctgacccagctcccctactgaacagttctatgaccttggagaagtcacttaacgtccttgagccttacatagcttatcgtaaaatgggaataaaaatacacttctgagttgttctgaggctcagctgtagaagtgctttggaaacgaagggccatccaaatagtcacaactgatgaactgaattggatgctttttgccttgtatcccaaatcatggctcacaaattagatcaatgccatgatttctgtaaaaccttaggcaacaattataatctggaaaagttaatttggcagtgtatcttctcaacctcattaattaaaaaagaaaagcatgttgctgcctcctgttcacatatcactttacattgagaccacccaagagttaattaatgtatcttcagaatgctcactcagtatcactatttcctctcattggaagaagcagcaaagagatggggcctatcattttaccacactgagcttgcttaaagactttgttccccacgaggtgattgggtagtcactgagagatatcacatataggcaaaagatttctattctctcaagtcagctattggtgatttctgcttagcctcaaaaagcagcattcagcagaggaaatgtactcactaatcagaaaaagtatcttcgcactctcaagttgtacatccaaactgttttcttatcacagcctgacttaggggaattaaatttttttgtttgagaatggctttgatgaaatcaaaattgtgagttttatcaccatatggaccagtgaccctgtggttcttctatcccaggggcctcacatcccatggctcccagagacacaacatttgatgcagttgtaacacttttgaaccacacaatcaaatactggctactgctactgctgctactgtaaattttcattctctctattttatcttgagctttttcagaagaacacagactaagttttaagggttttcccccctcctgtttttcacagcatctagtatggagcacttaataaaatttcttgatttgatattgaaaatgtcattccaaaagctatttccttcttccagtccccagaatatataccatgacttacaatttgctactgacatcattttggatctgagattgaagatataggagaaaaaagtcaacaagtctacttgagatgtcacctcttaggaccccttcaccactgctccactgaaaatgcctagctcaagattaagctaactctagtcaacaggtaattttcaaaggctactggaccctcaccaataaggtctacttatgaaagtgagaacagaacctccactcagttcctctctacttctatgtgagttatttaaaaggagtagtgttgggcaagggaaggtatgcaacaactggtacatccctggctaaggtatgaatcacagctggagcaccagcccttagagaacactacaagtggtttctatttgccaatgcagaattgaaaaattagagagctagaaagaaccatatagagcaatctgatccagtgctctcacttcccagatgaaaggaccaaggtccagaaaaaacatgatgtgcatgaggtcacaaaagttggtcggaaaagctggagctactggtcggaaagccaaggctacatttcagtcacctcatgcttggtccagagctctttgcacagctggaccctttaaacttaacctcaataaactcatatgagggtagtgctcataaccacagtccatacactcaaagtgaactgctatgtcatattcttctggtgtaacacctcagaatagtttctagaaaattaagctcttagccattcatgaaatcttcatttactaatttctaccatccatcggataacatcatgaagtctctttatcccaaatctgatcgacctgactgtaggactgtgtaccttaataaaccctagtagtttgagggattggaggcttacaaaagaaataaaggaaaaagctgattttaatttgaagtcaagccagcatgttgcattgctctctaactcagaagtgaccccaaacaaaaggaattatcgatgtgttgtctgtcttcacacattcctaacttgctagtcttccacgaagatcttccatgaagaagcttaaattttcctacgtagtttgagttttatgtttctttccattaaagtttccagccgttcatagacatatttagtttggcagaaggtagtggtgactcacggaatgaagaaatttgaaggcaaagctactgaaaatggatctaatttctttttggggtaatttgggagcgagcaattgataatttgtctaattttcctggtttcatcagctgccacactgccaaatatatgttccatatggatgctttgttattcctgaaacatataacaaatttcagctgcgactttatctaatatggtcaaagggtaagactattgttggctcattttctcattgtttttggctggacaccctcaatcaatggctattgagtgaaaaaacaggatcatattgaaaccattttcagcatgttgcttcctatggatccaaccatttcactgtgagtttgtcaagcacagcaaatgttctctattaaagggatgactgtgttctcaacatggatgcgactgccagttaattgcattcaccttataattccagtctctcaatttggtgtagagatggttttggctctccaaagattccttcttttctgctgattcttacctcctagtatggaacagatatttgaggatgaattttgagaagatcaatgacacacatacaataagcatcatttcaggcttcccttaagttagacagtctgtgggccctgagtcatatgaatcataagacttgtgaaaggtattagtgccacaaatctggctggcatttctgtagattatcggtgctttgcatgcaattatgaaaatctctcttaccagataagtcagatgggggttcagtaacattgcacaaaagcatcatgatgtgtaagctaaagacaaagaaaggcttacttctggctggttctgaagtagacactggccacttagtgttttaaagtcattcagtggatgattggtttcaatgaatataaatgattttgatctccctccccaacacacatatcaaaaacaacagtaataataaagaacagaaaagtctatctcttagaaaaaccagatttgaaaactggctagggaaagtgttttgtggcaagaaacaatctcttgtatctcttgtttacaacgggctaattggtttgattaacaaattgtctaaggggaatgtatcaatgttgcttaggaaaaacaaagcttagtgtgtgaaaatacacatagacatagagtcttgctactcaaagaaacctgagggctttttagaaatgcagagtcaggggccctgaccccaaaccaattaaatcaaaatctgcattttaacccgatacccacaggatttggatgcgtgttaaggtttgagaagccccatctagagaatggcaggaagtaagaggtacttgctaattcgtggctcacatttgataagacagagtacaaaaagatcaactgtcactgcagatttcaaaaatgatgttaaggtcaaacctgcttgtggccattaacaatatatatgctgattcactggtatttggtccagattccctcaagttggtggaacctttcctcagaggaatgatagaactgctccaaggataaccccatggcctgaccttctgtgaactggaaattggaacttctaattgctgtagctgcaatttccaagcccatcactggggccaggaactgagccccagtccttaagatcttgccagtttctttttcaatagttacatttttcaagaacagccaagcaagagtgcttcaaaaaaagaaaaaaatctaattgcattaagtggacgaatgtgtgttttactcatatcaaatttcatcttttgttatgctcagccagattctaatattatttcttatgggtctgagttaattagttctatgagggttcccactgggattttagagaaatggttttaaggtaagaaaagtctattttggtcacctatcagaaggtgaagggtaaactttaaaactgcttttcaaagagatacagctggcttcgggtctttacgagggtcattctgaaactcaagttccccagcctgagcccattaatgaaggtcattaatgaaggccttgatatctgaagggtgtgcttcttcaaagggacattgtcccacagcagggcaggtaaagtgagagaggaccagtttttaacttgtatttcttgaaatgacaataaaaagaaaggggggcctttggattggagacttagaaaatcttggatttactcagaactctaccactaaataacttggtagatttgattattaatcccctgggtctcaaaacctgttgccattgaaacaatgatacgtaaatgaaccaagacattccacctttgaaatgtgataattgtgatctctcttcccagtttggcagggaaaaaaagtcactaatatagttttcacattgttttcacacatcttttacttgaactttaagaacatgccacttcttgtctatattcttgacaaggataagatagtattggacttagaccaaaactatatatttgatttgtttagatttaatgcatattattttaatacagtgatatccctgactcattggcactctacccattgaattaatgttgacaagataatctctaataccttttccagaatgtttactgctgttcatgaaaatctctaaaatcccttaagaaatctgacggatatggagattattgtttgtttctttgttagtattctctcattccttttgctgggtgctttagtaaaatgtatggaagtaaaattatagctctgcccaatttaattgtagaatcatcagctgggcacctgctctgtgtttagcaatacccaagggagaatgatgccatcccttcaaagaggtttctttgtggggggacccatgaaattccaatcatacaactgcaggcttgagtcagatgggaatagttctcccctatggtatcccagtccacaccatctattgagtgtcttctggttagccaaaactaatgatgaaagaaatgagtaaagcacagctctatgcacatggaattgatattctagagcaatgtcacaaaacgtttccactcccaccccacctgcatctagtccacagacatgttttgtttggtccacccaatatgtatttgttttaattttggaaatataaaaatcaagagattataagcaaaaacaaaagattaacaacttctcttatgaaaaaaatggtgcaatccagcatggctgagcctgcattcttgagtggcagtttttggtcacccttttatgtgaagtgtgtgcccttgcaggcttaatttattcattatatacctatctggctcagcatacattgacctatgccactcctgctccaaatatgcaagatctcgttggatattaactatacgcttgtctattttattacgttcaagacatatctattgcctttgttctatcacatagttaccagactaactgctgctggtttatataaataagacacaaacctcatctttatagaactgtatagccctccccaaacagagcaagggtacagctgagctagaatttaaaagacaatcaagtcattctggtgaaggaagaaggcagattttaaaaactgaacattcaaaaatttagacatcatcaaagggatatttcctcaagagcaagtggagtttttagccggtgaccttgtaaagcaggaaaggccaggttcccagccaatgcaatggatgggttgcacaatcaccctaagtgttgagcacagtggagaccatcaacccaactcttcagacaaaacaagctgtagccttacagtttgttttgcaccgagatccataacagctgttacctatttactggaagatccttccagtcccatcactatttagatcctcctcatcgcccaccaaaactattgcaacagcctcctccatgatcgtgctatgtgcaagactgcttgaggccagccgtcccacccatgagattaatctttccaaagcaattcttatcactttatcccttttctaaacaacatccagggaccattcatggctatgtaaattgagtgagtccaaactccccaatttgacagtaaggcattttacgtaaggtctctatctgactttcttaatgtatccctacagcagagctcacaaactggcaatctgtaagttgtatccagtcctcataagtgtttttgtgtagtgaatacagtgtttttactaaaatttgaattatctgtcagtatttactaaatgactctccacttcatattggcacatgctttctgctttaccaaaaaccccccaccactctctattgccttgctctggtctacttcacttgcctgcatgacttgctgtagtcattgagacattgacttgattgactcaccaagtttacaaatgaccccctacatattccaacatccgacctatgtgacttattaccacctattttattttcctggactttcctctcttcttctctcaaatgtcacctcctctgtaaaatcttctaccagatgtcaaccctctttcctctgagagagagaagcaataatattactcttacagcactttgtttttggtttttttttttttttttggtcagtgttcctaccatctgcttaactataagctctgcaaaggtgagggctatgttttattaatctctgtaagttcccacttactccctcatacactgcactatccatgtctgcatggaattaattgttattcgtttttatgtggccttacaggcctagattagttatgtgtgcctttaggaaggcagtaactcatttgaaatgtagacatggctgagtcggaaggcctccatggacttttcggtattttcaagtacagagtgagaagtgctgtatctaaaggaaactactaagggaatttaggtaaacagaacatgatcctttttgttggaagctggctgtgatctccagattaaaacactattgcatgcctcatgaggagcatcagcaaatcctttagtatgcacaacttgtgttagaattgcaggagtcagtctattcctgggggctgggctgagataatgaattgagtcaatgccaggtagagcacaaatacgctagaaaaaatgaaacagaaagaactccgtatgctgcattcaaaagtgtcaatttctaaagtttctgaataactagaaaggggctcgcattcctgtttgccctgcagaaggattgtcaacaagttacaagattatagaatcaaatctcaggcaccagaaatggatccaacttagtgaattttgactggaatgaccagttgcaaaatattgaccaagaagaagaaagtcattatttttcaatgtcattaaattcagcaatgttttatggataactgtgtacctagaattgtgctagaaaccaaggggaagctgaaacgaaaaagccagagcagaaaactaacgttcatgaacacccatcatgctcccaaaaagtaacatacaaatctgccttaaggttaccttcaatctggttaagaaaacaattcttacccatatgtcagaataatcatcataaacctatagaattaaagtaagtaataatgtataaaaataacatttttttctcttattcttcctggatatggcagatctcaaaatatgtttactgaatttccaaaagaatacaaaaaattttcatccttctctctatatatacagtcttgtgaaatcgtccactaaagtttaaaagtaggtggaatttacaccttcatgtactctctgtctgcctgggtccttggctaggtagaggcatggttgtgttctatagactgagagaggccagaaatactgggcaaacaagccgctttgactttgagttgatgaaaagcttaggaaaaaatccctccttttgtagagctgccaggccagtctttccaactcaagttcaatgatgcgtcaaaattctacctggagtcatgaggttcccctcccatcttatcctctgtatcccccggtccagataggatttgatgcagataacatgggcactgttggttgcttttcttttagcatgaggattcctcaaaacagagttttgttaataaattaagcagaatttgagtgaatttaagcagagtttgagaatttaagtgaatgtctgggtatatttgaataatatttattttgctatcagcatgacaacattggatatcaaaaagagttctgaatatgaggtgaggagacctggacaccctgaaaagccttgaattcgctggttggctgggttctgtcaggcaattctctcccttgtcaaatgggtacagtcagccctgcctgcctacccaaagcagtttttttagtaccaggagagataatacctgtggaattgccacaaaattcttagaaaatcaggacccgctaccagtttccagaggtaatttgagtgaagtgttgttagaattgagggagggctaggctagagtacatcctgaagttgaaagtgggttagccaagatgcattcatgccccttcctttggaacgtggggactgtcattcctttttgggtcatgtatgatttctgtggactggaattacaagggcaaatgtaggaattgctgtaatattggtcagtacttttcacattccgccatcccatgagtagggataagaggttaattaaatacatctctcgggcagcagaaatgatcaaggctgtccctggaacacagttgcttcaaaaagtaggcttttgtttcagggaagatctcccacagagaagcatggaacgccaaagagaactataaataggactatcatttatgtcaattataaatagatttgttcccttttgattagaagattaatgctagctgaaactctgtagttgagcagaaatgagggaaaaacttctgacaaaatattattacatgctaacagttagatttgataccttttcctccctgaagtattttctctgattttccctaaatgaagactttcttctcgtttgaatttatgtccagtttagtctttgaagtgcgtttgttcatacttcttagctcctcaggatctctagattagacaatacacacacacacacacacacacacacacacacacacacacacacaccttttttaaatggaaaaaattgaataagttgaatgtccgtgttaggaatttaaaagggggcaaaactttctcctcagatgctcctaagatggccactacgccctcctccaaaattctgctttctgtgagggagatgttttaccaaattaccatgtacatatggttccttagcaacccatattaacactgagcataatgaccaaagagataaaggaaaagatcagtagaggaagggccataagccatcgctgctgagcacctgcctgatatggagccatattttttcattctccaggaagcgatatccaatgggatcccaactctttacatatggttaaccaacttcttgtccttgattgtgttcatgacttgtctcttcccagggccagagagagaaatggcaacttcccatccaagctgactgccaggttcaacctgggaggagagattgcagggtgcctcagtcctctactggacatactagaatgctggtctcttccctgctaggatgacaggatggggaattttgcctgagtctgcccaacttgcctcatggaggcttttgatttcagctactgcaaactaagcattaaggaaaggggtgcaggtagagactggaagagagggtagatgcaatgagtggagacctctgtgtggaactcctcccccacttgaaatgccctattctggtttcgctgtgagatatttcaaaatgaacttaacttgtcaactgaaaatgtactgcctgacctgagatttctggaaaaacatgaatcagaggtttggaaagtctgggttctaactcataaagaaatatattgaatatttataaagatataacattcttagaactgtttctgtgtgtgacctctctcttccaagtggcattgctcaacagcccagctctcatcagaaggctgacattatgctgttgtgcaacttgcagccatagcaatgtcactttgttaactgcacttgctgtgcattcaactattgagaagccaaacagctttaagtttgagtcagaagttctaggcaggatcattcttgtgaaacctgaacccttagttcttctaaaaagtcaaaatacatttggatcttgcaaatcgagaatgtcagagccaatattttcctctttaatcaaaacccaggaatggcacggtgggtggctggggccatgtcctcccttcttccctttcccttcccccacacttccagccaagattctccaggcttgagagagctgatgtggaaaagcagctctggcccttgtgtgttcagccctgaacctctctgccaagcaccacattaatggtggacactaacgcattgtgatatagaggcatgagcctgaaatcaccaatttgtccccagactgataggtaaacagcaaataggaaagccttcttcttccctctcatccctgcattcccaaatatttggggctctatccaacagcctggatctgcagcaaacatttgcctctgactcaattgaccccttcatggcgaatcttacatccacattggataactctactggctcaatctatgaacaattttcaaaattgaggaaataaggcccttttccattcttaaataggctggcctaaatattcttgggagcttcatggagagtgtcatgccctggcttattcgcaaaggtggcaatggccttcagactcagctaagacaaacattggcacatgcaggtggccatcagatgttaatgtttatcttgttcctctgtattgctgttatctttcagggaaatctaggaatagcagaaagatgaatctttccttccccatggggcatgtacttccttctagggagtaggaagagaaaaccctctcattccctagacctcatgagttactctggagggttggtagtagccatggttaatggcaagcttcagaagggaagagcttccaaaaccttgccatgatgcctgtgaagtgctgtgagagtactcatgtttctctggaagtcacatcatgtgtttaaggtaggccttgtacagggaggattttgatagatggaaaaattctggacacagaaactaactcaatagaagagcacatagacagcaaagtaaggagtatgtttgcaggtgcatgagacatccagccagttgtttgggtgttaggctagtgcagagcagtgcaagataagcccagaaagataggttggcacatctatattgaagaattataatagctagcactttccaagctcttatatgcatgacactgttttaagcacttacatgtattaactcactgaatcaccaaacaactctgtgaaataggtactatcattatcttcactttacaagtgaggacactgagacacagagaagtacagaatgtgattaaaggcacatagattctaagtgcaacgaatccagggttttaactcaggcagcctactcaagcacgcatggtacctgacaaccttgacagcatgctctatagagcatacatttattctttgcttcttcttccatccccacatccctagccatggaaatgctgagtaacttttaaggccaaactcatctctttcctagcaatgcctcttccaacttcatcataagagaaacttatctttccctgttagaggcctctctttttttgtacatacagtaattttcccaaccttacttatattagagttaagaatgtgttcatctgtgaacttcttcagacaagaattggcatcatattcctctgtatgtcctcagaatctgggacagtgatttgcatgtagaaagtgctcaattaacattgcctgagtataattgaataccggaggccactaactgaggcctgaagaaaagtttcctaatcctaccatacctctttaagatcatctttccaaattcaaaacaaagcaaaacaaacaaacaaatgccaagctctatagggaactctcccactcctgaaaacctacatcctataaaaaacactttggaaaagcacaatgtagaccctcctaggccacacacctaacacattattccagctttagccttgcttgactgtaaaagaatgctaatggcagcagtgcttctaaaggcaaaagcacagccacacatgaatgatgtatctcactaagaactgtggggttccaggatttctgagaagactcctttcattctgataaagttctcagcttctcgacccccaaatcctaactccctgaggaagattcaaaaacacccaatttaattaaagcctttttttttctcatattgaagtcacaagttttcacagggtgcaacgtgttgctaacccagcaatttccagacaaggctgctcagcaaagcaggtgctgttttctttttagggcccatgtccttaaattgctttgctgctcagatgtctcaaaggtccaagtttctctggcagattccagcccaagcgctcctctttgacccagctctttctggctcagaagacttctttttcccataggtgcagttagccaataagaagagaatgtcttatctttttaaaaagtacacttccaatgtcttcattagttatcttcaaactcagagggtcaataatcacagcaagaggagcaccatgccttctggaaggatgtcaaataagcatgctgaatggcctacagttttgtaattggcaagacccccctaacacagattgagtgttacagatctgcaaagttcagtgctaaaatatgattgattagtgtgcaaatatttactgagcatctattttatgacaggctctataacagatgctagggatatgacatttgtatgagtccattctcacactgctataaagaactgtccaagactgggtaatttataaagaaaagaggtttaattgactcacagttccacatggcagcagaggcctcaggaaacttatcatggcagaagaagtagacatatctttttttttttttttttttttttttttttgagacggagtctcgctctgtcgcccaggctggagtgcagtggcgcgatctcggctcactgcaagctccgcctcccgggttcacgccattctcctgcctcagcctcccgagtagctgggactacaggcgcccgctaccacgcccggctaattttttgtatttttagtagagacggggtttcaccgtgttagccaggatggtcttgatcttctaacctcgtgatccgcccgcctcggcctcccaaagtgctgggattacaggcgtgagccaccgcgcccggccgaagtagacatatcttacatggtggcaggtgagagagtgtgaagagggaagagccccttctaaaaccattagatcgcatgagaactcactcaccatcatgagaacagcatgggggaaaccacccccatgctccaatcacctcccaccaggtccctccctccacacatgggaattacagttcaagatgagatttgggtggggacacagccaaaccctgtcaacactgaaccaaactgacagggttcctgcctcagatgcttagaggttagccagaaaggtgaacatggccagtgccaaacaatagcaaggaagggagagatccctgtgcactggaatcatctgagcggtgagctatacagtatattcctcaagttttctttccttcccaatggttggaatatctttctcatcgatctcccatcttcttttcactttctcttcttttcatcatctacagcatgcattgttacacacccactgttacaaaaactggtattagatttgttgtggcaagaaagcctcactgtccacaggcctacatcttagcaccttgatcttgagcttctagaagttctggcttcctggaagttcattacttactctgcgtaaacaaatgaaatagagagcaataaaatgcgctcagtaattctcacattatttgtttgagatatactgaaattatctacagaaaggagagcaatactctcttatccttgaagatcaaatgcatcaaagagttacaggttttgataaaaacttcattgatgaacttaattcctatccaggagtcaattggtctacgtagaagagtcctaagaatagaaaagctacactaggtgtgcagaaccattcttgaaattctgtatatgaaactgtgactcacttgatataactttagagtgtatgttttgacacctgcttattttcttaccagtagcctttctggttttccaaaatctttctccttgttatccactgacaccatcagactaacctactataacaggttaacagactaagcaactataactaatctactataaagatcttttaaagcttcttcaaggctgaacctctgtgactctgcattcctagatcccaaatcctatcttcaattaacagaggtttaggagaaatgacccaagatccttcctctgaaaacccgcccaaagtattattgaaatcttattcaaattggaaagaatgatttaaaactagagacagagatggaagtatattattgtattgacaaacagcatgtagatattgagaaaatgaaattaaatgtagcaagagaacttatttaagtctcccaaatgagtttgaaagaaaggcaaatgtgccctgtatctgtatttgccaacacagaaagagtaataataatcatctccagattagatgatgaaggccttagccttcagatggaaggcgaagaagagattgaaaaatctggaaatgcagcattttatcaagtcgaatttagtcccagagcaattgggcatccatttgtctccaagtggagcagtgtacgatggctgtttccattcgtggcagagagctgctggggccatcggagcaagagatgcttcacaaagaaagtggaaagcagcgccaaaaggcaaatacaattcctgtcacatccaaaatagttcatttagctctttatgctactctcttactctttgtcatggagcaatttctaggagagtcgcataaaagtagggagatttttagctttgagcagcaaataagtgaactgggcaaggagagcatgaaatttagtgaggaaaaagaaaaagaatgacaggggaataatataaaaaccctgggaagaaagcacttcccctgtagaaaatctactatatgaaaagtcactcctctaaaacagatatactcaggatggattttctccattcggaagagtccatcactttaataaaacacttttgaagtcttcatctcgtaacctcacgtttaacatgtctgagcacttcttgagaactcgccctctctctatgctactggatgagacgaaaggagaatccgtgagcccggtgttctttggaggcctctctacctacgcacatttgtgcttcacttctgccaagtgaatataatatgacaaggcttagaaagcccaggtgatccagagggcaagagtttgtgtcaagaatagaggtagaagaaccatcgaattatagggctgtaaaagaccttgaattcataaaatccctccacagagaaggggttaggattcaaccctagaggaatgtcagcacaggcctctctcaggatgtcccttctctgacatcctgagagaggcctgtgctgacattcctctagttggggggcgggatggggaacaaataactttactgccttcctgttctgcaaacagaaaaccgtagcaatggggtatcataccaatttttcattattattatactttaagttctgggaaacgtgcagaatgtgcaggtttcttacatagctatacatgtgccattgtggtttactgcacccatcaagccgtcacctacattaggtatttctcttaatgctatcccttcccttgcccccaccccccgactggccccactgtgtgatgttcccctccctgtgtccatgtgttctcattgttcaactcacacttatgagtgagaaaatgtggtgtttggttttccgttcctgtgttagtttgctgagaatggttttcagcttcatccatgtcccttcaaggaacacgaattcatcccttttcatggctgcatagtattctatggtgtatatgtgccacattttcttcttccagtctatcactgatgggcatttgggttggttccaagtctttcctattgtgaatagtgctgcaataaacatatatgtgcatgtgtctttatagtagaataatttataatcctttgggtatatacccagtaatgggattgctgggtcaaatggtatttctggttctagatccttgagaaatcgccacaccgtcttccacaatggttgaactaatttacactctcaccaacagtgaaaaagcatttctatttctccacatcctctccagcatctgttgtttcctgactttttaatgatcaccattctaactggcatgagatggtatctcattgtggttttgatttgcatttctctaatgaccagtgatgatgagcttttttttcatgtccgatggctgcatatacgtcttcttttgagaagtgtctgttcataccctttgcccactttctgatgagatttttttttttttttttttttttttttattatactctaagttttagggtacatgtgcacattgtgcaagttagttacatatgtatacatgtgccatgctggtacgctgcacccactaatgtgtcatctagcattaggtatatctcccaatgctatccctcccccctccccccaccccaccacagtccccagagtgtgatattccccttcctgtgtccatgtgatctcattgttcaattcccacctatgagtcagaatatgcggtgtttggttttttgttcttgcgatagtttactgagaatgatggtttccaatttcatccatgtccctacaaaggacatgaactcatcattttttatggctgcatagtattccatggtgtatgtgtgccacattttcttaatccagtctatcattgttggacatttgggttggttccaagtctttgctattgtgaatagtgccgcaataaacatacgtgtgcatgtgtctttatagcagcatgatttatagtcctttgggtatatacccagtaatgggatggctgggtcaaatggtatttctagttctagatccctgaggaatcgccacactgacttccacaatggttgactagtttacagtcccatgagattttttttttttgtaaatttgtttaagttccttatagattttggatattaccctttgtcagatggatagattgaaaaaattttctcccattctgtaggttgcctgttcactctgatgatagtttcttttgctgtgcagaagctctttagttcaattacatcccatttgtcagttttggcttttcttgccattgctattggtgttttagtcaggaagtgtttgtccatgcctatgtcctgaatggtattgcctaggttttcttctagagtttttatggttttaggtcttacattaaagtctttaatccatcttgagttaatttttgtataagatgtaaggaagcggtccagtttcaattttctgcatatggaaatgggctaaatgccctaattaaaggcacagactggcaaataggatagagtcaagacccattggtgctctgtattcaggacactcatctcacatgcaaagacgcacataggctcgaaataaagggttgaaggaatatttaccaagcaaataaaaagcaaaaacaagaagaggttgcaatcctagtctctgataaaacagactttaaaccaacaaagataaaaaaagacaaagaatgacataatggtaaagggatcaatgcaacaagaagagctaactatcctaaatatatatgcacccaatgcaggagcacccagattcataaagcaagtttttagagacctacaaagagacttagagtcccacacaataatgctgggagactttaactccccactgtcaatattaggcagatcaacgagacagaaaattagcaaggatattcaggacttgaactcagctctggatcaagcggacctgatagacatctacagaactctccaccgcaaatcaacagaatatacactcttctcagcaccatatcgcacttattctaaaattgaccacataattggaagtaaaacactccttagcaaatgaaaaagaatggaaatcataacaaacagtctctccaaccacagtgcaatcaaattagaactcaggatcaagaaactcactcaaaactgcacaagtacatggaaactgaacaacctgctcctgaatgaatactgggtaaataacaaaattaaggcagaaataaataagttcttagaaaccagtaagaaaaaaaagacaaaatgtaccagaatctctgggacacagctaaagcagtttttagagggaaatttacagcattaaatgcccacaggagaaagtgggaaagatctaaaatcgacacctgaacatcacaattaaaagaactagagaagcaagagcaaacaaattcgaaaactagcagaagacaagaaataactaagatcagagcagaactgaaagagatagagacatgagaaacccttcaaaaaattcaggaatctaggagctcattttttgaaagagcagcaaaatagatagaccgctagcaagactaataaagaagaaaagagagaagaatcaaatagatgcaataaaaaatgataaagggggtatcaccaccgatcccacagaaatacaaactaccatcagagaatactataaacacctctatgcaaagaaacaagaaaatctagaagaaatggataaattgctggacacatacaccctgccaagactaaaccaggaagaagttgaatccctgaatagaccaataacaagttctgaaattgaggcagtaattaatagcctaccaaccaaaaaaaaacccaggaccagatggatgcatagccgaattctaccagaggtacaaagaggagctggtaccattccgtctgaaactattccaaacaagagaaaaagagggactcctccctaactcatttaatgaggtcagcatcatcctgacaccataacttggcagagacacaacaaaaaaagaaaatttaaggccaatatccctgatgaacatcaatatgaaaattctcagtaaaatactggcaaactgaatccagcagcacatcaaaaagcttatccacgacgatcatccctgggatgcaaggctggttcaacataggcaaaccaataaacataatccatcacataaacagaaccaatgacaaaaaccacatgattatctcaagagatgcagaaaaggccttcaataaaattcaacagcccttcatgctaaaaactctcaataaactaggtattgatggaacatatctcaaaataataagagctgttcatgacaaacccacagccaatatcatactgagtgggcaaaagctggaagcactccctttgaaaaccagcacaggacaagaatgccccctctccccactcctattcaacacagcattggaagttctggccagggcaatcaggaaagagaaagaaatagttttcaaataggaagaaaggaagtcaaattgtctctgtttgcagatgacatgattgtatatttagaaaaccccatcatctcagccccaaatctccttaagctgataagcaacttcagcaaagtctcaggatgcaaaatcaatgtggaaaaatcacaagcattcttatacaccaataacagacaaacagagagccaaatcatgagtgaactccattcacaattgctacaaagagaataaaatacctaggaatccaacttacaagggatgtgaaggacctcttcaaggagaactacaaaccactgctcaaggtaatcagagaggacacaaacaaatggaaaaacattccatgctcatggataggaagaatcaatatcatgaaaattgccatactgcccaaagtaatttatagattcaatgctattcccatcaaggtaccattgactttcttcacagaattagaaaaaaccactttaaatttcatatggaaccaaaaaagagcctggatagccaagacaatcctaagcaaaaggaacaaagctggaggcatcacgctacctgacttcaaactatactacaagtctacggtaaccaaaacagcatggtactggtacctaaacagatatatcgaccaatggaacagaacagaggcctcagaaataacgctacacatctacaaccacctgaactttgacaaaccggacaaaaacaagcaatggggaaaggattccctatttaataaatgatgttggggtatcataccaatttatgagatggtcatttggctcttgagtggaggccacctctcagtgactcagcaaaatttgtcctctgcacggtccttgtatcttgtaccacctgaggcaatcaagtatattctgctttatatcatagttatttatgagttaacgcatctccttactgggtcccaaattccttgaaggttgcaactttgccttgcctattcattttcacatactacgcggcacttagggcagtgctttcaatgtagcaggtaaccaattgttttgcttgcttttaaagtagttgtttttaaattgacttgagcttagttctgcaagaagactagatgagatatgattttgtcatcataaatttaaaatgtccttaatattttcttaatatttaatctataaagagtattcctggcacatagtagacagtaaataactttgttgaatgaacttacgcgtaaatacatcaatgactgactgctcatggagggtgccccctttttgcccatgaagttgaggtggtattgggagaatgctttcatttcctgatcctaactctcctgttgcagtctagtattgtcaatacaaaggtgtcatcattaccgttaatcccaaactgatgtaatctgaacttttgctctgtgtaattacagatatggggtacatttcctagaaaagaactgccctggacaaaactgttaggtagaaaaaaaaaaaaggaaattgggtgtcttttttccatattgtcaagagcagagaggacctcactctgccccctccctcttgactcctcacacccaatagcagcaccaatgcctgccacagaattatgagcacttcagccgggcgtggtggctcatgcctgtaatctcagcactttgagaggctgaggcaggcggatcacttgaggtcaggagttcgagaccagcctggccaacatggtgaaaccccatctttactaaaatacaacaattagccagacatggtggcaggcacctgtaatctcagctatttaggaggttgaggcaggagaatcacttgaaccccgggaggcagaggttgcagttagccaagattgtgtatcattacattccagcctaggtgacagagtgagacgctgtctcaaaaaataaataaataaataaataaaaataaaaagttacaggcacctcaaggttgcctgttttttgcctactgttgcttcagttatgtactctcagtgatctgttaccttcctttccagaaactctgtgtaaatatatcttaattcaatgaacaaagccataatggagacattggaggcattagtagccagccagtgatctgttgttttgttcattcaagaggaggttatcatgaaaatactctgtgagaaacagagttccaggattacactggcttaaacaatatggaagtttgtttctcttatgtagtagtcccaagatacatagttcagggctgctgaaccatctgctgtgcaaagtagctctatgccacaaaatcttcaagacccagcaatttctagatttctatttcaccatcccagcatggtggccctcatctgcaggggccaagatggctgctggaggttcaacattatacccatgctctagccaataggaagatagaaaaagcaaaggatgcattttggttgtcttttaatgaaggatcccagaagctttcatgtgacactttcacttatatttcatttcctagaacttgaacacatagccacacagagttctaagttaggctggaaaatacagttagctgaaaattagggtttctattactgcagaaagagggaaaatagctattgggaaattactaggaatctctgccaaagacgctatccctgagctccttacgttctaccacttgagtgccccaaatcaagacactacaaaatgaaaggttgatctagtgtcagccagatctagatgccagtcctattagcatcacttaatgagctttgtgatctctgagccattttccatgctatcaaaaacagcaataacacctccctattaggttcctgtaggatgatataagataaccagtggtgcctagcacagtgcctggcatatatggtagatacttagtcaacatttatttttaccattctttctgcatataagactggctcagctccacagtttatatcaacttgggcacaaaaacattaacaaagttcctggcggccatatttcttgagcaattttatactctatccattagccagatgtgttagagcaaatgagcggctgctcaaaagaatgtctttatcctcacttgcctttttttcctgttattgttggatggtgccaaacaagacagaagcaattaataaacttgtcagtatcataagagatgacaattagaatcagcagagcttaaaaaggagcctgaaatcataggggttgaggtagtggggtttttaaaatgcaaagagcatgccttttcacttcactctgtttatcaggccaagcaaactaaagtgaaaagtcactgtggaaaaaggtgaagaaaaaggtacctattttgcatcacccactatgtcatatcaagtaaatgaattaaaatcccatgtcaagtactgggctttattccccatggtttcacaccaagtttctcttagaagatactctaagatgcactaagctttcccattcacttctgtctaggcaggaagattctactcaagttaagaagcagtgttgccagatgcagtggctcactcctgaaattccagcaatttgagaggccaaggcaggaaaattgcttgagctgaggagttcgagaccagcctgagcagcatagtgagaccctgtctctacaaataatcaaaaattaaccagacatggtaatgcatgcctgcagtcccagctactcagaaggctgaggtgggaggatctcttgagcctgagaggttgacgctgtagtgagccacaattgcaccactgcactccagcctgggcaacagtgcaaaaccctgtctcaaaaaaaaaaaagaagaagaagaagaagaagaagaagaagaagaagaagaaggagaagaagcagtgtaatagaatgacttagtgctcagaaagtcttgagtttggatcctggtttgggcatttaataagtgagtggcctgagacaaataaataaacttttctatggctcaatattttcaactgtaaagtgaagatgataacagtgtccatctcataggattgttgtaaaaggtaaatgatacagcatatgtataaaccagatgcactcaggttttccagtctccttgggtcacgcttttctccaatatctacataaaataacctgcaaccccttttcacattccatgggaagcccatcctctgcccacgagctctgaagatttggggtatcatgcttctctcaagttatttcactctatagcctgcttcccaaatatggcccactcccacttgtcattcctgaaaccattattctatgttccctgccccctttgcttcagctcatctaaagggcaggaaaacgctggaagcaggagagtcatgagtgcctgaaattttgcaggagcagcaggcagtaagagtgggaggacctgagatctatgatagtgaaagacatgatgcaatatattgcctgcctggttaaaggagtagaaaggagtcaaagatgactgtaacattttgagtctgagtaagcaagaagataatggtgcagataccagcaagtccagaggaggatttgactttgttgacttgactttggttgacattgactttggtcaatggcaaagattgactttggtttcagagacactgatgtataatagagcttttagaaaataattcccatgagtcactagggtgcctgtccaaagtgcagtgaagggactgcatagaagaagaggcttggagatttccttgtacaggggatagctgaagcatattccccaacacaatattaaatttgtaaattacctttaaaaatagaaagaaaattgccattttagagtctcaaaaggactgagcaccatctaattacatcacaaatgatctcccaaaaaactcattcctttagaccaggagatgagtttctattcattattatttttgtagctaaaatttcaaatcacagaatcataatatattgcagtttgtttaagccttaaaatgttcctggcccaaatgcctcacttaaatacggggaaactgacatgctgaagagtctgagtgacctatccttgttcactcaagttgaataatgctgccagaaattctactgttagaatttctgctctcccttgctcattttttcacctgcagtccagctaccaaagataggattttagacattctatctacatttaaaatgttccttctaactgcagcggaaacacaggtagcaaggagacagtgtagaataaggagccagaggcctggattttagtcccgtggaaaaagaaccagccgcactacctggagagaatcatttggtcttccaagttctcagtttcctgatttgagtagcaaggagatgggtctggattcgctctgaaatgtcttgcagctctgacattccatgattcttggagaaatcggctatctccaactgaatccacatcttccaatcccacacaagatggagaagcaggcccatcccagtatttggggaggcccatcaggaccaaagctgtcctctctctgtgggggctggagaagggaagcagctgaggcaacacaaccagtttccttcccattcagaagagaacaattgagctcctcccaggggaagccatgcggatttggacagtgtggggtctgtcttatgacaggaatggaggatttctgtagaatggggatgcttagcggccgtaagaatcaaagatggaaggaaagccaagaggtccttaggtccggtcccttgcctctagctaagccttccaaggcagatggttgtcatcctacatttaaagatctccagagtagcaattgctcagcttcccacagcgcctggggtcagcaagtttccccttataatcaagaaattcttcccgatgtttaagtggaaatgcttccaatgtggcccgagtctgtttacccttgtctagtcctcagaagagatgaggaataatcttctgtgtaataatcactcttcttatgcctggtgctggtgattaagtcacttcttagccttttcttttttgggctagatcttaacttcattttccacccagttaatctttttttttttttttccttctcctagctggatcttttccaggttctccaaatgagccttaaaataggagaatgaaatctgagttcccactctaattaaaacctcagcaatgccaagttttgtggaaagattactctctaggctttcgtttcataattctctacatacacccgcctcatattacaatttgttgtagtactttcctgctcactcagggcccacagctattttgttatagtacttgtctctgccagatggagcccatttttgtctattttaaacatctttctgtttttaatgacttctcgtttctaaattgttaaaggtctccttaaattcaaatcctaccttctaatgtttctttacctgacttagtgccatctgaaaaacattctagtccattactcatcattgaggaaggaaactcaattttgtatcaatccgagaagggcctgaatagcactcatttctcccaatactcacaagcatgctttgagcatgaaaaaaaatgcaggccaccccttctccattcatttattcatgaaacatcttttgaacagggtagacactggacacacagtgatgaacagtttctgtatccattcactaatgtgttcctacatgtgtacaaaatgtactccttaagcacttactctgtgtaaaaccgttgcaagtgttgtggctacagcagtgaatagggaataaaaggctactggcttcatagatcccacattccaatgggtatgggggaggacagagaaaaattacaagtcaagcaacaaataaacaagaccatgtcaaatttgataaacgttttgaaagaaataataggatgatgaacctgaggatggtactgcctttgatggattggatgggggaggtccctctcagagggagaccctgaagacctttcagtttagcagagttatgttattctgaaccaatcccataaagcaaacccacttccctcatgttttcttctgacagacccagcactaactttttctggggtgttcacggtttataatgccttgttactcagtaattgtttacattcccaaaggactctctcatgttctttaattgaaagaagagataaaagaaggaatttaagtatacaggcgcctttgttcctcaggaagttaatggacattcctggaaaatgagagtccggtggtctattgtgtggagaaagtggacttcagtaccatgaaacagatttcttcactgtggaacttgaataggctgttcctcgaccatcttgaataggctggtgaactttaagactctgcaaaataagataacgtttacagccgtttcctaagctttttgcacggaacttcttgaacaactctttggtgaatgctgagctgaaaagatctcttggatccttaggtgtcctttgacataggatttggcatttgggatgtgattccaaatcaccagcagccaatgtgcaggccagtcgtcgatgtctctgaagagtgtgatagaaagaagaccgcagaggaaggcagggagtccttcctgactttgcctcagcttctcttgtgaccctggtcacgtgtgaactatgcttctttagttttctcagatcatggaatcttctgagaatcttctgagtgtctaaatgtcctctttccaggaaaatccacaaacatacataattatacatcatgcagagggttgatatgcctcctaccaaaatgcatctctgaactggaggatttctaaggatctgtctgtccagtgtgaaagttcaaataggtttctgctctggtcatattgacatcttggtgttttggtttgtatgcttgcttttaattgacacataataattgtaaataattatggggtacacatgatgttctgatacatgcatacattgtgtaaaagtctaacagggtatttagcatatcgatcacctcatgcctttatcatttctttgtggtgagaacattcaatatcctcttttttagctattttgaaatatacaatacgatattgttaaccagagtcaccctattgtgcaatagaacaccagaaattattcctcttgtctaactgtaactttgtacccattgaacagtttctatctccccacctaactaatgctccgcagcctctagtgaccactattctactctctacttctattagattaacttatttagattccatatacaagtgagatcatatagtatttgtcttttgacattagtttggacaagaccccaaaagcaaaagcaacaaaagcaaaaatagacaaatgggattacatcaaactaaaaagcttctgcacagcaaaggaacaattaacagagtgaaaaatcaatcttggtccatgtttttgattagcttgtgtgctccttgggacaaaaccaagcatcctaccacctctcaagcttccttcagccttcaccacacaagtggtgctaatatgtgtttctgcacctgtgccaggttcctctgcagagtcccgaggtggccgttgcatgagagactgctagggaggccagggagacccctccacacagaggtaccagccagccctggggatgccccgttgacttctcaatgagtgaatgaggtcatttttcctctgtcttttccagaaatagattcgttgagaaggcatatgctgaaatgacctagcaaggcagcaggaaggaagtgactagaaagagaatcattaaaaacccaacttcttatttaaaggaaaatggaaacaggggcctggaggaatgctctaattgggaagccagcagtggcccctgccttccctcccagtgctcccaatatggatttcctgcctttgggcactgttggatttaaagctatgaaagcctcatacacagtctcatcagaagggctcagaaaagaaacagagcttcatgtgccttcttcctgccacttatgtatggaatcagttggattaattaaccctgtttcctcagtgagattgattctatcactcgctcgagaaattctgatgattaggtgtaacctaactgataaataaaaaattataattttttttttgcaaaattaaatgtcctctgctttgtataattactgtggttctatgggcaatcatcagtggtatattcccttccaccctcctttgccacaaattttgaatgatccatgaaaagatattttgatgatgtggtactgaaggtgccccaaacccacactgcctttttggcttctctccattaccctaggaggttatagggcaaaggcataggaaggataggtttgggttcctgggaagtctgtcttctgagctgaattttacaattgagcaagttggcttgactggccatctgacaatctggaaagcttaaaaataaattgaactcagtatttagaaaaggcagctttcaatatcagaagactagcttgtgtttctcgctttccatttggcgggggaatctgtgaaggctctaatttcctttcctgagacctggcttgttgtcttcaggtgctagctggaattcaaaaggacacagactgtgcaaataaaaaactcagggaagggaaaaaggtcaacatgtgttttttgtttcagttcagtttgttactttgaagggttataatattttttccttctgttttgcaataaaactggttctgctactagactgacatatagatacctttattaggcaattatcacaagagatatgaaggctttctgtgtaagaaagtataagaggtctttcccaggactgcagttcttcccttctctccagtgccacaggacgtgatcgtatattatatacacacatattaggagttgatattgcacacaggcactggcatcatttgagaacttatggaaaatgcaagtgcttgagcaccaccccagtacctgttgaaacagcaactctaaaagtggggcctgttgatcgtgttttaataagccatccaggtgataaacatgcaggctcaagtttgaaaaccactagtatgtgttagttatcttgggcactacctgcttcaggaacccccacagaattatgggcctgaatttcatcctttcatgaggtttggggacaagtatgtgggtggagaagtcttgccatttgaaatcaaaggaacttccagattcataagccacttaaactctcagttttttcatttataaaagtgagaataattccattggcaccataaggttgttgaaatggctgatgcacaaaaggtatgtgaaaatgatttttgaactgccaggcactctctggaattagctatatggattgatgatgccaatacacattatggaccacaggcatgctgggggatgtggggagactgtgtaacctgcgtatcctgtgtcctcttctatattctgagcaccaagcccaggcagataatggccattcactgagtctttgctgagtaattttaactaatattgggtaagtgttcactcatgcatgcatcacaagcaccttgtgaggtgagtatgtgcctctttttggatgcaacctgagaggttaaggagcttcctcacatcacatagttagaaatggtatgctcaaggctcttctttaaaatggcatggtattaatacttgcatgtaacctatgcacttttcttgtgcactttaaaatcatctctggatcacttataacatctaatataatgtaaattctatgtaaacacctgttatactgtattttaaaaatgtgtattatttttaattgttatattgttatttttaattttcgttcaaatattttctatccatggttgtggacatgaaacctgcaaatacagagaagacatttatgcagccaaaaaatacatgaaaaaatgctcatcatcactggccatcagagaaatgcaaatcaaaaccactatgagataccatctcacaccagttagaatggcaatcattaaaaagtcaggaaacaacaggtgctggagaggatgtggagaaataggaacacttttacactgttggtgggactgtaaactagttcaaccattgtggaagtcagtgtggcgattcctcagggatctagaactagaaataccatttgacccagccatcccattacttatatacccaaatgattataaatcatgctgctataaagacacatgcacacgtatgtttattgcggcattattcacaatagcaaagacttggaaccaacccaaatgtccaacaatgatagactggattaagaaaatgtggcacatatacaccatggaatactatgcagccataaaaaatgatgagttcatgtcctttgtagggacatggatgaaattggaaaccatcattctcagtaaactatcgcagggacagaaaaccaaacaccgcatgttctcattcataggtgggaattgaacaatgagatcacatggtcacaggaaggggaacatcacactctggggactgttgtggggtggggggaggggggagggatagcattgggagatatacctaatgctagatgacgagttagtgggtgcagcgcaccagcatggcacatgtatacatatgtaactaacctgcacaatgtgcacatgtaccctaaaacttaaagtataataaaaaaaaaaaaaaagagatgactgtacttttgaaatgccctctgaactcaaatgatgaaacaagtgaaatcaaaaaatttgtttttcaagtaaaaaaagaaatggtttagccagcatctgaacccaggcaatctcctccagagcctgtgttctaagcacttcaccacacaacgtcacaatcagttcttcataatgatgctaaggagggtggggtgagatgacattctgggagtgcttgctctgtgccacaagctgtctcaagctctctttgtgccttaactcacaaaaaccctgtagagggaaatgatgatcatcctcttttaacaagaaaggaaatggagacttgagactggccctggtgttaggtttcttctttccaaagtacaaatttcttctattgcttctctctttgtaccgtttgtgcacccaacttgtcaatccaccaatcagtgagcatttgtgaagtgtccaaatgcccagtgtagtgcttctaaacacagaaggatgagatgacagtgtctgccctcgagatgctcaaaatcaaataggaaagaataggccagtcttcacaaaacagaaaaaaaaggctaatatacagttaagagcttgtttatgatacataaagtaatcattttccatatttagaaggttaatgggaatgaggtcatcacacaagaattctcatgggggcctgaagaaattttgtgttgctagactgagacttcaacaatttctctgagcaattatccttgaactgttgagttcagcatccctgcattgcagtttcctttaagtttgttacagttaccctgattataaggagatagtgacctgttatcctgtttttttctgtgttgttaacttcttatccctggtactgagaatagcgtctacaattcagtaggtgctcaagtttacatgtgaccaaatgtttataaaaaggagaataataatgtggtgaaagaaggacaggagtgttcagccaaattttggattggatgagaaggcagattgtcagggatatcatgacccaaacaaaggtggagagacaccagattagggaggagccaggttctccagagaggacctgagttcagaaggagcacaggagcagagcctttgttatttaggatgcaaactctcccactcccatacactgaagtgtggtgctgtcttggcagctgtgtgttgaacctctctccctaccccagagaagaaacctcatacgtacttggtgattttctttttaagttttttatttttatttatttgtttatgtatttatgtatgtatgtatgtatgtatgtatgtatttttattatactttaagttttagggtacatgtgcacaacgtgcaggttagttacatatgtatacaagtacttggtgattttcaaagttgagagaccagagtcccttgtcatcaatttcattttccttggttttacttctacttagaaaacctttggatgccaaactcaagtcttggttacgccccatgtttccttcaaaggaaactgcactagtaattgaaaacagaaattggttcatttattctaactcacaggacacaggtaagatccctgtctgtgctccaccttggctgtctcttttctaatcccgggagaaaatctggatataattctctgctttgttgattaaattcctctggtccttatgcaaaattgtgggctttcatcaaaataggattgtctgataataccctttgactcagtaattccattccttggaatttattcttataaatgatctatgagtagtagaatgttatgtgtacaaagacatttattgctgcattagttaaaatgatgataaaactagaaatagcctaaatgcctagtaataggaaaatggttacagcaacaaatgatggcatatctactcagtaaaatattctgcagttttaaaattataattatgaaaactatatagcaatatgggaaacgcttacaatgtcatgttaagtgggaaaaaatacagtactgcattaaatttaggttatggctgtagctatgccaaaataatgtatgtatctggatgagaaacagaaacaattttgaaaaatgaagataaagtgatttgctgggatatcaagattatgggtaaaaacttctctatttcagtgtctgctaaagttgttataactttatgcaattcaagggtcttggcaggctatgaaacaaggctgactgccccatctgaaactgaaagggtcacaatgcactgggtaagatgtgagcatgcaagagctatgtcctaaactgcggaagtgcacagacttctctctcaagggaaaaagccatgcatggcattccttctggcattctctagaatacctaggataaaactctgtgcaactccatgtactcaaatcctggggttagtgggtccatttagatgccttcacccatattcttcattgatattagcatcatgtgcccacaagaatcccagtaaaggtatcaacttcagagttcttcatcaccagggaattctctcactttcaaggtgttcccgagtaaggtgacctggctttgcagcttactagatgtatgatttaggtcaaggtacttaaccttgctaagcctcagctttctaaaatgtaaaatggatgtagtaataatgctgcctccatgtagatactgcacatgtgtaaataagacaagaaaagtaatatttactatagtagcttagtaggaagcactcaataaagggaagctattggtagtgtattattgcaaacgccctgatttttctaaatgtcaaggagaaacttgtgtttaatggaatagttttcaacttcatttgattatatctttgggtcttgttatagtgccttctctctcagtagctaattagtatcctctaagtttgagtcttttcaagcgttcacgcttccatggaagtgttttctgcactgtgtttaaatcacgttagagaacttaactaagcttcaagcctagtagtgtggtatgtgtagttattctgacattcagagaaatgcagaagttcaggccagatagaaggctaagagaaagagaccccttggtgatgccacagatgactaacccagatgggggagatgagaaggctggggagctaagagccacagccagacacaagagaggaatttggtttgaaaagagagtattaagacatcaacagcctggaaagagaagtacaggctgatttgtgacctgttgagcaccaagaaaaaagatgtggcaaaagaaggcacagatgttctgaaaaatgcaaagaatttgtgatggctcagagtccaactgagggaaatgactgccaaaggcagatctcagtggaccgtgggagcactggctcgatgagaagacatgaggaggctaggacttcataactgacctttaccagagtgtcttcctgacccagagcaaggaagagagatgaagaggagaagatgaacaagtcgtttgagaagaaaaataaattagcaagtctttagaagtagattaaaatattcctgaaccagcagcctgctttttactaaaattcttttttttaagtcatcttcaatggcttgaacttacagttcagttaagaggatgtgtgtagctctgtctacattctctcatcagaactcctactactcagagtcaaaagcttcacttctttccttctatccttatcatatggaagctgctacaataccttgagggtcatttcattcgtcagcctaaaggttactaaatgtagcttttatataaacaggcatccagttaacatagtggagattacaaagaccatacccagcaggaggtcagtggattttgatattctcctttttcccaaagggaagaggcttcccattggggttacaaagtagcaggtacttggctggaaggctgagaagagagaatggaggctgccctgttgaaagactgtgtatcagaaaggaatgtttaaatcctgaacttaggccctcacttctgcttgagcagagcagagctacttatgcctaagtattggcataagtgatgcctccacacagctttctcaaacccagatgtgagacaaagagagcagacagaaggcaagtgtccagggaaataaaatggcccacaagcagttatcctggcccagtgtccctgcaccaaaggagcttccccagctgtgtgtcacattaggtctcacattgcgtattctcaaggaggccaactaattctgtaaccatggataggtcctgtgataaattggaaaatgacttctggggcaacagtctctagttctcagaaaggaaattcacagaagtgagcggttggccagaaggccaaaaggccattgcctcagagtggatcccaaagcagagtgatgtggccattcacagcatgtttgagtatgtaagaaaaaagaaaaataagaaagggtatgatttctcctgccaatatcataagctgagaatatttttctttgctgaattcagtaaaataaatcagagatttttctcgatggataattacatttgttaaaaagcatttaaggaggtttgggaatctgggcatgatgttggtcccagatgaaataaagatgagaacatgatttagcttggagacaaactgtaacttaaaccacacctctctttttctttttccttattcatagttcatttcttcaattcagaaaaatagttttcatgggggaggggattgggaggagtgcaatggctaaaaaacaggctcagtgaaggccagaagattactaagaaacctcttcagttgaccttgagtttgctgcaatatccaaagatatatggcattctaaaatacaataatttaaggaaggcatttacagtttcatggtcatgtttaagcaataatatattaagaataaaagggaaagaaataatagcagcaaaatcctgcagaaagaaaagaaataatggtctgatgagtccagattttatctgaaattcctgaaataatgttatcacaccctaaatgaaccattcagcctcagtctgcatacttgcttggtattttgaaaaaaaataatataataccacaacatgcttgagcactcttcgtatagacttttaaattttactgaacttagcagtaatttattttaccaaaaaaagaggatggcatttgaaaaactatgtttaatctttatcttctgattttatattctgggcagatgttgggtaccaatggcatagatgatgtcctgtctggaagcccattcatactatcagagataacatgtagttacggctagacatttccaaggaaactatgcatctgtccacctgaaaataagtgaatatcacacagagaactcatgtagcattgacagacaccaaggaaattagtgaaagaaaacattggcctatgttaaacactaggaaataaagcaatcttgtcaacaatattaacagtcctcctggggccgaaagagtcatttgtttaccttatgaagatgcggctttgtgaagaataaaagtaaaaggccatgcccaaggattattagaaagactcttctcatactaattctcatttctgagtgcccacagaagtgagggccatctctctttccttaggactccggttttcaaaatgtagtttgattctatcacctgcttcaaatgactctctaaagggctctttgtgccctaccttgagctggcttctgcaatccatatggatgggcttgtctccttcccctaatcaagcccaactccaaattagacattttccttcatcagactcaacactgatccctgctttccttaaattcagcttatacatcttgtttacatccaaaattaaatctaaaaaagagaaaactcttggttttctcatcaaacttctcttcactactatactcccctattattagctagaaacattaatatgccatatatatatatacacattattgattacaaagtgggtcgttcatgaccatctggatatttagggtcatctttttagaaggggtgcttgatattatctagcacatttggttgtttacatgagaaactgaatctcagagaatttgggtgacttgtgcatccacacagaggatttggggctgtaatccaatgttgttttcaatataccatattgccttgtttttattccctctctgcatatggcactgtgctaggtgctatagaaacattccccaggacctctcaatccaagaacaacactgttgatacaccagcatgaaagggacatcacacacaacccaactggcactcaagtctgcaccatgcagttatttatatcatgtaacaccaaaccatctcctcccactcgccctccctccttccctctctcctgtgttcaatctgtcgctgactctggctgctcccttctctgcgacagtgccaagagctgtttctgctgctgtagaggctgtcttccaacagtttactccctgatgcaggcccggatgcctctctttaaggagcgtccacctcccaacactctccctccagacacgccagactgccctggcagccgccaccccttcacctgccatcctggccatgtcactcccacccctgggacaaggtccagatgtgccctgagcaaaaaacaggtccctgagtgaggagactaatggggtgcagggcccctgagaacagagggcaggtgccaagttacaaagaaaaaaagaaatgaaagactttagagagaaactaaaaataaagagaatgtgttttaatatccctttggctgattcatctttctgtggcaccagaaagagggcgttaccctcgactcacgaatgccttatgttttgttacaaggcctctcttcccacatctgaaagagtaaaataacaataagagtgtaagtacaggagataatgctggtggcatagctacaatctccaagctggagccagtctcagcttacagttgtgtcagtctttctaaaaaaaagaaaaaaaaatgagacagctaaggcccacgtatgcgattcctcaacatcccttcttattctttctctggcagttttcatcttattcaggcatgggtccaagatggagtagtgattaagcggcctggtgacactgtatactgggtaactgcttattcccaaagcatggctggcaggagagggagccctggttttcagtcattccagggaggaaatgaaatgctaatacctagcctaccgtaaactccacagtggcataagccttgctcaaaagtacatcagtgaataaaaagaatgtcaaaggctgtcagtagcagaagaggaaaggaaataggaaaagaagagaacagaatgagatgagacatgaagtagagagagatgagagaaatactatgctgggtgaaagtgattgggaaaccatttctgaccatgtatttcaccacactcatcccaggccttgcagcattgttttgaaataagaagcattgatattaataccaaaaagccaatgattttaaccagtggattatttgggacaaatcaaaggtaacaaggggtcaagataagcccatacgccttatttgacttgattgaaagattcattctcatagtgtctattctagattaaaactattcagaccagtctatacaacataaagtttggacattctttcaagagaacagcctttcatttactttagtgaataacaatatctagaaaggccatctgcttcgaccaaactttggaaaggatgcatttttaagattaatggaggaagaggatacctgcccaactagctatgttaaccaattcaacaccataataataattgtcaacatttatatagtttaccatataccagccattgtgcaaaacactttgcatacattctcacttaatcttcatgccagtcctgggaggtactcttatatatcctttttacatatgaggacctgaatcttagaaggttgagtcctttgccaaatgaaagcttaacagtaaagaaacagtagaatccagactgtctggttccaaaacttgtgcttttagccacttcacatattgcttctgtcattggtatgacagatgtcacaggcagatcatactcaaattctgtaatatgttctaaataatacaaacaatataactagaaaatggtagctaacttatatagcaggccccactgaaataattcaaacataaaaatgacctcttggcatttgattatctttcaccttagacgttgataaaccaaaccattcccttaggacaatatttttctgtccagcaaagcatttctcttgccaaagtataattttgttggctacatctatctcctccaagccctggaatcagacctaagctagtaaattgtgctgtcctggcaagacactcatcctccagggcattgtatcaggctaaagtaatacatcatgttgcttcccactctgtctgcccatttctccaaagagtcctaaaacagtaatgtttctgctttgaatctcttgctgttatcgcccctaggacttgcactttagcttcctggccttggaaaccaaggtgagctgaatagcattcttttcacacctgctcttgacttgggcttccaaaagaaaggaggctttcaacaaaggggcagccccatagaactctgcttcattccttttagactcagagaaacaaaaacattgacttgattgggtaacggaagactttggtcttttgggttatggggatttagtagctgagaaagagttgctgagtagtgagggtgggggcaggtcgtagagggccataattcctagaaaaagatgaccttgtccaattgagaggtagtgagaccagcaaacactggcaattaaaaattaacacaggccaaaagtgaaatcgatgcctaaatttgataggttttcaagaaaagtttatgacatgcagttcatagaaaagagaacattttctcagtgttcacttttaagatgccaaaggtcaatcttacttggaaagatccttccacagaaaagcagaaatgtacagggtctcctagcaaagtataaggcaggcaatagatatattagaaaatcttttttaaaaatcctaatttcaaaatgttttacagcagctttggtactacagtaattcacttaattccctaatatgtgtttgagtatatgtgtgtacatactcatgttattctaaacataaaaagatgtggccagttgacagtagtaaaagcttctttccatatctttactaagcacatgacaatgtataactcaataattgctttaattcaagttgtgatttcaatagacaaaaatttaaaggcaaaatattgactctcaaaaggttttcaagtaaatgcaaatcctatgaattctggaaatatcaaccattcaatgtattacattggggtcttggtaataatataatcacaattttccttatattagaaatttatgaaaggactcaagtcttccttataaagccatcagagatgtaggaaatattgggaggtgattctcccttttccacaaatgaaaatagtaattaaaatgctaaaatgaagactactttaagattattcatatcttatacaattttcctactagtatctcatgcaaaataatgcaaaccaaatgaatttatattaaataaggcggcccagggagaaaatcttgccctaaaaaactaaccgttccaagttattctaaattggcaatgtgtctggagttctgaaataaataactggtgtgaaaaacctaagtttccagattcttcagatcttaactgtaatatttggttgtgtaatcaatccttagttaatctaagtgaaatgcaggttcatttttattagctaataatttcatttgtgttttttatcagacatataattgaacattttctagaaatagcccttaaaatccaggttaattgtcttacctcttttttcctcctttcaaaaaaaaaaaaaaagggatcaactttggaacctcttcctgttagcaaatttctaaagaatagttttattccttagaactcaaagaataacaaatgtatatcttaagaactagttgcttcccaacttgaaaacgtttgcgtttttttattatttaaatactgactcttcaaatcaatgtcttccctttccaatgatagagttgaaatagttaaaataaaactttctcaagaagcaagatgggaagtttcaaaggaaattaaagctgaatgcattgttccaactgcattcccagaaatctataagaaacacaaacttatgcagcatcagtagaggaggtagtaccatttttgccagtgatgaacaaccagagtcctttgttctagaagtgatgaccccggttaaatctcagcattacacatttcccttcagagatggaggggagcgagttgcttgcatccattacaaaatgtgagactcagctaattggtgtggttttgatgatgccacagttctgcccaaaacccttgtaactagcaagtttgccctgaagattattgaattactccccgaccatgcattatttaaagggaagtgctgttattatagaagccagctgtttaaccattggaattctgtctgttggccaacttttaagatacagcagtacattgtgactaaacattatgtctagtcatggaggagtcaaagtctaggataggtggtggccaacttgtctggtaagcaatctttggtctacatgctatgaaacctttgaagcaaaactgacaaaataaatatataaatttttaatgtcaagactttgtcagcaagaaaaattatgtggaatgttatacatgcctattcattctaacagttgagtaagtgcatgaacacttcctcatgccagtacaacagaactgttggaccacaccttgctgtagaagggactataccaggcaccggtctttttttttttttttttttttttttttttcgtagcatcgagtaaggacaattaaaaagtgtttagagcatcttggggaacttcaaatagatagaaaacaacttttcaccttctaagttagaatatatttgcacctcttccttgaagtggtttccaaccatactgaatattgggcccaagccagttttctccttcatctcttcacttgttatagaatgtctggaatagaaaagaccatagcagtcatccactgtgttcaacataggaatcttctgctaggatctctgacagatgtttattacagcctttacttaactgtttcctgcaatggggagttcattacttttcattgaaatctgtcccatatgtaacacttgtaaattcaaattgttaggaatgcttttcttatattaagccaatatttgtttttcattcacctaccagctctgattctgcccactgggacagaattatacagcacctaatgaagagtttctcaaggcaaagataaaacaattagttccatctcatttaaaaattagtcgaaatgacaatagttataatttagaagtcattaaaaataactatctcaaataggaaaatgtcaaatactgaagccaattgttttattagctttctaataaattacattgtatcaggcctctacctgtagaccatagcagcaaatatctttattgtggttctggaaaaataaacaatatgtagcatttgaagatatggaacaaaactttgaccctcaactgtgatctttcaattggcgagaaatgagttttttgtttgttaaatattttgatgtagagccagaagaaatcaagcttacagggcacttcaaaagatgaattaaacttcaaaaggcaataggtaaacacttgttatattcatatattcccaatgacgtacaatgagtccattgtagacattatgagtagacaaagaaaaacatctctctaggattgtggtagctagagataattggtaattatatttatggcaaaatcgaagtctgtataccactatttcaacaatattttttaaaaaaacaaatgtagacataagataaactttctctatggaacattgcagaaaagtcctaaaattctctgtacctaaacccatcgatctacagactaaaaagcatgagctcagagtttagatgagcttagagtttgactgagtcatgtcaaattctgagctcatttaagcaaggtgataaaccagatgcctggtatttcctgttattttttttgctgtgatgatgatgactttctattttacaagaggaaatcgacatgtggtgagtttcatggttgtttacagtcaccaagaagtgaatatacaatcatagaaactctctctgccatcccaagatgaaggttaatgtcttcctcttatagcagacaaggagctccagcacctgtgggacctcagaagcagaattaagttagaggagcttgaaagggaaatactaaataggtcctggaatcccaaagcctgcccttgtctatcttcaaaggctaaccatgaattttgaaatcagttgtttctgagttggctaactttgaaagtttctggagctcttcctaccagcccacccccaaacatcaagttaccatttcataatcaacaaatgaatcccaattacatcccattaggaaatttatagtttcaacaaagggcaatcattacctgtaatgggcaaaagatacaatgatcacaaaataggccaagtcaccttttccttcctccccacccacaagagagaagccaaagggtatcagctgtgctttactggctagccacttagcaaaaagtacgtagaagtcctttgtggattacaaaggacagtgtaagcccatttgtgtctttcctctaatttatagttccaggaaaagattataaaaacaaaaaaacaaaaaaatattgtttacattgctcaggggacccgctgagacatggcttgccaggtcccagtccctcccaaatgccacagccattgggagtccacagggtctgcttcgagatctgcacagcagactctgcccagaaagaccacaaatgaaccctcactgagttactacctccagctgccctaagaatgacaataaacctgccttacagaaggaagcagccaccagggtcctgtgccaagcatcaggaaagcatttgggttcttagaggttgccatgaatgctggcccttccagcagggaggcagccaaactggtttggtagcaggccattaccatgggcctgatctcccccaatgagggagtgcaaaatacatgaggattctgactttccaaaccctatcctcaagtaatggtgtcattattacagaaacatagacttgtgatttaaaacgtaatgttttcttctgtcaggaattaagattgaatacatgtcagattaataaattggattcttctgtgcccgtgatttataaaatttcttccataaagcctgagcatccgtggagaagaccaggagagataagggaggagaagagaaagcaagtttctgtccctctgcccttgcctgagctagaacagaatcacatgaaagatggacatttcgttcactgtttcagtttggcagttactcaataagaaatagaattcattgttctggcctcttggggtggtaagagagggagccctactagattggtattgtaattagtttcaagtcccaagacttctgtacacggtcaatagtgacaatgcttcttcacaaaccacataggatcctggaaacggtactcgcagaaagctggctatgatttacttacgacttacactatatgtcaggtgctgtgctatgcattattcatacttgatttcatttaatcctcaaacaattcttacaaggaagatattattaactccattacataaatgggaaaactgaggcccagagagcttagtgacttttccagagtcatacaacagttctcctgggctcctcaatgaggcacttgggctttgcagcaagtagatctgagtttgcatcttgactccacgacttactgcatgaatgaccttcagcaagtctttgccacctctgagtctcagttttcacattagtaaaatgaggagccctttccaaacttaaaaactctttgatgttcaacctgactatatagtcaaagcagttaaacaaaaaggcaaacatgtgagctgtcctgcttataaaagcaatgcagcgttgccaacaagattaagaaaacaatgcatgatcttattttaatatttctatcatcctctgaagccaatatataagaaaagactaggattgggcatagacaagatccttgcctacaggttgcaaaacttggggagagttaccacaaatagcatggtgaatgagttagtgctaatgagtgtggtacagactccgggagacatactggcattcagaaagatacgtggggtcaggaatcattggggaagtttcaagaagaggttgagacattgcagaatatgtaggttgactagctgtggggagaggcaggagctgggtggaagactgaagaaagcagattgcaccctaacatgaggccactctgtttgatttgtgcagacaagcccacagggtatggctccagcagtcggagggcgcctcagacaggcatcgtggatgagtgctgcttccggagctgtgatctaaggaggctggagatgtattgcgcacccctcaagcctgccaagtcagctcgctctgtccgtgcccagcgccacaccgacatgcccaagacccagaaggtaagcccacctgggtgggatccagccatcctcaagtggtctctctcttgtgcatgtgggtgggccaagcagaaatcctgccccatagtctcctggcttacaagtcagaaaagctcctttgcaccaaagggatggattacatccccatctctttggtcactctgcattgcaaatttcccctcccaccgctatggacgatgtgatgattggaagatgttacaaaacagtggctaaacaaacatgggctttggtgtcagacaaaagtgaagtcctggctttctcacacaccagcttagagcccttggcaaataatgtgatgtacccaagcctcagtttcatcagtaacattgggataataataatatctaccacatcagtttgttgtcaaaattaagtagctcatgcatatactttgagatgcttttcacatgcctgcataaagtaattgttggaccatcgttaatgtctgccataattgcacttaataacaaagcttgtaacctttcaagttctgagattctacaatcttccaaagaaaataaaaggctaatgggaactattcaaaattcatattcagtagcaagcataattaaacatgaaacattaaaaatagaaatttctgtttggctataagaatgcctagacatttgtaatgatcaaaatctgcaggcatcattttctaagagctagactgtaaacaaacctcagaggtaccaactatgccatcagtagtacataaaacatctgatgcacatttagtcacttgatcgatttctcttgaatgagtgaacgaatgaacaaatgaatataagagattaaaattttagccattaagtagaaagaataagaactaaagagaaggtaaaggaggaaaaagagaaggcaaggaagttgagtaagggaagaaatagctctcgtttaagtattttggggactctgttgaaaaaagaaatgccaacatgtggttttaatctttggagctagaactaataatattgtgcaaaagcacaagatgagagatcaagaagttcaccatgacaccttcgctgcttcctggtcttaaacctcagctgaggctggaagaggaccatggtggcttattggagatgtgaccccagggagcccctctgaaggatggaaggggactgggcaagacccaacacacacagaacacagtagccactggccaggcaggaagcaaggatctcagaaaagacttttaggtgaatgtggcaggaaagcgtgcttgctggggcaaaggcagattcattctttctcttcccaggtgacccagcgcctcttggtttctaactggggagggggtaggtgtcaagagatgagtcccaaagttctggaatggtgggtcttgtgactgaggtctagacccctctccagcatgagtgctgtctcctgcatcatatggagcctgggcattctgagctcattcaaagggacaccatgggaaccacttgttctcaatgcaattatttttgtgatgtttacagtatcagcccccatctaccaacaagaacacgaagtctcagagaaggaaaggttggccaaagacacatccaggaggggaacagaaggaggggacagaagcaagtctgcagatcagaggaaagaagaaagagcagaggagggagattggaagtagaaatgctgaatgcagaggcaaaaaaggaaaatgaaggacaggaggattaaacagacagaggcaaggatgatgagagaggagcagacagcaagaatgaaaagcagaaaatacaatagaggaaatgaagaaaagtaggcctgctggagctagatgatgatgtgatggaaatagaagtaaccttttagagaatctcgctaagaaacatggagaaaacggaaaagaaaaatgtaatgccctagaaagcgcaaagaaagacagtggcaaaaatgaaaaaaaaaaataaaaattataaaagaggcaaaaaaagacacactattctctgcctctaaaacacaattaaataaaagaatttaaataaaaattaaggcttctatatgcatttttaaattttgtatgaatctgttatggaagaattgcctatgtcaatatatgttcagagttaaatattagccccaaatgctcagcaagactgaattgtgtcatagaagttcccagattcccttttcccgcaatgtcattggaggctgcatttcttagtcaagtccagggtttaggccaaagggcatccggtattgcctaaaaccctgtgaggtctgtgaggtaacttttgagaagaggtcactgcactcttcatcttttttgcactttggaatcagatataaaagatgtataagtttgctagggctgccataacaaagtatcataggctaggtagtttaaaccacagaaattgattttttcatagttctgggagttgaaagtccaaaatcaaagtatcagcccttgcaagggccttagagaaggctctgtcatgggctcctcccctcggcttgtaggtggcctccttcttctccccctgtgtcttcacttcatcttccctccatacatatctctgtgtctaaacatcctctgtgtgaaacaacaccagccaggttggatttgggcccaccccactgacctcattttaacttaattatctctgtaaagactctgtctccaaatacagtcatattttgacgtactgggagttagggcttcaacacatgaatttggacacaattcagccagtgacagaagacttctgatctctgatgataaccactgcattttgattacagctcctagaaaacactcccctccaccaccccaccacagatctatttttatatctgaaaccctgagtttctgctccatgagaaccccaggaacatactatgttagatctggaagaagcctcagaaatccccttattttgaagactaggacactgagatccagaagtgggtaaagatgtgcttgggttctaagctgctcttcttttggccaggagacaacagcacataatcaaagtgggtcaactaagaaagaattccagaaggaaaagagagggcagaaatgaagggagagaatgagagcaaaagtgctggatttccctgagggtgaagaaaagttaaatagaatcacagaattcagattttagagatcttctccttcagatcccttggtttaatcagtaggattggggtcttcatagataataaagcaaaaactctcgccatcctccaagttgtgaattagaagagctgagaaagggtacaagacggaagttctctaccaaacaaatggtgacattttggggtaagaatatgactaacccagaagtgaagcatttcatccaagtagtctattttgaagatgtcatggtataaaggaacctcctttctgcctggtcctccatgcctctgccatgctttttactccaggatcaccctttctagtggttcactgaaaacccaggattacttaaatatgatggacatgttcacggctcaatccaggaggaaaaggtcgaactgaaagcatgccaaagccccacatgggagccaagccactgctgctgtggttgcaaagtggatcctggcttatcagagcagagagaagccaggctcgtgccttagcccaagtggccagtcaccttattcaggagatactaagttctccagctaagacatccatgctttgggaccagctgcagacagaagccaattcctactacaaccatcaccttagagtagcatatagacacagatggctcttcaaaggaccacagttccatggaataactaagaattcatgtcctgtggaaaggtttgaataaactataattatacccaatcataaatttcattcaagaagaactaaagcaaaggcaaagacagagagaagaaggaaggaaggagggagggagggagggaaggaaggaaggaaggaaggaaggaaggaaggaaggaaggaaggaaggaaggaaagggaaggaagaacaaaaagactttctagttaaagaatgcttaactagcaaactatgtactataagacagttcttttcggaatgagttttatcaactctaaagcaattatcttgaatgcctacatgtgattactgaataatatgaaccaagaaaacagaaagaatctatattatctttccatttccttctttccagtatcaatacccaagcctctagtgatacatggcatataatgttggatggatggatggatggatggatggatggatggatggatggatggatgaatggatggttggatggacaaatgagtaacataggctgatgaatagtggtagaaagacacaccataaaaacaagtggcacttctgagatgaaatgattcctattctcctacacaagacagtgaggcaagtacagagtaaaaaaggaaaggcataggagctatgcttatacaagtattgtatgtttggaatttccttcgctggccaaattgaaattgttcaaggacctattgctacaggtggcaactggctaagaatttcatagtgaatattatacacctattactccccttaatgtttctttgaagtaagcagaatattaataatcatttaaaattccagtgtttcaacttcaattgtttcctagggcaaattgataattgtgtgtaaaactaattggaatatgtatggaataatcatcctgaaataaaattggtgaaaagtatttgttattgggcatctacaatgtgcaaacctctgtactaggcatgaacaagagttataagcattggagaggctaaaatatagtccttaaggctgggcacagtggctcatgcctgtaatcctagcactttgggaggccaaggcgggcagattgcctgagctcaggagttcaagaccagcctgggcaacatagcgaaaccccatctctactaaaaatacaaaaaaattacctgggcatggtggcacgcacctgtaatcccagctactcaggaggctgaggcatgagaattccttgaacctgggaggcagaggttgcagcgagccgagatcctgccgctgcatcccagcttgggtgacagagtgagactctgtctcaaaaaaaaattaaataataaataaatagtaaaatacagtcattaagagtacaaaatgtagattcagactacctgggttcaaatcttggctcttacttgcattgtggctttgggcagatcatgtaacttatgtgtgcctcagtttcctcatctgttaaataggggcaacaactgaatctaccttattcagttgttgtgagggtttattgagattgtgtgtgtgtatgtgtgtgagtgtagtgtgtgcatgtgtgtgtctgtgcaaggagtgggaggtgtatattcagagacacatattacagcacttaaaatggtatctagcacttagtaagcattattcaagttttagttaacattattttacttacctctgaaaattggagctatgtgaaaaagaagttggtctcctgaagtagaagccagtcttgtgtcaccaaaaacttcaagcccaagcttgccaacgcttttccatgatgtggtagtagagtttcaagcatgtggtaggataagagaactcaatgacctaagaaccattccaacccagagaacccctggttctatgaataattccaacttaaataggtagcttggctctcccaagtgagagccattgcttctgtttccgggtcatataatgaactttcagaaaaccaccatttttctcaaccagttaaaattaagtgtaatacgtgctttcatttcatggtgcctggggaaaatttaattgtagtatgaactccagttattggtagtcttaagtaaaattgccaaaataaatagaaatgcaggatatttctgggctcacacagcttccgggacactttagtttcttgggctgccaatccagtgcctttcacaagcatttgatcttttttcaaacatctcttgaaaacaaacaaaacctcacacagcttctaatgtgtgcactgttcgaatgtaagggtggaaaaggaggcaaagaaatgagctcccaaagagcaattccccttctctcgcctccatcccttgacgacctccctcccactaaagggaaacattgttttcttaggtaataaattctgcaatttctcaagtccattaacatccactgggcaagatgagatctattctttttatttgcccataggaaaagaatagtgcttttttgcaatattcactagataacacagagttgacttttaatccaagggcaacattgatagtctctagttaaaggggaagccttcaggagcaatgaaaagattaatagttttagatgaagcagaatccaaatccctttttatgagttttgaaatatccagtttgtatgctcacctcaatacttaaagcccagttactgattcctttggcctaagcaagacaggtcaatttttaaagagggagtagctgaggttagcaaaaattctccaggtccacaaaacttccagacctgcaaggtgaaaatcagcttttctgtcatccctaaaggcctaactggaatcagaacttttccctgatgcccacatatttggaggtccttttttaatgggactccttaatgcctttagtgccatcccattttcatccagtgtccaaaagaaatgatttaaaaatataaacgtatgtttaaattccagaagagagaaatggagattgagaacaatagggaaatgatgagagctatgggaaaagaggtttatgagtccatgtctgattcttccagagagcccctaagaaagttcttatcataccaggaactcaattataactttcattgcctattgttagatgagtaacaggagctagaaaacattttggaaattcccatctttatttttttaactaatatgattatagttttaagaaccattggtcaagaagctaactttttaaaaagtggaagtatgatggttagaaataagaatgctaaaggtgcatcaagctgattttaattctaaatgtccttggcagcaatttagaatctgtaataaactacaccaaacagttttgaggggaaggggattagtttctccccttccttcgtgtgtgtgtgtgcgcgtgtgtgtgtgtgcacctttgtgttctagcattgttgcacccattacagagctggggggaactattttccaaaattataggtgagaacagtttcttggattgtctttcagtgaaggtaaattcctctgtaaaaactaaccatcattcagtaaaaactgcaggattcctttgtcttctcaaaagcctgtttctcatcctaaattaaaaattattcaggaaatagagaggacattattggaggggtggaaataagttggttttctttttattgtatcttttgaggatccagggacttctaccatttcccatctaacatacagagaaggattctctaggtccctgtctatagactgcagtaactttcctatagaaccaatttgcaattttagaaatttctaggtctaattattgacccattacaaccaaaggtcaatgcatccagccaatcttccttctatcatcccctgcccttacttctattagggactgggattacaggcaaaacccatcaaatgcctcttctaccactttcccatttcttaaccattagcctctaacttcctctattcagtttctcatatgctttcatgcccattgggtcagataaaggaacattcatttatttgagtaggcatctgttatgatcactccggaaaaaagatgacaatgggttaccttgtcctcctgggcttctctaactgacatggtcaaaatgcccatatgaagataagatgttaagagcaagatttatgaaaagctgagtatgatggcagctcttgtctcataaaataactcgaaagttcccagtgaaagaccaagaaattttacatcaaacccaaaccggccaaatggtccaagcttccaagctgggatccatggctaaagtttctacaaaattctgggtacaatgtataaacattcacttggggctttctgtctagccagcaccaagaggtcaagtaatcaaggaccaactagccctgccatctgtgaaaatatgtgctattttcacggctttagttcacaattatggcaagacaaaagttccaaataattaggagcaagaccatggcaggttgacggttgagtaaggttctcaatcagccgacaattgtagagttggggatgtgcaatgtttatgtcatggtgtaagtatgtggcatgcttgactagcttgtgaggcactggaagactagaaggaatgaaaaatatgaatgaatcaataaatgcatagtataattactgttattttgtcagtattgttttacctaggtcactattgaatgctctgatttgtctctttataaataataatatgttttcttcttcaaaagaacactaggatgaaggtagaggtgcttttggcacaatgccacaattctgatttttttaaaactgtatgcatgcataaaatgttcttgagccattctctgccttggaatagcactggctggcattctgcatgtttacttttatatgctgaaggcccccatcaacctcaaacagaggcaaatcaatttaacttctcatagtgttattttgttcatcctaaaagttcaagagagccttccaaacttccaaaatttctctcaattcagtgaggaggaaaattcagaacacagcatttgaatgttctgcccagatttgtcacacacacaaggaatgagtgaaagagggcaacaccctttcctcctaaccctgtgaactcatcactattgcattgaaatgacaccaaaaggtaaaaaccctaggcctcacatctcccaagaacactgcaataggagttactgcatacaccagtttaagtaactctagcataaattgtatgtcagatgaaacaatggcattttggaggcttaagagaaaaagaataatcaaatccagtttttaggtactaatgtgctgaatctttagcacatagcagcaaaattgctagaatctggtgtttcactttttaaaataccacatttgaacctttcagcaattccaaaatcaactccctctgcgaaagataataagcttaaacattttttaaatttaaaaatgtaacacaaacaaacagctaagcaaacaagctgcccataaaatcaacagtctggggagccctgatcctgaagtattttacaacatccttcatgactattaaaggcaacataaacacctcttgtcagcaagggaaactacccttggcatttttttttctttgttccccaggcttttaaaccattttgatagagattttttacatcacaggcagaaatatttgaaatagagtcaggtggtagtctttaaaagagtaagaaagttgctaagtcaagataatcttggaataaagtcctctgattcctggggattcctagggatgccccagtcactagaaaacagagctgtaagtccactctcccagcactcaacggagctccggaaaccaaggagctagctactgtttccccacattcagccagagaaagggcagcactctagcatgcaaactgctttgacaatagtaacaattaaaaagtaaattaaaaagaatcataatagctgatattgattaggtacttgccctgtggcaagagctatagggaatcacctcatttaatcttcacatgaagcttgcagagtgagtaccacaattatcactattgtatagacaggaaaactcaggctgagtatggctaagtgtcttgccaacgtcttgggctaacaagcggtcaagcagaatccaaacccgagatagatagaccacagtgtgctaatcaagcactgcactctctcctgcatttcttagttgatatttaccatatacaatctgtcacttgtatgagatggcagggggttctgtgctatttgtccttgtagagaataccacaggaagaaagtaagcagccatgcaatatttgctgttgacctgaactccattccatcattcctgcaggaaattcgcatccattaaatgagcatttcctggtttgccactttgctcaaacactttgcttggatctggagaggatatagaagtgaaggaaatatgctacctgctctcaaggaacttatgttttagtggagagacaaacatgcagaatttactctacagaacatcaatgcttgagcaaatgtagacccagagagggctcttacagcacacaagccagaacagactgatggtgctaacaattaggttcaaggtttttctaaacagtagactctcctgcatacaactataccgcatgccaggtaaatgactgagggttattacatccaattataacaccactgtgatgtaggtgctcttaccccacactttcattttacagaagaggaaattgaggacagcacaatgtagtgattatcaaaggtcacacgactactgtgtgggagagctaggatttaaaccagatgcataagatgaggtcctccaagaaacagaagatgagaaggtgttaaatgagcaggggttttattagggggaattaatgtgtgaacagaaataggggaggataggcaaagccatcagattgcaaggcaagcctaaccccaagggaaggagagagagagagtagattggttggaaacatttttggtgggtctatggtctaaggaaagttcagcaaagtcatcatggagtttttgagccaaagttgggcaatacagttgcccaacaaatttctgtgtttctcagaaataggtctgcctcaatgtccccaccatacttggtcactggctcttgggaggggcctgccctgttccaatccactagagccaaagaagagccgttgtactggcagggggtgggggaattcctacaaccacataaaaagtggggtgaggtttccagaaaaaaacgtgatgctgggctaaccaaaactgtgtccagtaagtacatatccctcactctgttaaagaagcagccacataaacaaggagtacacgtttctcaaaatgtgcaccttgttctttggttttgaagtcacatcccaaagtgctgagtagatcgcatgaccctcgctttgcctggctgccagagaggaaaggctgatccaactctcctggaatttgaacttgtgattccctgaagtaaagagatatcaaagttgatactgagacatctaaatcatcctccaccatttcacatgtccccaggccaagccagcaaaattgctatagcacatccctttcaacaggtaaagggctgatatctgagccctctttccaatcatccactgctcttttcttctcattttgccctttttgggagcaggtcaatgctgagttagtactttatgctgtacaataagctgctgatattccatgctggacagaattttcccagtattttttatagagtgccaggcttttcctagacttcatgtcatacaatacttaacttgtttggagtgggtggagatggaaacatagtctattgaaaacatcactgcttcctccctgaagtttaaagagcctatttttatccttttagattctatctctcaggcaaaatctcataaagataagtggggaggaaaaaaagggggttataatacctagggagtttgcttttgctaattgaatactgtgctcctagacttctataaataccattacaaatgggtcccagcttgtggtaatactcaccctcctcattgagtcttctgtcccatggcacagcctttccctccaaactagcatctacccccatctggaagcatgggcagctcatgatattatcaactattgctattggaaagtgatttggacttgaaagcactagatattttttacctcttggggaggcagtttagcagagtggttaactggtgagctccagaatcagaaggaataggtccaaattccaaccactattacatctccatcataagaaattaggcaagttgtttatcctaagtttcagattccttaaagataaaacagtcaagacagtagtacttatccctgagagaagtataggaaacaagaaaatatatgcaatttacatacatactacaatccccagcacatgacaaatgttcaagtaatgggaactgttattattttagccctttgtctatcagtttgttcctctgtgacctcaagcacattactaaatgttagcgagcttcagcttgtacgtgggactgacaggaataacaccgcatcacctcatgtggtgattgtaaggattcagtgatattattttgtaaactgtaaagcctttgcaaatgttaagcaagattattattattgccgttgttattagtcctcagtgatcttttttttttttttttttttttttttttttttttttttttggagacagagttttactctgtcgccaaggctggaatgcagtggcacaatctcagctcactgcaacctccgcctcctgggttcaagcaattttcctgcctcagcctcctgagtagctgaaactacaggcacacgccaccacaccaggctaattttttgtatttttagtagagacggggtttcaccatgttggccaggctggtctccagctcctgacctcaagtgatctgcccacctcggcctcccaaagtgctgggattacaggtgtgagccaccacacctggcacagtaatcttaattgaaaagtctgtggatagctttccaaaggaaagcttggagcttggataagaaccaagagataatgggagaaggtgaatggcctcttcagggccttttctagcaccctaaatatgcgtgtctgtccataatgggtaatcatatatatcacaaatcaaaccctccacaaacttatttcctaatgtgtttgttaacctttccttctaaagggtaaacttctttaaccaaccccagtgagctggaggatcaatgttttcttaatagtcttaccttcgttggtgtcaataggaaacagtatttactcactactgttttccttttaaaaatctgtctagttgcatactagaaacagtttcagctggtttgtttgtattggacaagctgctgaagtgaaaagtttttgcttgactgaatgtgagacagtttcataactcttcaagaagtgcaccaaaggtgggtgccagctctgatgacggctgcttctaacatgcctccacttgccgcccattgtcaagggtggctggcgtaattaagttaagacaatgagcaaagcaacagatgcaactgagacctagtccctgagtgcttttgttttgtcactgtcattgtctgcaacaaagaagtcacatgtgacagcctgggaagagagccaaatgcaaaccagacgatatcccagctggtttgaatggcctccaccgtgcacgtgtgtgcatgggaatcatgctacttggtacagcatctgcttcactcaagtgagtttcagcccatggctttgctgtgatgctgagacagacccagaagaaacagaccagggaatccctccgctcagactttacactttataccttgtgctttgagagaaaagaaaaagaatctctctattggagacaaaaaataggatgtatgtggttggtcaatctaacctcaattctttttgctatagccccccgctaatttaaagagtgaagcatagatggtatcttaatgttttcttgtagaaatttgggattaatttggcttgagaggaagaatggagattaaacgctttatgaggctttcttttaatttgttcccatttcattcctgaatattttcttagtttgggcattgcagatgtttaaaga

SEQ ID NO: 50 - DNA, 86925 bp, Homo sapiens
tctttaaacatctgcaatgcccaaactaagaaaatattcaggaatgaaatgggaacaaattaaaagaaagcctcataaagcgtttaatctccattcttcctctcaagccaaattaatcccaaatttctacaagaaaacattaagataccatctatgcttcactctttaaattagcggggggctatagcaaaaagaattgaggttagattgaccaaccacatacatcctattttttgtctccaatagagagattctttttcttttctctcaaagcacaaggtataaagtgtaaagtctgagcggagggattccctggtctgtttcttctgggtctgtctcagcatcacagcaaagccatgggctgaaactcacttgagtgaagcagatgctgtaccaagtagcatgattcccatgcacacacgtgcacggtggaggccattcaaaccagctgggatatcgtctggtttgcatttggctctcttcccaggctgtcacatgtgacttctttgttgcagacaatgacagtgacaaaacaaaagcactcagggactaggtctcagttgcatctgttgctttgctcattgtcttaacttaattacgccagccacccttgacaatgggcggcaagtggaggcatgttagaagcagccgtcatcagagctggcacccacctttggtgcacttcttgaagagttatgaaactgtctcacattcagtcaagcaaaaacttttcacttcagcagcttgtccaatacaaacaaaccagctgaaactgtttctagtatgcaactagacagatttttaaaaggaaaacagtagtgagtaaatactgtttcctattgacaccaacgaaggtaagactattaagaaaacattgatcctccagctcactggggttggttaaagaagtttaccctttagaaggaaaggttaacaaacacattaggaaataagtttgtggagggtttgatttgtgatatatatgattacccattatggacagacacgcatatttagggtgctagaaaaggccctgaagaggccattcaccttctcccattatctcttggttcttatccaagctccaagctttcctttggaaagctatccacagacttttcaattaagattactgtgccaggtgtggtggctcacacctgtaatcccagcactttgggaggccgaggtgggcagatcacttgaggtcaggagctggagaccagcctggccaacatggtgaaaccccgtctctactaaaaatacaaaaaattagcctggtgtggtggcgtgtgcctgtagtttcagctactcaggaggctgaggcaggaaaattgcttgaacccaggaggcggaggttgcagtgagctgagattgtgccactgcattccagccttggcgacagagtaaaactctgtctccaaaaaaaaaaaaaaaaaaaaaaaaaaaaaaaaaaaaaaaagatcactgaggactaataacaacggcaataataataatcttgcttaacatttgcaaaggctttacagtttacaaaataatatcactgaatccttacaatcaccacatgaggtgatgcggtgttattcctgtcagtcccacgtacaagctgaagctcgctaacatttagtaatgtgcttgaggtcacagaggaacaaactgatagacaaagggctaaaataataacagttcccattacttgaacatttgtcatgtgctggggattgtagtatgtatgtaaattgcatatattttcttgtttcctatacttctctcagggataagtactactgtcttgactgttttatctttaaggaatctgaaacttaggataaacaacttgcctaatttcttatgatggagatgtaatagtggttggaatttggacctattccttctgattctggagctcaccagttaaccactctgctaaactgcctccccaagaggtaaaaaatatctagtgctttcaagtccaaatcactttccaatagcaatagttgataatatcatgagctgcccatgcttccagatgggggtagatgctagtttggagggaaaggctgtgccatgggacagaagactcaatgaggagggtgagtattaccacaagctgggacccatttgtaatggtatttatagaagtctaggagcacagtattcaattagcaaaagcaaactccctaggtattataaccccctttttttcctccccacttatctttatgagattttgcctgagagatagaatctaaaaggataaaaataggctctttaaacttcagggaggaagcagtgatgttttcaatagactatgtttccatctccacccactccaaacaagttaagtattgtatgacatgaagtctaggaaaagcctggcactctataaaaaatactgggaaaattctgtccagcatggaatatcagcagcttattgtacagcataaagtactaactcagcattgacctgctcccaaaaagggcaaaatgagaagaaaagagcagtggatgattggaaagagggctcagatatcagccctttacctgttgaaagggatgtgctatagcaattttgctggcttggcctggggacatgtgaaatggtggaggatgatttagatgtctcagtatcaactttgatatctctttacttcagggaatcacaagttcaaattccaggagagttggatcagcctttcctctctggcagccaggcaaagcgagggtcatgcgatctactcagcactttgggatgtgacttcaaaaccaaagaacaaggtgcacattttgagaaacgtgtactccttgtttatgtggctgcttctttaacagagtgagggatatgtacttactggacacagttttggttagcccagcatcacgtttttttctggaaacctcaccccactttttatgtggttgtaggaattcccccaccccctgccagtacaacggctcttctttggctctagtggattggaacagggcaggcccctcccaagagccagtgaccaagtatggtggggacattgaggcagacctatttctgagaaacacagaaatttgttgggcaactgtattgcccaactttggctcaaaaactccatgatgactttgctgaactttccttagaccatagacccaccaaaaatgtttccaaccaatctactctctctctctccttcccttggggttaggcttgccttgcaatctgatggctttgcctatcctcccctatttctgttcacacattaattccccctaataaaacccctgctcatttaacaccttctcatcttctgtttcttggaggacctcatcttatgcatctggtttaaatcctagctctcccacacagtagtcgtgtgacctttgataatcactacattgtgctgtcctcaatttcctcttctgtaaaatgaaagtgtggggtaagagcacctacatcacagtggtgttataattggatgtaataaccctcagtcatttacctggcatgcggtatagttgtatgcaggagagtctactgtttagaaaaaccttgaacctaattgttagcaccatcagtctgttctggcttgtgtgctgtaagagccctctctgggtctacatttgctcaagcattgatgttctgtagagtaaattctgcatgtttgtctctccactaaaacataagttccttgagagcaggtagcatatttccttcacttctatatcctctccagatccaagcaaagtgtttgagcaaagtggcaaaccaggaaatgctcatttaatggatgcgaatttcctgcaggaatgatggaatggagttcaggtcaacagcaaatattgcatggctgcttactttcttcctgtggtattctctacaaggacaaatagcacagaaccccctgccatctcatacaagtgacagattgtatatggtaaatatcaactaagaaatgcaggagagagtgcagtgcttgattagcacactgtggtctatctatctcgggtttggattctgcttgaccgcttgttagcccaagacgttggcaagacacttagccatactcagcctgagttttcctgtctatacaatagtgataattgtggtactcactctgcaagcttcatgtgaagattaaatgaggtgattccctatagctcttgccacagggcaagtacctaatcaatatcagctattatgattctttttaatttactttttaattgttactattgtcaaagcagtttgcatgctagagtgctgccctttctctggctgaatgtggggaaacagtagctagctccttggtttccggagctccgttgagtgctgggagagtggacttacagctctgttttctagtgactggggcatccctaggaatccccaggaatcagaggactttattccaagattatcttgacttagcaactttcttactcttttaaagactaccacctgactctatttcaaatatttctgcctgtgatgtaaaaaatctctatcaaaatggtttaaaagcctggggaacaaagaaaaaaaaatgccaagggtagtttcccttgctgacaagaggtgtttatgttgcctttaatagtcatgaaggatgttgtaaaatacttcaggatcagggctccccagactgttgattttatgggcagcttgtttgcttagctgtttgtttgtgttacatttttaaatttaaaaaatgtttaagcttattatctttcgcagagggagttgattttggaattgctgaaaggttcaaatgtggtattttaaaaagtgaaacaccagattctagcaattttgctgctatgtgctaaagattcagcacattagtacctaaaaactggatttgattattctttttctcttaagcctccaaaatgccattgtttcatctgacatacaatttatgctagagttacttaaactggtgtatgcagtaactcctattgcagtgttcttgggagatgtgaggcctagggtttttaccttttggtgtcatttcaatgcaatagtgatgagttcacagggttaggaggaaagggtgttgccctctttcactcattccttgtgtgtgtgacaaatctgggcagaacattcaaatgctgtgttctgaattttcctcctcactgaattgagagaaattttggaagtttggaaggctctcttgaacttttaggatgaacaaaataacactatgagaagttaaattgatttgcctctgtttgaggttgatgggggccttcagcatataaaagtaaacatgcagaatgccagccagtgctattccaaggcagagaatggctcaagaacattttatgcatgcatacagttttaaaaaaatcagaattgtggcattgtgccaaaagcacctctaccttcatcctagtgttcttttgaagaagaaaacatattattatttataaagagacaaatcagagcattcaatagtgacctaggtaaaacaatactgacaaaataacagtaattatactatgcatttattgattcattcatatttttcattccttctagtcttccagtgcctcacaagctagtcaagcatgccacatacttacaccatgacataaacattgcacatccccaactctacaattgtcggctgattgagaaccttactcaaccgtcaacctgccatggtcttgctcctaattatttggaacttttgtcttgccataattgtgaactaaagccgtgaaaatagcacatattttcacagatggcagggctagttggtccttgattacttgacctcttggtgctggctagacagaaagccccaagtgaatgtttatacattgtacccagaattttgtagaaactttagccatggatcccagcttggaagcttggaccatttggccggtttgggtttgatgtaaaatttcttggtctttcactgggaactttcgagttattttatgagacaagagctgccatcatactcagcttttcataaatcttgctcttaacatcttatcttcatatgggcattttgaccatgtcagttagagaagcccaggaggacaaggtaacccattgtcatcttttttccggagtgatcataacagatgcctactcaaataaatgaatgttcctttatctgacccaatgggcatgaaagcatatgagaaactgaatagaggaagttagaggctaatggttaagaaatgggaaagtggtagaagaggcatttgatgggttttgcctgtaatcccagtccctaatagaagtaagggcaggggatgatagaaggaagattggctggatgcattgacctttggttgtaatgggtcaataattagacctagaaatttctaaaattgcaaattggttctataggaaagttactgcagtctatagacagggacctagagaatccttctctgtatgttagatgggaaatggtagaagtccctggatcctcaaaagatacaataaaaagaaaaccaacttatttccacccctccaataatgtcctctctatttcctgaataatttttaatttaggatgagaaacaggcttttgagaagacaaaggaatcctgcagtttttactgaatgatggttagtttttacagaggaatttaccttcactgaaagacaatccaagaaactgttctcacctataattttggaaaatagttccccccagctctgtaatgggtgcaacaatgctagaacacaaaggtgcacacacacacacgcgcacacacacacacgaaggaaggggagaaactaatccccttcccctcaaaactgtttggtgtagtttattacagattctaaattgctgccaaggacatttagaattaaaatcagcttgatgcacctttagcattcttatttctaaccatcatacttccactttttaaaaagttagcttcttgaccaatggttcttaaaactataatcatattagttaaaaaaataaagatgggaatttccaaaatgttttctagctcctgttactcatctaacaataggcaatgaaagttataattgagttcctggtatgataagaactttcttaggggctctctggaagaatcagacatggactcataaacctcttttcccatagctctcatcatttccctattgttctcaatctccatttctctcttctggaatttaaacatacgtttatatttttaaatcatttcttttggacactggatgaaaatgggatggcactaaaggcattaaggagtcccattaaaaaaggacctccaaatatgtgggcatcagggaaaagttctgattccagttaggcctttagggatgacagaaaagctgattttcaccttgcaggtctggaagttttgtggacctggagaatttttgctaacctcagctactccctctttaaaaattgacctgtcttgcttaggccaaaggaatcagtaactgggctttaagtattgaggtgagcatacaaactggatatttcaaaactcataaaaagggatttggattctgcttcatctaaaactattaatcttttcattgctcctgaaggcttcccctttaactagagactatcaatgttgcccttggattaaaagtcaactctgtgttatctagtgaatattgcaaaaaagcactattcttttcctatgggcaaataaaaagaatagatctcatcttgcccagtggatgttaatggacttgagaaattgcagaatttattacctaagaaaacaatgtttccctttagtgggagggaggtcgtcaagggatggaggcgagagaaggggaattgctctttgggagctcatttctttgcctccttttccacccttacattcgaacagtgcacacattagaagctgtgtgaggttttgtttgttttcaagagatgtttgaaaaaagatcaaatgcttgtgaaaggcactggattggcagcccaagaaactaaagtgtcccggaagctgtgtgagcccagaaatatcctgcatttctatttattttggcaattttacttaagactaccaataactggagttcatactacaattaaattttccccaggcaccatgaaatgaaagcacgtattacacttaattttaactggttgagaaaaatggtggttttctgaaagttcattatatgacccggaaacagaagcaatggctctcacttgggagagccaagctacctatttaagttggaattattcatagaaccaggggttctctgggttggaatggttcttaggtcattgagttctcttatcctaccacatgcttgaaactctactaccacatcatggaaaagcgttggcaagcttgggcttgaagtttttggtgacacaagactggcttctacttcaggagaccaacttctttttcacatagctccaattttcagaggtaagtaaaataatgttaactaaaacttgaataatgcttactaagtgctagataccattttaagtgctgtaatatgtgtctctgaatatacacctcccactccttgcacagacacacacatgcacacactacactcacacacatacacacacacaatctcaataaaccctcacaacaactgaataaggtagattcagttgttgcccctatttaacagatgaggaaactgaggcacacataagttacatgatctgcccaaagccacaatgcaagtaagagccaagatttgaacccaggtagtctgaatctacattttgtactcttaatgactgtattttactatttatttattatttaatttttttttgagacagagtctcactctgtcacccaagctgggatgcagcggcaggatctcggctcgctgcaacctctgcctcccaggttcaaggaattctcatgcctcagcctcctgagtagctgggattacaggtgcgtgccaccatgcccaggtaatttttttgtatttttagtagagatggggtttcgctatgttgcccaggctggtcttgaactcctgagctcaggcaatctgcccgccttggcctcccaaagtgctaggattacaggcatgagccactgtgcccagccttaaggactatattttagcctctccaatgcttataactcttgttcatgcctagtacagaggtttgcacattgtagatgcccaataacaaatacttttcaccaattttatttcaggatgattattccatacatattccaattagttttacacacaattatcaatttgccctaggaaacaattgaagttgaaacactggaattttaaatgattattaatattctgcttacttcaaagaaacattaaggggagtaataggtgtataatattcactatgaaattcttagccagttgccacctgtagcaataggtccttgaacaatttcaatttggccagcgaaggaaattccaaacatacaatacttgtataagcatagctcctatgcctttccttttttactctgtacttgcctcactgtcttgtgtaggagaataggaatcatttcatctcagaagtgccacttgtttttatggtgtgtctttctaccactattcatcagcctatgttactcatttgtccatccaaccatccattcatccatccatccatccatccatccatccatccatccatccatccatccaacattatatgccatgtatcactagaggcttgggtattgatactggaaagaaggaaatggaaagataatatagattctttctgttttcttggttcatattattcagtaatcacatgtaggcattcaagataattgctttagagttgataaaactcattccgaaaagaactgtcttatagtacatagtttgctagttaagcattctttaactagaaagtctttttgttcttccttccctttccttccttccttccttccttccttccttccttccttccttccttccttccttccctccctccctccctccttccttccttcttctctctgtctttgcctttgctttagttcttcttgaatgaaatttatgattgggtataattatagtttattcaaacctttccacaggacatgaattcttagttattccatggaactgtggtcctttgaagagccatctgtgtctatatgctactctaaggtgatggttgtagtaggaattggcttctgtctgcagctggtcccaaagcatggatgtcttagctggagaacttagtatctcctgaataaggtgactggccacttgggctaaggcacgagcctggcttctctctgctctgataagccaggatccactttgcaaccacagcagcagtggcttggctcccatgtggggctttggcatgctttcagttcgaccttttcctcctggattgagccgtgaacatgtccatcatatttaagtaatcctgggttttcagtgaaccactagaaagggtgatcctggagtaaaaagcatggcagaggcatggaggaccaggcagaaaggaggttcctttataccatgacatcttcaaaatagactacttggatgaaatgcttcacttctgggttagtcatattcttaccccaaaatgtcaccatttgtttggtagagaacttccgtcttgtaccctttctcagctcttctaattcacaacttggaggatggcgagagtttttgctttattatctatgaagaccccaatcctactgattaaaccaagggatctgaaggagaagatctctaaaatctgaattctgtgattctatttaacttttcttcaccctcagggaaatccagcacttttgctctcattctctcccttcatttctgccctctcttttccttctggaattctttcttagttgacccactttgattatgtgctgttgtctcctggccaaaagaagagcagcttagaacccaagcacatctttacccacttctggatctcagtgtcctagtcttcaaaataaggggatttctgaggcttcttccagatctaacatagtatgttcctggggttctcatggagcagaaactcagggtttcagatataaaaatagatctgtggtggggtggtggaggggagtgttttctaggagctgtaatcaaaatgcagtggttatcatcagagatcagaagtcttctgtcactggctgaattgtgtccaaattcatgtgttgaagccctaactcccagtacgtcaaaatatgactgtatttggagacagagtctttacagagataattaagttaaaatgaggtcagtggggtgggcccaaatccaacctggctggtgttgtttcacacagaggatgtttagacacagagatatgtatggagggaagatgaagtgaagacacagggggagaagaaggaggccacctacaagccgaggggaggagcccatgacagagccttctctaaggcccttgcaagggctgatactttgattttggactttcaactcccagaactatgaaaaaatcaatttctgtggtttaaactacctagcctatgatactttgttatggcagccctagcaaacttatacatcttttatatctgattccaaagtgcaaaaaagatgaagagtgcagtgacctcttctcaaaagttacctcacagacctcacagggttttaggcaataccggatgccctttggcctaaaccctggacttgactaagaaatgcagcctccaatgacattgcgggaaaagggaatctgggaacttctatgacacaattcagtcttgctgagcatttggggctaatatttaactctgaacatatattgacataggcaattcttccataacagattcatacaaaatttaaaaatgcatatagaagccttaatttttatttaaattcttttatttaattgtgttttagaggcagagaatagtgtgtctttttttgcctcttttataatttttatttttttttttcatttttgccactgtctttctttgcgctttctagggcattacatttttcttttccgttttctccatgtttcttagcgagattctctaaaaggttacttctatttccatcacatcatcatctagctccagcaggcctacttttcttcatttcctctattgtattttctgcttttcattcttgctgtctgctcctctctcatcatccttgcctctgtctgtttaatcctcctgtccttcattttccttttttgcctctgcattcagcatttctacttccaatctccctcctctgctctttcttctttcctctgatctgcagacttgcttctgtcccctccttctgttcccctcctggatgtgtctttggccaacctttccttctctgagacttcgtgttcttgttggtagatgggggctgatactgtaaacatcacaaaaataattgcattgagaacaagtggttcccatggtgtccctttgaatgagctcagaatgcccaggctccatatgatgcaggagacagcactcatgctggagaggggtctagacctcagtcacaagacccaccattccagaactttgggactcatctcttgacacctaccccctccccagttagaaaccaagaggcgctgggtcacctgggaagagaaagaatgaatctgcctttgccccagcaagcacgctttcctgccacattcacctaaaagtcttttctgagatccttgcttcctgcctggccagtggctactgtgttctgtgtgtgttgggtcttgcccagtccccttccatccttcagaggggctccctggggtcacatctccaataagccaccatggtcctcttccagcctcagctgaggtttaagaccaggaagcagcgaaggtgtcatggtgaacttcttgatctctcatcttgtgcttttgcacaatattattagttctagctccaaagattaaaaccacatgttggcatttcttttttcaacagagtccccaaaatacttaaacgagagctatttcttcccttactcaacttccttgccttctctttttcctcctttaccttctctttagttcttattctttctacttaatggctaaaattttaatctcttatattcatttgttcattcgttcactcattcaagagaaatcgatcaagtgactaaatgtgcatcagatgttttatgtactactgatggcatagttggtacctctgaggtttgtttacagtctagctcttagaaaatgatgcctgcagattttgatcattacaaatgtctaggcattcttatagccaaacagaaatttctatttttaatgtttcatgtttaattatgcttgctactgaatatgaattttgaatagttcccattagccttttattttctttggaagattgtagaatctcagaacttgaaaggttacaagctttgttattaagtgcaattatggcagacattaacgatggtccaacaattactttatgcaggcatgtgaaaagcatctcaaagtatatgcatgagctacttaattttgacaacaaactgatgtggtagatattattattatcccaatgttactgatgaaactgaggcttgggtacatcacattatttgccaagggctctaagctggtgtgtgagaaagccaggacttcacttttgtctgacaccaaagcccatgtttgtttagccactgttttgtaacatcttccaatcatcacatcgtccatagcggtgggaggggaaatttgcaatgcagagtgaccaaagagatggggatgtaatccatccctttggtgcaaaggagcttttctgacttgtaagccaggagactatggggcaggatttctgcttggcccacccacatgcacaagagagagaccacttgaggatggctggatcccacccaggtgggcttaccttctgggtcttgggcatgtcggtgtggcgctgggcacggacagagcgagctgacttggcaggcttgaggggtgcgcaatacatctccagcctccttagatcacagctccggaagcagcactcatccacgatgcctgtctgaggcgccctccgactgctggagccataccctgtgggcttgtctgcacaaatcaaacagagtggcctcatgttagggtgcaatctgctttcttcagtcttccacccagctcctgcctctccccacagctagtcaacctacatattctgcaatgtctcaacctcttcttgaaacttccccaatgattcctgaccccacgtatctttctgaatgccagtatgtctcccggagtctgtaccacactcattagcactaactcattcaccatgctatttgtggtaactctccccaagttttgcaacctgtaggcaaggatcttgtctatgcccaatcctagtcttttcttatatattggcttcagaggatgatagaaatattaaaataagatcatgcattgttttcttaatcttgttggcaacgctgcattgcttttataagcaggacagctcacatgtttgcctttttgtttaactgctttgactatatagtcaggttgaacatcaaagagtttttaagtttggaaagggctcctcattttactaatgtgaaaactgagactcagaggtggcaaagacttgctgaaggtcattcatgcagtaagtcgtggagtcaagatgcaaactcagatctacttgctgcaaagcccaagtgcctcattgaggagcccaggagaactgttgtatgactctggaaaagtcactaagctctctgggcctcagttttcccatttatgtaatggagttaataatatcttccttgtaagaattgtttgaggattaaatgaaatcaagtatgaataatgcatagcacagcacctgacatatagtgtaagtcgtaagtaaatcatagccagctttctgcgagtaccgtttccaggatcctatgtggtttgtgaagaagcattgtcactattgaccgtgtacagaagtcttgggacttgaaactaattacaataccaatctagtagggctccctctcttaccaccccaagaggccagaacaatgaattctatttcttattgagtaactgccaaactgaaacagtgaacgaaatgtccatctttcatgtgattctgttctagctcaggcaagggcagagggacagaaacttgctttctcttctcctcccttatctctcctggtcttctccacggatgctcaggctttatggaagaaattttataaatcacgggcacagaagaatccaatttattaatctgacatgtattcaatcttaattcctgacagaagaaaacattacgttttaaatcacaagtctatgtttctgtaataatgacaccattacttgaggatagggtttggaaagtcagaatcctcatgtattttgcactccctcattgggggagatcaggcccatggtaatggcctgctaccaaaccagtttggctgcctccctgctggaagggccagcattcatggcaacctctaagaacccaaatgctttcctgatgcttggcacaggaccctggtggctgcttccttctgtaaggcaggtttattgtcattcttagggcagctggaggtagtaactcagtgagggttcatttgtggtctttctgggcagagtctgctgtgcagatctcgaagcagaccctgtggactcccaatggctgtggcatttgggagggactgggacctggcaagccatgtctcagcgggtcccctgagcaatgtaaacaatatttttttgtttttttgtttttataatcttttcctggaactataaattagaggaaagacacaaatgggcttacactgtcctttgtaatccacaaaggacttctacgtactttttgctaagtggctagccagtaaagcacagctgataccctttggcttctctcttgtgggtggggaggaaggaaaaggtgacttggcctattttgtgatcattgtatcttttgcccattacaggtaatgattgccctttgttgaaactataaatttcctaatgggatgtaattgggattcatttgttgattatgaaatggtaacttgatgtttgggggtgggctggtaggaagagctccagaaactttcaaagttagccaactcagaaacaactgatttcaaaattcatggttagcctttgaagatagacaagggcaggctttgggattccaggacctatttagtatttccctttcaagctcctctaacttaattctgcttctgaggtcccacaggtgctggagctccttgtctgctataagaggaagacattaaccttcatcttgggatggcagagagagtttctatgattgtatattcacttcttggtgactgtaaacaaccatgaaactcaccacatgtcgatttcctcttgtaaaatagaaagtcatcatcatcacagcaaaaaaaataacaggaaataccaggcatctggtttatcaccttgcttaaatgagctcagaatttgacatgactcagtcaaactctaagctcatctaaactctgagctcatgctttttagtctgtagatcgatgggtttaggtacagagaattttaggacttttctgcaatgttccatagagaaagtttatcttatgtctacatttgtttttttaaaaaatattgttgaaatagtggtatacagacttcgattttgccataaatataattaccaattatctctagctaccacaatcctagagagatgtttttctttgtctactcataatgtctacaatggactcattgtacgtcattgggaatatatgaatataacaagtgtttacctattgccttttgaagtttaattcatcttttgaagtgccctgtaagcttgatttcttctggctctacatcaaaatatttaacaaacaaaaaactcatttctcgccaattgaaagatcacagttgagggtcaaagttttgttccatatcttcaaatgctacatattgtttatttttccagaaccacaataaagatatttgctgctatggtctacaggtagaggcctgatacaatgtaatttattagaaagctaataaaacaattggcttcagtatttgacattttcctatttgagatagttatttttaatgacttctaaattataactattgtcatttcgactaatttttaaatgagatggaactaattgttttatctttgccttgagaaactcttcattaggtgctgtataattctgtcccagtgggcagaatcagagctggtaggtgaatgaaaaacaaatattggcttaatataagaaaagcattcctaacaatttgaatttacaagtgttacatatgggacagatttcaatgaaaagtaatgaactccccattgcaggaaacagttaagtaaaggctgtaataaacatctgtcagagatcctagcagaagattcctatgttgaacacagtggatgactgctatggtcttttctattccagacattctataacaagtgaagagatgaaggagaaaactggcttgggcccaatattcagtatggttggaaaccacttcaaggaagaggtgcaaatatattctaacttagaaggtgaaaagttgttttctatctatttgaagttccccaagatgctctaaacactttttaattgtccttactcgatgctacgaaaaaaaaaaaaaaaaaaaaaaaaaaaaagaccggtgcctggtatagtcccttctacagcaaggtgtggtccaacagttctgttgtactggcatgaggaagtgttcatgcacttactcaactgttagaatgaataggcatgtataacattccacataatttttcttgctgacaaagtcttgacattaaaaatttatatatttattttgtcagttttgcttcaaaggtttcatagcatgtagaccaaagattgcttaccagacaagttggccaccacctatcctagactttgactcctccatgactagacataatgtttagtcacaatgtactgctgtatcttaaaagttggccaacagacagaattccaatggttaaacagctggcttctataataacagcacttccctttaaataatgcatggtcggggagtaattcaataatcttcagggcaaacttgctagttacaagggttttgggcagaactgtggcatcatcaaaaccacaccaattagctgagtctcacattttgtaatggatgcaagcaactcgctcccctccatctctgaagggaaatgtgtaatgctgagatttaaccggggtcatcacttctagaacaaaggactctggttgttcatcactggcaaaaatggtactacctcctctactgatgctgcataagtttgtgtttcttatagatttctgggaatgcagttggaacaatgcattcagctttaatttcctttgaaacttcccatcttgcttcttgagaaagttttattttaactatttcaactctatcattggaaagggaagacattgatttgaagagtcagtatttaaataataaaaaaacgcaaacgttttcaagttgggaagcaactagttcttaagatatacatttgttattctttgagttctaaggaataaaactattctttagaaatttgctaacaggaagaggttccaaagttgatccctttttttttttttttgaaaggaggaaaaaagaggtaagacaattaacctggattttaagggctatttctagaaaatgttcaattatatgtctgataaaaaacacaaatgaaattattagctaataaaaatgaacctgcatttcacttagattaactaaggattgattacacaaccaaatattacagttaagatctgaagaatctggaaacttaggtttttcacaccagttatttatttcagaactccagacacattgccaatttagaataacttggaacggttagttttttagggcaagattttctccctgggccgccttatttaatataaattcatttggtttgcattattttgcatgagatactagtaggaaaattgtataagatatgaataatcttaaagtagtcttcattttagcattttaattactattttcatttgtggaaaagggagaatcacctcccaatatttcctacatctctgatggctttataaggaagacttgagtcctttcataaatttctaatataaggaaaattgtgattatattattaccaagaccccaatgtaatacattgaatggttgatatttccagaattcataggatttgcatttacttgaaaaccttttgagagtcaatattttgcctttaaatttttgtctattgaaatcacaacttgaattaaagcaattattgagttatacattgtcatgtgcttagtaaagatatggaaagaagcttttactactgtcaactggccacatctttttatgtttagaataacatgagtatgtacacacatatactcaaacacatattagggaattaagtgaattactgtagtaccaaagctgctgtaaaacattttgaaattaggatttttaaaaaagattttctaatatatctattgcctgccttatactttgctaggagaccctgtacatttctgcttttctgtggaaggatctttccaagtaagattgacctttggcatcttaaaagtgaacactgagaaaatgttctcttttctatgaactgcatgtcataaacttttcttgaaaacctatcaaatttaggcatcgatttcacttttggcctgtgttaatttttaattgccagtgtttgctggtctcactacctctcaattggacaaggtcatctttttctaggaattatggccctctacgacctgcccccaccctcactactcagcaactctttctcagctactaaatccccataacccaaaagaccaaagtcttccgttacccaatcaagtcaatgtttttgtttctctgagtctaaaaggaatgaagcagagttctatggggctgcccctttgttgaaagcctcctttcttttggaagcccaagtcaagagcaggtgtgaaaagaatgctattcagctcaccttggtttccaaggccaggaagctaaagtgcaagtcctaggggcgataacagcaagagattcaaagcagaaacattactgttttaggactctttggagaaatgggcagacagagtgggaagcaacatgatgtattactttagcctgatacaatgccctggaggatgagtgtcttgccaggacagcacaatttactagcttaggtctgattccagggcttggaggagatagatgtagccaacaaaattatactttggcaagagaaatgctttgctggacagaaaaatattgtcctaagggaatggtttggtttatcaacgtctaaggtgaaagataatcaaatgccaagaggtcatttttatgtttgaattatttcagtggggcctgctatataagttagctaccattttctagttatattgtttgtattatttagaacatattacagaatttgagtatgatctgcctgtgacatctgtcataccaatgacagaagcaatatgtgaagtggctaaaagcacaagttttggaaccagacagtctggattctactgtttctttactgttaagctttcatttggcaaaggactcaaccttctaagattcaggtcctcatatgtaaaaaggatatataagagtacctcccaggactggcatgaagattaagtgagaatgtatgcaaagtgttttgcacaatggctggtatatggtaaactatataaatgttgacaattattattatggtgttgaattggttaacatagctagttgggcaggtatcctcttcctccattaatcttaaaaatgcatcctttccaaagtttggtcgaagcagatggcctttctagatattgttattcactaaagtaaatgaaaggctgttctcttgaaagaatgtccaaactttatgttgtatagactggtctgaatagttttaatctagaatagacactatgagaatgaatctttcaatcaagtcaaataaggcgtatgggcttatcttgaccccttgttacctttgatttgtcccaaataatccactggttaaaatcattggctttttggtattaatatcaatgcttcttatttcaaaacaatgctgcaaggcctgggatgagtgtggtgaaatacatggtcagaaatggtttcccaatcactttcacccagcatagtatttctctcatctctctctacttcatgtctcatctcattctgttctcttcttttcctatttcctttcctcttctgctactgacagcctttgacattctttttattcactgatgtacttttgagcaaggcttatgccactgtggagtttacggtaggctaggtattagcatttcatttcctccctggaatgactgaaaaccagggctccctctcctgccagccatgctttgggaataagcagttacccagtatacagtgtcaccaggccgcttaatcactactccatcttggacccatgcctgaataagatgaaaactgccagagaaagaataagaagggatgttgaggaatcgcatacgtgggccttagctgtctcatttttttttcttttttttagaaagactgacacaactgtaagctgagactggctccagcttggagattgtagctatgccaccagcattatctcctgtacttacactcttattgttattttactctttcagatgtgggaagagaggccttgtaacaaaacataaggcattcgtgagtcgagggtaacgccctctttctggtgccacagaaagatgaatcagccaaagggatattaaaacacattctctttatttttagtttctctctaaagtctttcatttctttttttctttgtaacttggcacctgccctctgttctcaggggccctgcaccccattagtctcctcactcagggacctgttttttgctcagggcacatctggaccttgtcccaggggtgggagtgacatggccaggatggcaggtgaaggggtggcggctgccagggcagtctggcgtgtctggagggagagtgttgggaggtggacgctccttaaagagaggcatccgggcctgcatcagggagtaaactgttggaagacagcctctacagcagcagaaacagctcttggcactgtcgcagagaagggagcagccagagtcagcgacagattgaacacaggagagagggaaggagggagggcgagtgggaggagatggtttggtgttacatgatataaataactgcatggtgcagacttgagtgccagttgggttgtgtgtgatgtccctttcatgctggtgtatcaacagtgttgttcttggattgagaggtcctggggaatgtttctatagcacctagcacagtgccatatgcagagagggaataaaaacaaggcaatatggtatattgaaaacaacattggattacagccccaaatcctctgtgtggatgcacaagtcacccaaattctctgagattcagtttctcatgtaaacaaccaaatgtgctagataatatcaagcaccccttctaaaaagatgaccctaaatatccagatggtcatgaacgacccactttgtaatcaataatgtgtatatatatatatggcatattaatgtttctagctaataataggggagtatagtagtgaagagaagtttgatgagaaaaccaagagttttctcttttttagatttaattttggatgtaaacaagatgtataagctgaatttaaggaaagcagggatcagtgttgagtctgatgaaggaaaatgtctaatttggagttgggcttgattaggggaaggagacaagcccatccatatggattgcagaagccagctcaaggtagggcacaaagagccctttagagagtcatttgaagcaggtgatagaatcaaactacattttgaaaaccggagtcctaaggaaagagagatggccctcacttctgtgggcactcagaaatgagaattagtatgagaagagtctttctaataatccttgggcatggccttttacttttattcttcacaaagccgcatcttcataaggtaaacaaatgactctttcggccccaggaggactgttaatattgttgacaagattgctttatttcctagtgtttaacataggccaatgttttctttcactaatttccttggtgtctgtcaatgctacatgagttctctgtgtgatattcacttattttcaggtggacagatgcatagtttccttggaaatgtctagccgtaactacatgttatctctgatagtatgaatgggcttccagacaggacatcatctatgccattggtacccaacatctgcccagaatataaaatcagaagataaagattaaacatagtttttcaaatgccatcctctttttttggtaaaataaattactgctaagttcagtaaaatttaaaagtctatacgaagagtgctcaagcatgttgtggtattatattattttttttcaaaataccaagcaagtatgcagactgaggctgaatggttcatttagggtgtgataacattatttcaggaatttcagataaaatctggactcatcagaccattatttcttttctttctgcaggattttgctgctattatttctttcccttttattcttaatatattattgcttaaacatgaccatgaaactgtaaatgccttccttaaattattgtattttagaatgccatatatctttggatattgcagcaaactcaaggtcaactgaagaggtttcttagtaatcttctggccttcactgagcctgttttttagccattgcactcctcccaatcccctcccccatgaaaactatttttctgaattgaagaaatgaactatgaataaggaaaaagaaaaagagaggtgtggtttaagttacagtttgtctccaagctaaatcatgttctcatctttatttcatctgggaccaacatcatgcccagattcccaaacctccttaaatgctttttaacaaatgtaattatccatcgagaaaaatctctgatttattttactgaattcagcaaagaaaaatattctcagcttatgatattggcaggagaaatcataccctttcttatttttcttttttcttacatactcaaacatgctgtgaatggccacatcactctgctttgggatccactctgaggcaatggccttttggccttctggccaaccgctcacttctgtgaatttcctttctgagaactagagactgttgccccagaagtcattttccaatttatcacaggacctatccatggttacagaattagttggcctccttgagaatacgcaatgtgagacctaatgtgacacacagctggggaagctcctttggtgcagggacactgggccaggataactgcttgtgggccattttatttccctggacacttgccttctgtctgctctctttgtctcacatctgggtttgagaaagctgtgtggaggcatcacttatgccaatacttaggcataagtagctctgctctgctcaagcagaagtgagggcctaagttcaggatttaaacattcctttctgatacacagtctttcaacagggcagcctccattctctcttctcagccttccagccaagtacctgctactttgtaaccccaatgggaagcctcttccctttgggaaaaaggagaatatcaaaatccactgacctcctgctgggtatggtctttgtaatctccactatgttaactggatgcctgtttatataaaagctacatttagtaacctttaggctgacgaatgaaatgaccctcaaggtattgtagcagcttccatatgataaggatagaaggaaagaagtgaagcttttgactctgagtagtaggagttctgatgagagaatgtagacagagctacacacatcctcttaactgaactgtaagttcaagccattgaagatgacttaaaaaaaagaattttagtaaaaagcaggctgctggttcaggaatattttaatctacttctaaagacttgctaatttatttttcttctcaaacgacttgttcatcttctcctcttcatctctcttccttgctctgggtcaggaagacactctggtaaaggtcagttatgaagtcctagcctcctcatgtcttctcatcgagccagtgctcccacggtccactgagatctgcctttggcagtcatttccctcagttggactctgagccatcacaaattctttgcatttttcagaacatctgtgccttcttttgccacatcttttttcttggtgctcaacaggtcacaaatcagcctgtacttctctttccaggctgttgatgtcttaatactctcttttcaaaccaaattcctctcttgtgtctggctgtggctcttagctccccagccttctcatctcccccatctgggttagtcatctgtggcatcaccaaggggtctctttctcttagccttctatctggcctgaacttctgcatttctctgaatgtcagaataactacacataccacactactaggcttgaagcttagttaagttctctaacgtgatttaaacacagtgcagaaaacacttccatggaagcgtgaacgcttgaaaagactcaaacttagaggatactaattagctactgagagagaaggcactataacaagacccaaagatataatcaaatgaagttgaaaactattccattaaacacaagtttctccttgacatttagaaaaatcagggcgtttgcaataatacactaccaatagcttccctttattgagtgcttcctactaagctactatagtaaatattacttttcttgtcttatttacacatgtgcagtatctacatggaggcagcattattactacatccattttacattttagaaagctgaggcttagcaaggttaagtaccttgacctaaatcatacatctagtaagctgcaaagccaggtcaccttactcgggaacaccttgaaagtgagagaattccctggtgatgaagaactctgaagttgatacctttactgggattcttgtgggcacatgatgctaatatcaatgaagaatatgggtgaaggcatctaaatggacccactaaccccaggatttgagtacatggagttgcacagagttttatcctaggtattctagagaatgccagaaggaatgccatgcatggctttttcccttgagagagaagtctgtgcacttccgcagtttaggacatagctcttgcatgctcacatcttacccagtgcattgtgaccctttcagtttcagatggggcagtcagccttgtttcatagcctgccaagacccttgaattgcataaagttataacaactttagcagacactgaaatagagaagtttttacccataatcttgatatcccagcaaatcactttatcttcatttttcaaaattgtttctgtttctcatccagatacatacattattttggcatagctacagccataacctaaatttaatgcagtactgtattttttcccacttaacatgacattgtaagcgtttcccatattgctatatagttttcataattataattttaaaactgcagaatattttactgagtagatatgccatcatttgttgctgtaaccattttcctattactaggcatttaggctatttctagttttatcatcattttaactaatgcagcaataaatgtctttgtacacataacattctactactcatagatcatttataagaataaattccaaggaatggaattactgagtcaaagggtattatcagacaatcctattttgatgaaagcccacaattttgcataaggaccagaggaatttaatcaacaaagcagagaattatatccagattttctcccgggattagaaaagagacagccaaggtggagcacagacagggatcttacctgtgtcctgtgagttagaataaatgaaccaatttctgttttcaattactagtgcagtttcctttgaaggaaacatggggcgtaaccaagacttgagtttggcatccaaaggttttctaagtagaagtaaaaccaaggaaaatgaaattgatgacaagggactctggtctctcaactttgaaaatcaccaagtacttgtatacatatgtaactaacctgcacgttgtgcacatgtaccctaaaacttaaagtataataaaaatacatacatacatacatacatacatacataaatacataaacaaataaataaaaataaaaaacttaaaaagaaaatcaccaagtacgtatgaggtttcttctctggggtagggagagaggttcaacacacagctgccaagacagcaccacacttcagtgtatgggagtgggagagtttgcatcctaaataacaaaggctctgctcctgtgctccttctgaactcaggtcctctctggagaacctggctcctccctaatctggtgtctctccacctttgtttgggtcatgatatccctgacaatctgccttctcatccaatccaaaatttggctgaacactcctgtccttctttcaccacattattattctcctttttataaacatttggtcacatgtaaacttgagcacctactgaattgtagacgctattctcagtaccagggataagaagttaacaacacagaaaaaaacaggataacaggtcactatctccttataatcagggtaactgtaacaaacttaaaggaaactgcaatgcagggatgctgaactcaacagttcaaggataattgctcagagaaattgttgaagtctcagtctagcaacacaaaatttcttcaggcccccatgagaattcttgtgtgatgacctcattcccattaaccttctaaatatggaaaatgattactttatgtatcataaacaagctcttaactgtatattagccttttttttctgttttgtgaagactggcctattctttcctatttgattttgagcatctcgagggcagacactgtcatctcatccttctgtgtttagaagcactacactgggcatttggacacttcacaaatgctcactgattggtggattgacaagttgggtgcacaaacggtacaaagagagaagcaatagaagaaatttgtactttggaaagaagaaacctaacaccagggccagtctcaagtctccatttcctttcttgttaaaagaggatgatcatcatttccctctacagggtttttgtgagttaaggcacaaagagagcttgagacagcttgtggcacagagcaagcactcccagaatgtcatctcaccccaccctccttagcatcattatgaagaactgattgtgacgttgtgtggtgaagtgcttagaacacaggctctggaggagattgcctgggttcagatgctggctaaaccatttctttttttacttgaaaaacaaattttttgatttcacttgtttcatcatttgagttcagagggcatttcaaaagtacagtcatctctttttttttttttttattatactttaagttttagggtacatgtgcacattgtgcaggttagttacatatgtatacatgtgccatgctggtgcgctgcacccactaactcgtcatctagcattaggtatatctcccaatgctatccctcccccctccccccaccccacaacagtccccagagtgtgatgttccccttcctgtgaccatgtgatctcattgttcaattcccacctatgaatgagaacatgcggtgtttggttttctgtccctgcgatagtttactgagaatgatggtttccaatttcatccatgtccctacaaaggacatgaactcatcattttttatggctgcatagtattccatggtgtatatgtgccacattttcttaatccagtctatcattgttggacatttgggttggttccaagtctttgctattgtgaataatgccgcaataaacatacgtgtgcatgtgtctttatagcagcatgatttataatcatttgggtatataagtaatgggatggctgggtcaaatggtatttctagttctagatccctgaggaatcgccacactgacttccacaatggttgaactagtttacagtcccaccaacagtgtaaaagtgttcctatttctccacatcctctccagcacctgttgtttcctgactttttaatgattgccattctaactggtgtgagatggtatctcatagtggttttgatttgcatttctctgatggccagtgatgatgagcattttttcatgtattttttggctgcataaatgtcttctctgtatttgcaggtttcatgtccacaaccatggatagaaaatatttgaacgaaaattaaaaataacaatataacaattaaaaataatacacatttttaaaatacagtataacaggtgtttacatagaatttacattatattagatgttataagtgatccagagatgattttaaagtgcacaagaaaagtgcataggttacatgcaagtattaataccatgccattttaaagaagagccttgagcataccatttctaactatgtgatgtgaggaagctccttaacctctcaggttgcatccaaaaagaggcacatactcacctcacaaggtgcttgtgatgcatgcatgagtgaacacttacccaatattagttaaaattactcagcaaagactcagtgaatggccattatctgcctgggcttggtgctcagaatatagaagaggacacaggatacgcaggttacacagtctccccacatcccccagcatgcctgtggtccataatgtgtattggcatcatcaatccatatagctaattccagagagtgcctggcagttcaaaaatcattttcacataccttttgtgcatcagccatttcaacaaccttatggtgccaatggaattattctcacttttataaatgaaaaaactgagagtttaagtggcttatgaatctggaagttcctttgatttcaaatggcaagacttctccacccacatacttgtccccaaacctcatgaaaggatgaaattcaggcccataattctgtgggggttcctgaagcaggtagtgcccaagataactaacacatactagtggttttcaaacttgagcctgcatgtttatcacctggatggcttattaaaacacgatcaacaggccccacttttagagttgctgtttcaacaggtactggggtggtgctcaagcacttgcattttccataagttctcaaatgatgccagtgcctgtgtgcaatatcaactcctaatatgtgtgtatataatatacgatcacgtcctgtggcactggagagaagggaagaactgcagtcctgggaaagacctcttatactttcttacacagaaagccttcatatctcttgtgataattgcctaataaaggtatctatatgtcagtctagtagcagaaccagttttattgcaaaacagaaggaaaaaatattataacccttcaaagtaacaaactgaactgaaacaaaaaacacatgttgacctttttcccttccctgagttttttatttgcacagtctgtgtccttttgaattccagctagcacctgaagacaacaagccaggtctcaggaaaggaaattagagccttcacagattcccccgccaaatggaaagcgagaaacacaagctagtcttctgatattgaaagctgccttttctaaatactgagttcaatttatttttaagctttccagattgtcagatggccagtcaagccaacttgctcaattgtaaaattcagctcagaagacagacttcccaggaacccaaacctatccttcctatgcctttgccctataacctcctagggtaatggagagaagccaaaaaggcagtgtgggtttggggcaccttcagtaccacatcatcaaaatatcttttcatggatcattcaaaatttgtggcaaaggagggtggaagggaatataccactgatgattgcccatagaaccacagtaattatacaaagcagaggacatttaattttgcaaaaaaaaaattataattttttatttatcagttaggttacacctaatcatcagaatttctcgagcgagtgatagaatcaatctcactgaggaaacagggttaattaatccaactgattccatacataagtggcaggaagaaggcacatgaagctctgtttcttttctgagcccttctgatgagactgtgtatgaggctttcatagctttaaatccaacagtgcccaaaggcaggaaatccatattgggagcactgggagggaaggcaggggccactgctggcttcccaattagagcattcctccaggcccctgtttccattttcctttaaataagaagttgggtttttaatgattctctttctagtcacttccttcctgctgccttgctaggtcatttcagcatatgccttctcaacgaatctatttctggaaaagacagaggaaaaatgacctcattcactcattgagaagtcaacggggcatccccagggctggctggtacctctgtgtggaggggtctccctggcctccctagcagtctctcatgcaacggccacctcgggactctgcagaggaacctggcacaggtgcagaaacacatattagcaccacttgtgtggtgaaggctgaaggaagcttgagaggtggtaggatgcttggttttgtcccaaggagcacacaagctaatcaaaaacatggaccaagattgatttttcactctgttaattgttcctttgctgtgcagaagctttttagtttgatgtaatcccatttgtctatttttgcttttgttgcttttgcttttggggtcttgtccaaactaatgtcaaaagacaaatactatatgatctcacttgtatatggaatctaaataagttaatctaatagaagtagagagtagaatagtggtcactagaggctgcggagcattagttaggtggggagatagaaactgttcaatgggtacaaagttacagttagacaagaggaataatttctggtgttctattgcacaatagggtgactctggttaacaatatcgtattgtatatttcaaaatagctaaaaaagaggatattgaatgttctcaccacaaagaaatgataaaggcatgaggtgatcgatatgctaaataccctgttagacttttacacaatgtatgcatgtatcagaacatcatgtgtaccccataattatttacaattattatgtgtcaattaaaagcaagcatacaaaccaaaacaccaagatgtcaatatgaccagagcagaaacctatttgaactttcacactggacagacagatccttagaaatcctccagttcagagatgcattttggtaggaggcatatcaaccctctgcatgatgtataattatgtatgtttgtggattttcctggaaagaggacatttagacactcagaagattctcagaagattccatgatctgagaaaactaaagaagcatagttcacacgtgaccagggtcacaagagaagctgaggcaaagtcaggaaggactccctgccttcctctgcggtcttctttctatcacactcttcagagacatcgacgactggcctgcacattggctgctggtgatttggaatcacatcccaaatgccaaatcctatgtcaaaggacacctaaggatccaagagatcttttcagctcagcattcaccaaagagttgttcaagaagttccgtgcaaaaagcttaggaaacggctgtaaacgttatcttattttgcagagtcttaaagttcaccagcctattcaagatggtcgaggaacagcctattcaagttccacagtgaagaaatctgtttcatggtactgaagtccactttctccacacaatagaccaccggactctcattttccaggaatgtccattaacttcctgaggaacaaaggcgcctgtatacttaaattccttcttttatctcttctttcaattaaagaacatgagagagtcctttgggaatgtaaacaattactgagtaacaaggcattataaaccgtgaacaccccagaaaaagttagtgctgggtctgtcagaagaaaacatgagggaagtgggtttgctttatgggattggttcagaataacataactctgctaaactgaaaggtcttcagggtctccctctgagagggacctcccccatccaatccatcaaaggcagtaccatcctcaggttcatcatcctattatttctttcaaaacgtttatcaaatttgacatggtcttgtttatttgttgcttgacttgtaatttttctctgtcctcccccatacccattggaatgtgggatctatgaagccagtagccttttattccctattcactgctgtagccacaacacttgcaacggttttacacagagtaagtgcttaaggagtacattttgtacacatgtaggaacacattagtgaatggatacagaaactgttcatcactgtgtgtccagtgtctaccctgttcaaaagatgtttcatgaataaatgaatggagaaggggtggcctgcattttttttcatgctcaaagcatgcttgtgagtattgggagaaatgagtgctattcaggcccttctcggattgatacaaaattgagtttccttcctcaatgatgagtaatggactagaatgtttttcagatggcactaagtcaggtaaagaaacattagaaggtaggatttgaatttaaggagacctttaacaatttagaaacgagaagtcattaaaaacagaaagatgtttaaaatagacaaaaatgggctccatctggcagagacaagtactataacaaaatagctgtgggccctgagtgagcaggaaagtactacaacaaattgtaatatgaggcgggtgtatgtagagaattatgaaacgaaagcctagagagtaatctttccacaaaacttggcattgctgaggttttaattagagtgggaactcagatttcattctcctattttaaggctcatttggagaacctggaaaagatccagctaggagaaggaaaaaaaaaaaaaaagattaactgggtggaaaatgaagttaagatctagcccaaaaaagaaaaggctaagaagtgacttaatcaccagcaccaggcataagaagagtgattattacacagaagattattcctcatctcttctgaggactagacaagggtaaacagactcgggccacattggaagcatttccacttaaacatcgggaagaatttcttgattataaggggaaacttgctgaccccaggcgctgtgggaagctgagcaattgctactctggagatctttaaatgtaggatgacaaccatctgccttggaaggcttagctagaggcaagggaccggacctaaggacctcttggctttccttccatctttgattcttacggccgctaagcatccccattctacagaaatcctccattcctgtcataagacagaccccacactgtccaaatccgcatggcttcccctgggaggagctcaattgttctcttctgaatgggaaggaaactggttgtgttgcctcagctgcttcccttctccagcccccacagagagaggacagctttggtcctgatgggcctccccaaatactgggatgggcctgcttctccatcttgtgtgggattggaagatgtggattcagttggagatagccgatttctccaagaatcatggaatgtcagagctgcaagacatttcagagcgaatccagacccatctccttgctactcaaatcaggaaactgagaacttggaagaccaaatgattctctccaggtagtgcggctggttctttttccacgggactaaaatccaggcctctggctccttattctacactgtctccttgctacctgtgtttccgctgcagttagaaggaacattttaaatgtagatagaatgtctaaaatcctatctttggtagctggactgcaggtgaaaaaatgagcaagggagagcagaaattctaacagtagaatttctggcagcattattcaacttgagtgaacaaggataggtcactcagactcttcagcatgtcagtttccccgtatttaagtgaggcatttgggccaggaacattttaaggcttaaacaaactgcaatatattatgattctgtgatttgaaattttagctacaaaaataataatgaatagaaactcatctcctggtctaaaggaatgagttttttgggagatcatttgtgatgtaattagatggtgctcagtccttttgagactctaaaatggcaattttctttctatttttaaaggtaatttacaaatttaatattgtgttggggaatatgcttcagctatcccctgtacaaggaaatctccaagcctcttcttctatgcagtcccttcactgcactttggacaggcaccctagtgactcatgggaattattttctaaaagctctattatacatcagtgtctctgaaaccaaagtcaatctttgccattgaccaaagtcaatgtcaaccaaagtcaagtcaacaaagtcaaatcctcctctggacttgctggtatctgcaccattatcttcttgcttactcagactcaaaatgttacagtcatctttgactcctttctactcctttaaccaggcaggcaatatattgcatcatgtctttcactatcatagatctcaggtcctcccactcttactgcctgctgctcctgcaaaatttcaggcactcatgactctcctgcttccagcgttttcctgccctttagatgagctgaagcaaagggggcagggaacatagaataatggtttcaggaatgacaagtgggagtgggccatatttgggaagcaggctatagagtgaaataacttgagagaagcatgataccccaaatcttcagagctcgtgggcagaggatgggcttcccatggaatgtgaaaaggggttgcaggttattttatgtagatattggagaaaagcgtgacccaaggagactggaaaacctgagtgcatctggtttatacatatgctgtatcatttaccttttacaacaatcctatgagatggacactgttatcatcttcactttacagttgaaaatattgagccatagaaaagtttatttatttgtctcaggccactcacttattaaatgcccaaaccaggatccaaactcaagactttctgagcactaagtcattctattacactgcttcttctccttcttcttcttcttcttcttcttcttcttcttcttcttcttttttttttttgagacagggttttgcactgttgcccaggctggagtgcagtggtgcaattgtggctcactacagcgtcaacctctcaggctcaagagatcctcccacctcagccttctgagtagctgggactgcaggcatgcattaccatgtctggttaatttttgattatttgtagagacagggtctcactatgctgctcaggctggtctcgaactcctcagctcaagcaattttcctgccttggcctctcaaattgctggaatttcaggagtgagccactgcatctggcaacactgcttcttaacttgagtagaatcttcctgcctagacagaagtgaatgggaaagcttagtgcatcttagagtatcttctaagagaaacttggtgtgaaaccatggggaataaagcccagtacttgacatgggattttaattcatttacttgatatgacatagtgggtgatgcaaaataggtacctttttcttcacctttttccacagtgacttttcactttagtttgcttggcctgataaacagagtgaagtgaaaaggcatgctctttgcattttaaaaaccccactacctcaacccctatgatttcaggctcctttttaagctctgctgattctaattgtcatctcttatgatactgacaagtttattaattgcttctgtcttgtttggcaccatccaacaataacaggaaaaaaaggcaagtgaggataaagacattcttttgagcagccgctcatttgctctaacacatctggctaatggatagagtataaaattgctcaagaaatatggccgccaggaactttgttaatgtttttgtgcccaagttgatataaactgtggagctgagccagtcttatatgcagaaagaatggtaaaaataaatgttgactaagtatctaccatatatgccaggcactgtgctaggcaccactggttatcttatatcatcctacaggaacctaatagggaggtgttattgctgtttttgatagcatggaaaatggctcagagatcacaaagctcattaagtgatgctaataggactggcatctagatctggctgacactagatcaacctttcattttgtagtgtcttgatttggggcactcaagtggtagaacgtaaggagctcagggatagcgtctttggcagagattcctagtaatttcccaatagctattttccctctttctgcagtaatagaaaccctaattttcagctaactgtattttccagcctaacttagaactctgtgtggctatgtgttcaagttctaggaaatgaaatataagtgaaagtgtcacatgaaagcttctgggatccttcattaaaagacaaccaaaatgcatcctttgctttttctatcttcctattggctagagcatgggtataatgttgaacctccagcagccatcttggcccctgcagatgagggccaccatgctgggatggtgaaatagaaatctagaaattgctgggtcttgaagattttgtggcatagagctactttgcacagcagatggttcagcagccctgaactatgtatcttgggactactacataagagaaacaaacttccatattgtttaagccagtgtaatcctggaactctgtttctcacagagtattttcatgataacctcctcttgaatgaacaaaacaacagatcactggctggctactaatgcctccaatgtctccattatggctttgttcattgaattaagatatatttacacagagtttctggaaaggaaggtaacagatcactgagagtacataactgaagcaacagtaggcaaaaaacaggcaaccttgaggtgcctgtaactttttatttttatttatttatttatttattttttgagacagcgtctcactctgtcacctaggctggaatgtaatgatacacaatcttggctaactgcaacctctgcctcccggggttcaagtgattctcctgcctcaacctcctaaatagctgagattacaggtgcctgccaccatgtctggctaattgttgtattttagtaaagatggggtttcaccatgttggccaggctggtctcgaactcctgacctcaagtgatccgcctgcctcagcctctcaaagtgctgagattacaggcatgagccaccacgcccggctgaagtgctcataattctgtggcaggcattggtgctgctattgggtgtgaggagtcaagagggagggggcagagtgaggtcctctctgctcttgacaatatggaaaaaagacacccaatttccttttttttttttctacctaacagttttgtccagggcagttcttttctaggaaatgtaccccatatctgtaattacacagagcaaaagttcagattacatcagtttgggattaacggtaatgatgacacctttgtattgacaatactagactgcaacaggagagttaggatcaggaaatgaaagcattctcccaataccacctcaacttcatgggcaaaaagggggcaccctccatgagcagtcagtcattgatgtatttacgcgtaagttcattcaacaaagttatttactgtctactatgtgccaggaatactctttatagattaaatattaagaaaatattaaggacattttaaatttatgatgacaaaatcatatctcatctagtcttcttgcagaactaagctcaagtcaatttaaaaacaactactttaaaagcaagcaaaacaattggttacctgctacattgaaagcactgccctaagtgccgcgtagtatgtgaaaatgaataggcaaggcaaagttgcaaccttcaaggaatttgggacccagtaaggagatgcgttaactcataaataactatgatataaagcagaatatacttgattgcctcaggtggtacaagatacaaggaccgtgcagaggacaaattttgctgagtcactgagaggtggcctccactcaagagccaaatgaccatctcataaattggtatgataccccaacatcatttattaaatagggaatcctttccccattgcttgtttttgtccggtttgtcaaagttcaggtggttgtagatgtgtagcgttatttctgaggcctctgttctgttccattggtcgatatatctgtttaggtaccagtaccatgctgttttggttaccgtagacttgtagtatagtttgaagtcaggtagcgtgatgcctccagctttgttccttttgcttaggattgtcttggctatccaggctcttttttggttccatatgaaatttaaagtggttttttctaattctgtgaagaaagtcaatggtaccttgatgggaatagcattgaatctataaattactttgggcagtatggcaattttcatgatattgattcttcctatccatgagcatggaatgtttttccatttgtttgtgtcctctctgattaccttgagcagtggtttgtagttctccttgaagaggtccttcacatcccttgtaagttggattcctaggtattttattctctttgtagcaattgtgaatggagttcactcatgatttggctctctgtttgtctgttattggtgtataagaatgcttgtgatttttccacattgattttgcatcctgagactttgctgaagttgcttatcagcttaaggagatttggggctgagatgatggggttttctaaatatacaatcatgtcatctgcaaacagagacaatttgacttcctttcttcctatttgaaaactatttctttctctttcctgattgccctggccagaacttccaatgctgtgttgaataggagtggggagagggggcattcttgtcctgtgctggttttcaaagggagtgcttccagcttttgcccactcagtatgatattggctgtgggtttgtcatgaacagctcttattattttgagatatgttccatcaatacctagtttattgagagtttttagcatgaagggctgttgaattttattgaaggccttttctgcatctcttgagataatcatgtggtttttgtcattggttctgtttatgtgatggattatgtttattggtttgcctatgttgaaccagccttgcatcccagggatgatcgtcgtggataagctttttgatgtgctgctggattcagtttgccagtattttactgagaattttcatattgatgttcatcagggatattggccttaaattttctttttttgttgtgtctctgccaagttatggtgtcaggatgatgctgacctcattaaatgagttagggaggagtccctctttttctcttgtttggaatagtttcagacggaatggtaccagctcctctttgtacctctggtagaattcggctatgcatccatctggtcctgggtttttttttggttggtaggctattaattactgcctcaatttcagaacttgttattggtctattcagggattcaacttcttcctggtttagtcttggcagggtgtatgtgtccagcaatttatccatttcttctagattttcttgtttctttgcatagaggtgtttatagtattctctgatggtagtttgtatttctgtgggatcggtggtgataccccctttatcattttttattgcatctatttgattcttctctcttttcttctttattagtcttgctagcggtctatctattttgctgctctttcaaaaaatgagctcctagattcctgaattttttgaagggtttctcatgtctctatctctttcagttctgctctgatcttagttatttcttgtcttctgctagttttcgaatttgtttgctcttgcttctctagttcttttaattgtgatgttcaggtgtcgattttagatctttcccactttctcctgtgggcatttaatgctgtaaatttccctctaaaaactgctttagctgtgtcccagagattctggtacattttgtcttttttttcttactggtttctaagaacttatttatttctgccttaattttgttatttacccagtattcattcaggagcaggttgttcagtttccatgtacttgtgcagttttgagtgagtttcttgatcctgagttctaatttgattgcactgtggttggagagactgtttgttatgatttccattctttttcatttgctaaggagtgttttacttccaattatgtggtcaattttagaataagtgcgatatggtgctgagaagagtgtatattctgttgatttgcggtggagagttctgtagatgtctatcaggtccgcttgatccagagctgagttcaagtcctgaatatccttgctaattttctgtctcgttgatctgcctaatattgacagtggggagttaaagtctcccagcattattgtgtgggactctaagtctctttgtaggtctctaaaaacttgctttatgaatctgggtgctcctgcattgggtgcatatatatttaggatagttagctcttcttgttgcattgatccctttaccattatgtcattctttgtctttttttatctttgttggtttaaagtctgttttatcagagactaggattgcaacctcttcttgtttttgctttttatttgcttggtaaatattccttcaaccctttatttcgagcctatgtgcgtctttgcatgtgagatgagtgtcctgaatacagagcaccaatgggtcttgactctatcctatttgccagtctgtgcctttaattagggcatttagcccatttccatatgcagaaaattgaaactggaccgcttccttacatcttatacaaaaattaactcaagatggattaaagactttaatgtaagacctaaaaccataaaaactctagaagaaaacctaggcaataccattcaggacataggcatggacaaacacttcctgactaaaacaccaatagcaatggcaagaaaagccaaaactgacaaatgggatgtaattgaactaaagagcttctgcacagcaaaagaaactatcatcagagtgaacaggcaacctacagaatgggagaaaattttttcaatctatccatctgacaaagggtaatatccaaaatctataaggaacttaaacaaatttacaaaaaaaaaaaatctcatgggactgtaaactagtcaaccattgtggaagtcagtgtggcgattcctcagggatctagaactagaaataccatttgacccagccatcccattactgggtatatacccaaaggactataaatcatgctgctataaagacacatgcacacgtatgtttattgcggcactattcacaatagcaaagacttggaaccaacccaaatgtccaacaatgatagactggattaagaaaatgtggcacacatacaccatggaatactatgcagccataaaaaatgatgagttcatgtcctttgtagggacatggatgaaattggaaaccatcattctcagtaaactatcgcaagaacaaaaaaccaaacaccgcatattctgactcataggtgggaattgaacaatgagatcacatggacacaggaaggggaatatcacactctggggactgtggtggggtggggggaggggggagggatagcattgggagatatacctaatgctagatgacacattagtgggtgcagcgtaccagcatggcacatgtatacatatgtaactaacttgcacaatgtgcacatgtaccctaaaacttagagtataataaaaaaaaaaaaaaaaaaaaaaaaaaatctcatcagaaagtgggcaaagggtatgaacagacacttctcaaaagaagacgtatatgcagccatcggacatgaaaaaaaagctcatcatcactggtcattagagaaatgcaaatcaaaaccacaatgagataccatctcatgccagttagaatggtgatcattaaaaagtcaggaaacaacagatgctggagaggatgtggagaaatagaaatgctttttcactgttggtgagagtgtaaattagttcaaccattgtggaagacggtgtggcgatttctcaaggatctagaaccagaaataccatttgacccagcaatcccattactgggtatatacccaaaggattataaattattctactataaagacacatgcacatatatgtttattgcagcactattcacaataggaaagacttggaaccaacccaaatgcccatcagtgatagactggaagaagaaaatgtggcacatatacaccatagaatactatgcagccatgaaaagggatgaattcgtgttccttgaagggacatggatgaagctgaaaaccattctcagcaaactaacacaggaacggaaaaccaaacaccacattttctcactcataagtgtgagttgaacaatgagaacacatggacacagggaggggaacatcacacagtggggccagtcggggggtgggggcaagggaagggatagcattaagagaaatacctaatgtaggtgacggcttgatgggtgcagtaaaccacaatggcacatgtatagctatgtaagaaacctgcacattctgcacgtttcccagaacttaaagtataataataatgaaaaattggtatgataccccattgctacggttttctgtttgcagaacaggaaggcagtaaagttatttgttccccatcccgccccccaactagaggaatgtcagcacaggcctctctcaggatgtcagagaagggacatcctgagagaggcctgtgctgacattcctctagggttgaatcctaaccccttctctgtggagggattttatgaattcaaggtcttttacagccctataattcgatggttcttctacctctattcttgacacaaactcttgccctctggatcacctgggctttctaagccttgtcatattatattcacttggcagaagtgaagcacaaatgtgcgtaggtagagaggcctccaaagaacaccgggctcacggattctcctttcgtctcatccagtagcatagagagagggcgagttctcaagaagtgctcagacatgttaaacgtgaggttacgagatgaagacttcaaaagtgttttattaaagtgatggactcttccgaatggagaaaatccatcctgagtatatctgttttagaggagtgacttttcatatagtagattttctacaggggaagtgctttcttcccagggtttttatattattcccctgtcattctttttctttttcctcactaaatttcatgctctccttgcccagttcacttatttgctgctcaaagctaaaaatctccctacttttatgcgactctcctagaaattgctccatgacaaagagtaagagagtagcataaagagctaaatgaactattttggatgtgacaggaattgtatttgccttttggcgctgctttccactttctttgtgaagcatctcttgctccgatggccccagcagctctctgccacgaatggaaacagccatcgtacactgctccacttggagacaaatggatgcccaattgctctgggactaaattcgacttgataaaatgctgcatttccagatttttcaatctcttcttcgccttccatctgaaggctaaggccttcatcatctaatctggagatgattattattactctttctgtgttggcaaatacagatacagggcacatttgcctttctttcaaactcatttgggagacttaaataagttctcttgctacatttaatttcattttctcaatatctacatgctgtttgtcaatacaataatatacttccatctctgtctctagttttaaatcattctttccaatttgaataagatttcaataatactttgggcgggttttcagaggaaggatcttgggtcatttctcctaaacctctgttaattgaagataggatttgggatctaggaatgcagagtcacagaggttcagccttgaagaagctttaaaagatctttatagtagattagttatagttgcttagtctgttaacctgttatagtaggttagtctgatggtgtcagtggataacaaggagaaagattttggaaaaccagaaaggctactggtaagaaaataagcaggtgtcaaaacatacactctaaagttatatcaagtgagtcacagtttcatatacagaatttcaagaatggttctgcacacctagtgtagcttttctattcttaggactcttctacgtagaccaattgactcctggataggaattaagttcatcaatgaagtttttatcaaaacctgtaactctttgatgcatttgatcttcaaggataagagagtattgctctcctttctgtagataatttcagtatatctcaaacaaataatgtgagaattactgagcgcattttattgctctctatttcatttgtttacgcagagtaagtaatgaacttccaggaagccagaacttctagaagctcaagatcaaggtgctaagatgtaggcctgtggacagtgaggctttcttgccacaacaaatctaataccagtttttgtaacagtgggtgtgtaacaatgcatgctgtagatgatgaaaagaagagaaagtgaaaagaagatgggagatcgatgagaaagatattccaaccattgggaaggaaagaaaacttgaggaatatactgtatagctcaccgctcagatgattccagtgcacagggatctctcccttccttgctattgtttggcactggccatgttcacctttctggctaacctctaagcatctgaggcaggaaccctgtcagtttggttcagtgttgacagggtttggctgtgtccccacccaaatctcatcttgaactgtaattcccatgtgtggagggagggacctggtgggaggtgattggagcatgggggtggtttcccccatgctgttctcatgatggtgagtgagttctcatgcgatctaatggttttagaaggggctcttccctcttcacactctctcacctgccaccatgtaagatatgtctacttcggccgggcgcggtggctcacgcctgtaatcccagcactttgggaggccgaggcgggcggatcacgaggttagaagatcaagaccatcctggctaacacggtgaaaccccgtctctactaaaaatacaaaaaattagccgggcgtggtagcgggcgcctgtagtcccagctactcgggaggctgaggcaggagaatggcgtgaacccgggaggcggagcttgcagtgagccgagatcgcgccactgcactccagcctgggcgacagagcgagactccgtctcaaaaaaaaaaaaaaaaaaaaaaaaaaaaagatatgtctacttcttctgccatgataagtttcctgaggcctctgctgccatgtggaactgtgagtcaattaaacctcttttctttataaattacccagtcttggacagttctttatagcagtgtgagaatggactcatacaaatgtcatatccctagcatctgttatagagcctgtcataaaatagatgctcagtaaatatttgcacactaatcaatcatattttagcactgaactttgcagatctgtaacactcaatctgtgttaggggggtcttgccaattacaaaactgtaggccattcagcatgcttatttgacatccttccagaaggcatggtgctcctcttgctgtgattattgaccctctgagtttgaagataactaatgaagacattggaagtgtactttttaaaaagataagacattctcttcttattggctaactgcacctatgggaaaaagaagtcttctgagccagaaagagctgggtcaaagaggagcgcttgggctggaatctgccagagaaacttggacctttgagacatctgagcagcaaagcaatttaaggacatgggccctaaaaagaaaacagcacctgctttgctgagcagccttgtctggaaattgctgggttagcaacacgttgcaccctgtgaaaacttgtgacttcaatatgagaaaaaaaaaggctttaattaaattgggtgtttttgaatcttcctcagggagttaggatttgggggtcgagaagctgagaactttatcagaatgaaaggagtcttctcagaaatcctggaaccccacagttcttagtgagatacatcattcatgtgtggctgtgcttttgcctttagaagcactgctgccattagcattcttttacagtcaagcaaggctaaagctggaataatgtgttaggtgtgtggcctaggagggtctacattgtgcttttccaaagtgttttttataggatgtaggttttcaggagtgggagagttccctatagagcttggcatttgtttgtttgttttgctttgttttgaatttggaaagatgatcttaaagaggtatggtaggattaggaaacttttcttcaggcctcagttagtggcctccggtattcaattatactcaggcaatgttaattgagcactttctacatgcaaatcactgtcccagattctgaggacatacagaggaatatgatgccaattcttgtctgaagaagttcacagatgaacacattcttaactctaatataagtaaggttgggaaaattactgtatgtacaaaaaaagagaggcctctaacagggaaagataagtttctcttatgatgaagttggaagaggcattgctaggaaagagatgagtttggccttaaaagttactcagcatttccatggctagggatgtggggatggaagaagaagcaaagaataaatgtatgctctatagagcatgctgtcaaggttgtcaggtaccatgcgtgcttgagtaggctgcctgagttaaaaccctggattcgttgcacttagaatctatgtgcctttaatcacattctgtacttctctgtgtctcagtgtcctcacttgtaaagtgaagataatgatagtacctatttcacagagttgtttggtgattcagtgagttaatacatgtaagtgcttaaaacagtgtcatgcatataagagcttggaaagtgctagctattataattcttcaatatagatgtgccaacctatctttctgggcttatcttgcactgctctgcactagcctaacacccaaacaactggctggatgtctcatgcacctgcaaacatactccttactttgctgtctatgtgctcttctattgagttagtttctgtgtccagaatttttccatctatcaaaatcctccctgtacaaggcctaccttaaacacatgatgtgacttccagagaaacatgagtactctcacagcacttcacaggcatcatggcaaggttttggaagctcttcccttctgaagcttgccattaaccatggctactaccaaccctccagagtaactcatgaggtctagggaatgagagggttttctcttcctactccctagaaggaagtacatgccccatggggaaggaaagattcatctttctgctattcctagatttccctgaaagataacagcaatacagaggaacaagataaacattaacatctgatggccacctgcatgtgccaatgtttgtcttagctgagtctgaaggccattgccacctttgcgaataagccagggcatgacactctccatgaagctcccaagaatatttaggccagcctatttaagaatggaaaagggccttatttcctcaattttgaaaattgttcatagattgagccagtagagttatccaatgtggatgtaagattcgccatgaaggggtcaattgagtcagaggcaaatgtttgctgcagatccaggctgttggatagagccccaaatatttgggaatgcagggatgagagggaagaagaaggctttcctatttgctgtttacctatcagtctggggacaaattggtgatttcaggctcatgcctctatatcacaatgcgttagtgtccaccattaatgtggtgcttggcagagaggttcagggctgaacacacaagggccagagctgcttttccacatcagctctctcaagcctggagaatcttggctggaagtgtgggggaagggaaagggaagaagggaggacatggccccagccacccaccgtgccattcctgggttttgattaaagaggaaaatattggctctgacattctcgatttgcaagatccaaatgtattttgactttttagaagaactaagggttcaggtttcacaagaatgatcctgcctagaacttctgactcaaacttaaagctgtttggcttctcaatagttgaatgcacagcaagtgcagttaacaaagtgacattgctatggctgcaagttgcacaacagcataatgtcagccttctgatgagagctgggctgttgagcaatgccacttggaagagagaggtcacacacagaaacagttctaagaatgttatatctttataaatattcaatatatttctttatgagttagaacccagactttccaaacctctgattcatgtttttccagaaatctcaggtcaggcagtacattttcagttgacaagttaagttcattttgaaatatctcacagcgaaaccagaatagggcatttcaagtgggggaggagttccacacagaggtctccactcattgcatctaccctctcttccagtctctacctgcacccctttccttaatgcttagtttgcagtagctgaaatcaaaagcctccatgaggcaagttgggcagactcaggcaaaattccccatcctgtcatcctagcagggaagagaccagcattctagtatgtccagtagaggactgaggcaccctgcaatctctcctcccaggttgaacctggcagtcagcttggatgggaagttgccatttctctctctggccctgggaagagacaagtcatgaacacaatcaaggacaagaagttggttaaccatatgtaaagagttgggatcccattggatatcgcttcctggagaatgaaaaaatatggctccatatcaggcaggtgctcagcagcgatggcttatggcccttcctctactgatcttttcctttatctctttggtcattatgctcagtgttaatatgggttgctaaggaaccatatgtacatggtaatttggtaaaacatctccctcacagaaagcagaattttggaggagggcgtagtggccatcttaggagcatctgaggagaaagttttgcccccttttaaattcctaacacggacattcaacttattcaattttttccatttaaaaaaggtgtgtgtgtgtgtgtgtgtgtgtgtgtgtgtgtgtgtgtgtgtgtattgtctaatctagagatcctgaggagctaagaagtatgaacaaacgcacttcaaagactaaactggacataaattcaaacgagaagaaagtcttcatttagggaaaatcagagaaaatacttcagggaggaaaaggtatcaaatctaactgttagcatgtaataatattttgtcagaagtttttccctcatttctgctcaactacagagtttcagctagcattaatcttctaatcaaaagggaacaaatctatttataattgacataaatgatagtcctatttatagttctctttggcgttccatgcttctctgtgggagatcttccctgaaacaaaagcctactttttgaagcaactgtgttccagggacagccttgatcatttctgctgcccgagagatgtatttaattaacctcttatccctactcatgggatggcggaatgtgaaaagtactgaccaatattacagcaattcctacatttgcccttgtaattccagtccacagaaatcatacatgacccaaaaaggaatgacagtccccacgttccaaaggaaggggcatgaatgcatcttggctaacccactttcaacttcaggatgtactctagcctagccctccctcaattctaacaacacttcactcaaattacctctggaaactggtagcgggtcctgattttctaagaattttgtggcaattccacaggtattatctctcctggtactaaaaaaactgctttgggtaggcaggcagggctgactgtacccatttgacaagggagagaattgcctgacagaacccagccaaccagcgaattcaaggcttttcagggtgtccaggtctcctcacctcatattcagaactctttttgatatccaatgttgtcatgctgatagcaaaataaatattattcaaatatacccagacattcacttaaattctcaaactctgcttaaattcactcaaattctgcttaatttattaacaaaactctgttttgaggaatcctcatgctaaaagaaaagcaaccaacagtgcccatgttatctgcatcaaatcctatctggaccgggggatacagaggataagatgggaggggaacctcatgactccaggtagaattttgacgcatcattgaacttgagttggaaagactggcctggcagctctacaaaaggagggattttttcctaagcttttcatcaactcaaagtcaaagcggcttgtttgcccagtatttctggcctctctcagtctatagaacacaaccatgcctctacctagccaaggacccaggcagacagagagtacatgaaggtgtaaattccacctacttttaaactttagtggacgatttcacaagactgtatatatagagagaaggatgaaaattttttgtattcttttggaaattcagtaaacatattttgagatctgccatatccaggaagaataagagaaaaaaatgttatttttatacattattacttactttaattctataggtttatgatgattattctgacatatgggtaagaattgttttcttaaccagattgaaggtaaccttaaggcagatttgtatgttactttttgggagcatgatgggtgttcatgaacgttagttttctgctctggctttttcgtttcagcttccccttggtttctagcacaattctaggtacacagttatccataaaacattgctgaatttaatgacattgaaaaataatgactttcttcttcttggtcaatattttgcaactggtcattccagtcaaaattcactaagttggatccatttctggtgcctgagatttgattctataatcttgtaacttgttgacaatccttctgcagggcaaacaggaatgcgagcccctttctagttattcagaaactttagaaattgacacttttgaatgcagcatacggagttctttctgtttcattttttctagcgtatttgtgctctacctggcattgactcaattcattatctcagcccagcccccaggaatagactgactcctgcaattctaacacaagttgtgcatactaaaggatttgctgatgctcctcatgaggcatgcaatagtgttttaatctggagatcacagccagcttccaacaaaaaggatcatgttctgtttacctaaattcccttagtagtttcctttagatacagcacttctcactctgtacttgaaaataccgaaaagtccatggaggccttccgactcagccatgtctacatttcaaatgagttactgccttcctaaaggcacacataactaatctaggcctgtaaggccacataaaaacgaataacaattaattccatgcagacatggatagtgcagtgtatgagggagtaagtgggaacttacagagattaataaaacatagccctcacctttgcagagcttatagttaagcagatggtaggaacactgaccaaaaaaaaaaaaaaaaaccaaaaacaaagtgctgtaagagtaatattattgcttctctctctcagaggaaagagggttgacatctggtagaagattttacagaggaggtgacatttgagagaagaagagaggaaagtccaggaaaataaaataggtggtaataagtcacataggtcggatgttggaatatgtagggggtcatttgtaaacttggtgagtcaatcaagtcaatgtctcaatgactacagcaagtcatgcaggcaagtgaagtagaccagagcaaggcaatagagagtggtggggggtttttggtaaagcagaaagcatgtgccaatatgaagtggagagtcatttagtaaatactgacagataattcaaattttagtaaaaacactgtattcactacacaaaaacacttatgaggactggatacaacttacagattgccagtttgtgagctctgctgtagggatacattaagaaagtcagatagagaccttacgtaaaatgccttactgtcaaattggggagtttggactcactcaatttacatagccatgaatggtccctggatgttgtttagaaaagggataaagtgataagaattgctttggaaagattaatctcatgggtgggacggctggcctcaagcagtcttgcacatagcacgatcatggaggaggctgttgcaatagttttggtgggcgatgaggaggatctaaatagtgatgggactggaaggatcttccagtaaataggtaacagctgttatggatctcggtgcaaaacaaactgtaaggctacagcttgttttgtctgaagagttgggttgatggtctccactgtgctcaacacttagggtgattgtgcaacccatccattgcattggctgggaacctggcctttcctgctttacaaggtcaccggctaaaaactccacttgctcttgaggaaatatccctttgatgatgtctaaatttttgaatgttcagtttttaaaatctgccttcttccttcaccagaatgacttgattgtcttttaaattctagctcagctgtacccttgctctgtttggggagggctatacagttctataaagatgaggtttgtgtcttatttatataaaccagcagcagttagtctggtaactatgtgatagaacaaaggcaatagatatgtcttgaacgtaataaaatagacaagcgtatagttaatatccaacgagatcttgcatatttggagcaggagtggcataggtcaatgtatgctgagccagataggtatataatgaataaattaagcctgcaagggcacacacttcacataaaagggtgaccaaaaactgccactcaagaatgcaggctcagccatgctggattgcaccatttttttcataagagaagttgttaatcttttgtttttgcttataatctcttgatttttatatttccaaaattaaaacaaatacatattgggtggaccaaacaaaacatgtctgtggactagatgcaggtggggtgggagtggaaacgttttgtgacattgctctagaatatcaattccatgtgcatagagctgtgctttactcatttctttcatcattagttttggctaaccagaagacactcaatagatggtgtggactgggataccataggggagaactattcccatctgactcaagcctgcagttgtatgattggaatttcatgggtccccccacaaagaaacctctttgaagggatggcatcattctcccttgggtattgctaaacacagagcaggtgcccagctgatgattctacaattaaattgggcagagctataattttacttccatacattttactaaagcacccagcaaaaggaatgagagaatactaacaaagaaacaaacaataatctccatatccgtcagatttcttaagggattttagagattttcatgaacagcagtaaacattctggaaaaggtattagagattatcttgtcaacattaattcaatgggtagagtgccaatgagtcagggatatcactgtattaaaataatatgcattaaatctaaacaaatcaaatatatagttttggtctaagtccaatactatcttatccttgtcaagaatatagacaagaagtggcatgttcttaaagttcaagtaaaagatgtgtgaaaacaatgtgaaaactatattagtgactttttttccctgccaaactgggaagagagatcacaattatcacatttcaaaggtggaatgtcttggttcatttacgtatcattgtttcaatggcaacaggttttgagacccaggggattaataatcaaatctaccaagttatttagtggtagagttctgagtaaatccaagattttctaagtctccaatccaaaggcccccctttctttttattgtcatttcaagaaatacaagttaaaaactggtcctctctcactttacctgccctgctgtgggacaatgtccctttgaagaagcacacccttcagatatcaaggccttcattaatgaccttcattaatgggctcaggctggggaacttgagtttcagaatgaccctcgtaaagacccgaagccagctgtatctctttgaaaagcagttttaaagtttacccttcaccttctgataggtgaccaaaatagacttttcttaccttaaaaccatttctctaaaatcccagtgggaaccctcatagaactaattaactcagacccataagaaataatattagaatctggctgagcataacaaaagatgaaatttgatatgagtaaaacacacattcgtccacttaatgcaattagatttttttctttttttgaagcactcttgcttggctgttcttgaaaaatgtaactattgaaaaagaaactggcaagatcttaaggactggggctcagttcctggccccagtgatgggcttggaaattgcagctacagcaattagaagttccaatttccagttcacagaaggtcaggccatggggttatccttggagcagttctatcattcctctgaggaaaggttccaccaacttgagggaatctggaccaaataccagtgaatcagcatatatattgttaatggccacaagcaggtttgaccttaacatcatttttgaaatctgcagtgacagttgatctttttgtactctgtcttatcaaatgtgagccacgaattagcaagtacctcttacttcctgccattctctagatggggcttctcaaaccttaacacgcatccaaatcctgtgggtatcgggttaaaatgcagattttgatttaattggtttggggtcagggcccctgactctgcatttctaaaaagccctcaggtttctttgagtagcaagactctatgtctatgtgtattttcacacactaagctttgtttttcctaagcaacattgatacattccccttagacaatttgttaatcaaaccaattagcccgttgtaaacaagagatacaagagattgtttcttgccacaaaacactttccctagccagttttcaaatctggtttttctaagagatagacttttctgttctttattattactgttgtttttgatatgtgtgttggggagggagatcaaaatcatttatattcattgaaaccaatcatccactgaatgactttaaaacactaagtggccagtgtctacttcagaaccagccagaagtaagcctttctttgtctttagcttacacatcatgatgcttttgtgcaatgttactgaacccccatctgacttatctggtaagagagattttcataattgcatgcaaagcaccgataatctacagaaatgccagccagatttgtggcactaatacctttcacaagtcttatgattcatatgactcagggcccacagactgtctaacttaagggaagcctgaaatgatgcttattgtatgtgtgtcattgatcttctcaaaattcatcctcaaatatctgttccatactaggaggtaagaatcagcagaaaagaaggaatctttggagagccaaaaccatctctacaccaaattgagagactggaattataaggtgaatgcaattaactggcagtcgcatccatgttgagaacacagtcatccctttaatagagaacatttgctgtgcttgacaaactcacagtgaaatggttggatccataggaagcaacatgctgaaaatggtttcaatatgatcctgttttttcactcaatagccattgattgagggtgtccagccaaaaacaatgagaaaatgagccaacaatagtcttaccctttgaccatattagataaagtcgcagctgaaatttgttatatgtttcaggaataacaaagcatccatatggaacatatatttggcagtgtggcagctgatgaaaccaggaaaattagacaaattatcaattgctcgctcccaaattaccccaaaaagaaattagatccattttcagtagctttgccttcaaatttcttcattccgtgagtcaccactaccttctgccaaactaaatatgtctatgaacggctggaaactttaatggaaagaaacataaaactcaaactacgtaggaaaatttaagcttcttcatggaagatcttcgtggaagactagcaagttaggaatgtgtgaagacagacaacacatcgataattccttttgtttggggtcacttctgagttagagagcaatgcaacatgctggcttgacttcaaattaaaatcagctttttcctttatttcttttgtaagcctccaatccctcaaactactagggtttattaaggtacacagtcctacagtcaggtcgatcagatttgggataaagagacttcatgatgttatccgatggatggtagaaattagtaaatgaagatttcatgaatggctaagagcttaattttctagaaactattctgaggtgttacaccagaagaatatgacatagcagttcactttgagtgtatggactgtggttatgagcactaccctcatatgagtttattgaggttaagtttaaagggtccagctgtgcaaagagctctggaccaagcatgaggtgactgaaatgtagccttggctttccgaccagtagctccagcttttccgaccaacttttgtgacctcatgcacatcatgttttttctggaccttggtcctttcatctgggaagtgagagcactggatcagattgctctatatggttctttctagctctctaatttttcaattctgcattggcaaatagaaaccacttgtagtgttctctaagggctggtgctccagctgtgattcataccttagccagggatgtaccagttgttgcataccttcccttgcccaacactactccttttaaataactcacatagaagtagagaggaactgagtggaggttctgttctcactttcataagtagaccttattggtgagggtccagtagcctttgaaaattacctgttgactagagttagcttaatcttgagctaggcattttcagtggagcagtggtgaaggggtcctaagaggtgacatctcaagtagacttgttgacttttttctcctatatcttcaatctcagatccaaaatgatgtcagtagcaaattgtaagtcatggtatatattctggggactggaagaaggaaatagcttttggaatgacattttcaatatcaaatcaagaaattttattaagtgctccatactagatgctgtgaaaaacaggaggggggaaaacccttaaaacttagtctgtgttcttctgaaaaagctcaagataaaatagagagaatgaaaatttacagtagcagcagtagcagtagccagtatttgattgtgtggttcaaaagtgttacaactgcatcaaatgttgtgtctctgggagccatgggatgtgaggcccctgggatagaagaaccacagggtcactggtccatatggtgataaaactcacaattttgatttcatcaaagccattctcaaacaaaaaaatttaattcccctaagtcaggctgtgataagaaaacagtttggatgtacaacttgagagtgcgaagatactttttctgattagtgagtacatttcctctgctgaatgctgctttttgaggctaagcagaaatcaccaatagctgacttgagagaatagaaatcttttgcctatatgtgatatctctcagtgactacccaatcacctcgtggggaacaaagtctttaagcaagctcagtgtggtaaaatgataggccccatctctttgctgcttcttccaatgagaggaaatagtgatactgagtgagcattctgaagatacattaattaactcttgggtggtctcaatgtaaagtgatatgtgaacaggaggcagcaacatgcttttcttttttaattaatgaggttgagaagatacactgccaaattaacttttccagattataattgttgcctaaggttttacagaaatcatggcattgatctaatttgtgagccatgatttgggatacaaggcaaaaagcatccaattcagttcatcagttgtgactatttggatggcccttcgtttccaaagcacttctacagctgagcctcagaacaactcagaagtgtatttttattcccattttacgataagctatgtaaggctcaaggacgttaagtgacttctccaaggtcatagaactgttcagtaggggagctgggtcaggcccaaatggggaacttctgactgtttctgagcaattgaatgactgtgataggactcagataggaaaggcacaagaaaaaaggagaaaaatttggtcattacctttgaaccaggctttttcacttgtgaggaattgagtttatttattatgtgcctgacaagggaacagccacatatgttaaggtcaaagacaactggctgggtgcggtggctcacgcctgtaatcccagcactttgtgagtccaaggcaggcggatcacctgaggtcaggagttcgagaccaaccaggccaacatggtgaaaccccgtctctactaaaaatacaaacattagccgggcaaggtggtgcatgcctgtcatcccagctactcgggaggctgaggcgggagaattgcttgaacctaggagacagaggttgcagtgagccgagattgcaccactgtactccagcctgggcaacagagcaagactctgtttcaaataaataaataaataaataaataaataaataaataaataaataaataaagataaccaacttctttttaatttgctccaggtggtctcaatcaaacttctaagcacagggttctactctgaaccatttctgcctgcccttccttctcttactaaaatacatgaattccatggctataaggcaagaaagaaaaggcctgcaaaaggttttaaatagcctataggaagaacttttatttttcagagaaaagctttcaaaaccacaatgactcttctcatggcttgctccaggcaatggaccataggctctggattaaacagtgactgagaattgatgtgttactttcactcatggttttccaatctctctaattgcctctcttctggagacttgtctagtctaggaatctcgactcgggggtgattttgcccccaggggtacatttggcaatgtctgcaaacattcttgatggtcgtgactgggaggaagggactgctggcacctagtggatagaggccaagtatgttactagttatcgtataatgcacagggcagctccctctcccagcaaaaaatagtctgacccaaaatgtcaatagtgttgaggctgaaaaactctgttgccaatggcgcttggggaaagttgactgaggagtatgagaataaggtaagattttaaaacagtctgggcatagtggctcatgactgtaaatccagcactttgggagactgaggcgggcagatcacttgagcccaggaatttgagaccagcatgggcaacatggtaaaaccccatctctacaaaaaaatacaaaagttagccagctgtggtggcatgcgcctatggtcccagctactggggaggctgaggtggtaggaggatcacttgagcctgggaggttgaggctgcagtgagctttgttcacaccactgcactctagcctgagcaatggactgagaccctgtctcaaaaaaacaaaaaccaaaatgaaaaaacccacatcacttggtctcataaagaggttggggataggttcagcaaggagggagaagaaaaatctatagtgtccttaaatccatttaatccagaattctaagtcttggtgctcctttccccagttttacaggtaatcaggagttggctgcatgtgggttggctcagtgcagactttctaaatcacttgcctctgatgaaagacccatttcatcagggtaaatggcacagaggtagtaccatcttcccagcaatactctccggattgcttctatgtctgacaaattttcaaagtttaaaagggtccctcaaagagccttttagtacctcataaagaccagagatgaaagaagaaaaccagaagagattcatagagtatttgcttgggagtctgcaaaaaaatcaggtgtaaatttcttttggtttgggacagtcagagaaatctccagaaaaaaaaagctgatccaacaactcgtcagactgtttcagattttccaggagcgcagctttgctaagtcattccaaagcatttctaccaaagttgacattggagagagtgaccatagagtcagaatagtataatatacaataatagtcaaattatgaccttaagtggacggaatgcccaaagtacatgtgaaggctttgcacaccatataggagacaggcagggaatcactttagtttgtacaaatttccacagcgagggagcaaaagtgttaacctaagtctcaggtgaatttattgaaaggaaggaaccaacaagatctatgctcatttggatgaatttgattggtggcttctcttggtcattttaatttaccaggtaactttgacacagacatggctaattgttgctaaatggaggaatactgcagtgggatgagaaaagagaatcacagtatcttctccctttgtcactaattagctgtgtgactttgcacatgtcacttctctctggatttcagtcagcatttggctaattcttattattatcattttcatgtacatgaatgtatggggtaaaagtgcagttttgatacatgactagattgcataatattgacaagtttatttttcaaggacttctaagtttgtagcaatcttcaattttattttctttgaacaatcgggtagttttaagagggagagattacagagatgtatacttaatcaataatcaggttcttgggtatttcctcccctctttttgacccctcttttttttggcatggaaatctttattcctgcagaatgcctgagcatttaatgcaaaagattttaatttaaaagaggctgtttggtctctgctggttgcacaatttctctttgtgtctgtgctgctgatgatcaaatattgcaaagccattaattaccttaggacaaatgcagagggccacatgcaaaggttctggccagttgcagaaagcaatatgccagatgtaaagtaagtgaagggtttttcttggtatttaaggttcagtgaaaaagtaagaggggcagctatgccaagaatgaaaagctagagcttgccaagtgcttctttaagtggctttagccaatgtgagactaaacaatgcattaaataggcatacaacttactgcagttagggaattgcttgtcaaataacacctctttgctatgttttaaacatgatctcatgtatagataaagacaaacaaaatgttgtgttgtcatctccttagtctaacagctaataaggcctgggggtttgaactttccaggcaacctaaagtaattctttgggatgtctcatggagaggtgtacgatggaactctgccagggcggcagctcaatgcgaaaacgattttttgccaccatgggttgtcaaagatgtctggctgcacaaaagagcaaagcccttgcaggctgttatcgagaacaatgagacatctccttgggagagaccttgtggctattttcactgtgtctgaatctgtggtgtgggctgtaaaaccagaaggaaggctgctgaagagatgaagtcagctctaatggagatcttgggcaatgatggcacgacacaagatgtctggtcaaagtattggaggcccattgaattagcagaatgccaaaattctctcctggatccaaaatgtctcccctaccagccactggagataggatacatttcaataccaatggtcttcaaacagctcgttgagtaataccagcaaaggtggcggtcttgcatcccaaccactggctgctcccacatctcctttattttggggaagtttcttcctgcctggattatggtgtctgtgaccacctcccattactacgactctaatagcaccccaagaaaaagtttggtccaattaaacagcatttttttagtaggtctttgagaaagaccaattaaacaaatagttgcaagtaatgaagcacttgaggtttgcaggaagaggaagaagatttgaagttgggcagaagagaagctccccagatcctactgcatatcctggtgtatacaggtgagttgcagtgttctgtctgaattcagtctgtgaagggtcttgtacagcagcagcctctaattagcctcttctaaaagaagacttttcttgtgcatcctgaggaagttttcttagaatttcctcaatttttccagaagctaaaatatagggtcattacatagatatctctctcatgcctcttttcaagaaagtgttcaaaatcaatttagtcaccctgggattcttgctccttatctcccagaagactactgggattttggaagcatctccctatgctacacacttcttggaggcaagagaacctagctttgtttctggaaccattcagtggggtaagttacaaaatgttcatgtctcacatttctcatttgtcccatgaagcaataatctttgcccaccaaaagtggagtcaagacaaagtgagagagctgatacaactggattttgaaaaagtaaatatactagataaacataacattcttcatgtgattattactaatactactacataattcttactactcataataggtttttaatcagctgccgccaaggagagaaaatgagtgtgtaattaattgggccgttcatatacctcagcattggcaatagattctgcaattgatctcagaagagaataattaagtgtaatagctcacatatgtggtgcttactgtgtgccaggcaatattctaagttaacatattccaatataataactaatttaatcctaacaccaactctataaggcaggccccattttacagatgagaaaattgaggaacaaacaggttaaataacttgctcaagatcactcaccaagtaagttgcagagctggggttcaaacctgaagtgtttggcaatagaggccatgcccttggtcttgaacccttcgctctcctgtttataactctccatcaggagggagatggtcttgaagggcattagcatgtcagaaaaaaatgcaaattattttctaattttgcatcattttcttagtggtcctatggttgcagaaactggtcctttactatttaaagacaggaacaagcatttggggtcaatataaaaacacattgcttctctttaataatatctgtagcctattagcttagtggtactaatgaggccagggtcataaggtcaaaccccacatgtaccaattagtttcaaagagaaaagctttcccacagctagtgactgtacccctaactttgaccagctgtcacacagatgcatagcaggcagtctaaggggtaccaataaaaggaatgaaaatgatgcaactcaaatccagccccactcaaaacaatgctaatggtgggtgagtgtgatgtcaaattcaccaattatacactctcttctttaattgaaaaggtaataggctgggaagaggcttttggtgaaggtttagaaacctgtagattcttatttgtcccctctaatttaataaagggcatctaaaaatgtacatactcacttgacctcacagtcaggagagtgagagaatgtaaagatgagaactgtcagtgggtctatcctaacaaagaaaaatgacagtctgttttcatgaagcgtgtgcttctttggctccttagtccaaaagacctgcatgtatttggtcatatctaagcttctattccatccccgaggggttgaaatccagcttaaagcaaaacaaaacgaagaatctggctcctcttactttaactgggtggaatctcctatctctggggaccaacagaaactatgtaaataagataaaagagactaaatgttatttggtcactacttaaatccaaggttgttctttcttgaatagcaccagagctttgttaaatacaacctagactatgagtctgttaaagctagaagaggtcatttattttaataaaattcccttgttctatggacaaggacgtttagacccaggaagtttaaatgcctgccaaactcctacaactaatgaacgacaggtctgggagtagttttctgggcagtatatatcaaaggaaagaagcttgacttaataataataacctagatctaagaaggttgttgcaatcaataacaatgaaagttcattgtaaagtttcacttaaagctcttacaaaacagtctgttttaacccatgaagaatgccattcgtttattcagacctgttcttaataactatacattggaagtatgttttacaaaagctataaatcctgaagagctgaaagaatatccaacttggcttttctaattgatttacttctccatttccccagaccgccaaggtaaagcatatacagtttatttaagggactgtttatagactcttaaaacttaaaaagaccccagaaactctctttctttcagttgctcttaattgaaaccatccaagatggttggttgtctgtcaattttttaagaatctccaaggagagaaattccacaggcccatagcagcatgttaaaatggttaatcaccatggctgtcaaaaattatatctatggtaagcttcacttctcctatttcatttgaagctctttttctcttggtgtttttcatgcaaaatgaggttgtaatgagccaccctttataagggctccatcaatctagtaagaaaatcgctagctccttcccaatgtgctttcatctccattatgccaccatttttctcacaggactgcaagaacacaaggctggctgataggctctcctatcttccctatgatgcataggaaagaatgagtaattagctcttcattgggtctttcatttcataaaatgtctagggaagctgcattaattatacatgaactgttccatttatgatgggataatgttcacaaacagataatctagaaggttgctttcacttgctgtagtggaacttgggcttgaaggggaatatgagctcaattcacatcattgggtcaatctacacacagtaagcattacaaaatattttattcagaacagttctaatagagttaaaaaaaaactctccttgttaaatattgcagattgacaaaaatgatagatatggaggcaattttcttttagatgtttgaatttcaaactaaaatcagaaactgccttctactactaaaaaaattgtacttccaaaatggatttgaagcagtttaaaataaaagtcacagccacaataaaactttgaaaataagtgtaaagagaataataggagtcaactgacagtgtatagaggtggggaagaatgcttccctctaaaaagtatttcaaagactatgtgcttagagctgacttctccacacacagtaaatctcagcggatgaaaaggaaactgaatgaaatttgttgacaacaattgatgcctgtaggaataattggctcagacacaaaacagacatcaatgtagcctggggatgaccaaaatgcagcagcctctaagtcattgttagtatatattttttcagttcaaaaaaaaataaaagcagttttattaaataactagataaccatgaggtgagaagtattgtccacagtacttgacaaccttaattcttgatggttcttaagaccaagatcccaaacaagtaattccattctattcgattggattcaactagactcaattcaattcaattcaatcctgtcagttcaacaatcaaatatgggcagctactatagcatccaggctatgagctagacacttggattcaaatgtaaataaatatgtcctttggcatcaagaagcccattgacagggtattattcttggcagggtagaccaaaatattcaagaaaaacataaaggatataatttattctccatggttatttttctcttatgacaataatacttagttgcatttttcttttaccactcaactgtaagccccttgaaaacaaggtcaatctctcattcatttctaggcatctcattcatatctcattcaatgcttacacataacagatgctccatcaatgttttgaattacatgaaaataatctaaatggactaatttcttttgggcaaataagattgtccagttgactagaaagttagcaagaatacttttgggcatgaaggtatgttggacacttctgtgcatgagggtatgtcggattaacataagtcatggaattctataaggcaaaactcatgacacacatattttcaatgacaatactgacaagaacatatgatttacaaagccactttctagctaaagtcatatagtaagaatcaagatttgctatatataacatttccttttcaagttattgagatacaatttttaaaaatttgctgaaatttgattgttgcagtaacagaataagagaacctggaaattggtttccattttagttgtccaatatccttaagtgtctgtgcaaacacttataagtatcatacagttacttaggaacaatcattttttccattctaatttttcatcatttaatgcaaacatcataggcatagaaagatccagttttcatgcactgtgcatggaaattctggagcaatgtcgtgttgaacatcacaattcaacctggcacgtaacagaggacacttctaggcttggcaattacctagtgaactggatcaaaggaaattgcacaaatggattatcaaggaaaaaaaaagtccccttgggcataataagtgagaaccactttttcatttctttaaaaaatgaggatcagtagctgcaaattatagaataattatgacccactgttggatcatgtgatgtcccacagttatcttccacaggatattttaaaggtaaaacaagtctgctattggaaaatcactcacccaatgcactcattcatctgctctgcaacagagaactggatagaattgctttattgccagaaaaataaatgagttcgttcaattaaaggactggctggaagcaaatagtgggaatttgcctattcaaatagtagaaggcacttctgattctttgtcactagtgatttaaaaactatttgttgccaaatccactgtaagtactgatcgccaataccctcacaagcctctttcttcccatctcccttactgatctccagactggtatacacaggccaccctctaccctgccagtcatacacacacataccccacctgcctagagagaggctgacatttgggaaggatgagagagacttcaagtgtgtgagtcatcacaggagctattcaaagcatagtgggtaactgaggtaagctgtctacactggagtgatatgaacctttaagaatgactcatgctcagtttcctggaactctctaaaactccaaagaattataaggaacaagcatctggctttaaatctttctctgtcctataatatacagtgagatagatgcatgggagctagattctttaagtgatcagttcccacaggaatcattgacttttgcttgtgtgtattatttatacgccttgacttggctgtctactttttactggctgttgactttctaatcacctaagagctatttaagagataagtgattctgtacttgtcagagacccttttccagatggtgatatcattgatgggtcccggagaagaactatgccaaaagagagcaacaacaaaaaaatcaaggtcaagtggcatagagggcaaatcagtatggcatttcagtttgcatttagagacagtctgtgtatttgcaaacaggcctgcctttaaggggagttaaccttctgtctgttcatggtgatttcatattgaatggagacatctaggatatgccctttaatattttttttcccagatccacatgactggagagtccttactattttactccaaatcacatagcacttaaagcagccctgcatgtgttccatatgtttatatgtgcgcccataggttttgaaaacaaaaacatcaatacctcagggttattttgtcctgtcctttcattgaaaggaatggaatagtgaggtggatcataatagttgaaagaaggcttagcaggaagtagttaaagacgaattgttaaggaggaaaattccatcctagatctgcaaaacctgccaaagtcccgccaaaacactatgcttactttaaggtgaggaatctcagaggcctaggatggctgccagatacgggcactcattcagttattcacacactccctgcggttgtaaatccacagagctgtacactttagacttgagcagcacattgagagggagggctacttactgaaataaaagcccctgtctccacacacgaactgaagagcatccaccagctcagccccgcagagcgtctccggtccagccgtggcagagctggtgaaggtgagcaggcacagcgccaggtagaagagatgcgaggaggacatggtgtgcatcttcacctgcccaagaaacagagggagggtcaggtttcctccttgatccttgcaaggggagtggggtgggacagaagtgcattgactcccacgattccacgactgtcattaatcaggactacccagcacagaagccaatagagtacatgagaacccagagggagttgtggatggagcgtgtctcggcatccaacaacctgtgtttattcccctggctactgtggatctttggaggagtcctccctgaaccctttctttatgggttcctatttcaatgaattgagacaaaatatctagaaacgtttactacggaaatgaaagatgctattattacagtgggatcccatatcactctgagaccctggtagaacttttgaattatcaaaggttaaattgtgctcagtacagatttggggccaaataagttttgttaatttaaattctctcaatattggccatccatagatggtatatgcattcattattgagcagaatatttttaaccaaaacatcattccctatttttgactaaaaataatttactatggccaaaaaatggcttttgacaatactatatatcatcacagggttttgtttttgttttgtttcctcaatatgagagagagagagagagagagagagagagagagactgattccttacctggggcatatcagcagttgacacaaccacaaatagaagaaaataacagaaacagaaaaaaatatgagaatcgaagaatgaaattggctcaaatagaaaccactcctgtattctaaagtccctggcctcaagtccaatatcaaatcaacacgtgttgagaatcccttctgtgtatagggcactgggctcaaactggcaaaaatcttttattttatttttagtcacaggaattatggcttcatctcttggagggacttatgtgtcactgtatctattttatagcaaaatataccaagggacccctggttggcatgacttagtcaatgatagactgccaaacggcagccttgccaaaagcagcagtcctgtggctcaagtcttcatcctcactctaagtagtagaaaccatgctaagatgatcattaagtttttccatattgttacttgtggcacaaagatgtggctttttccaagaagcctctcaaggtgagtggcttcacttctctcagatgcatctactttcagcatcatgggaagagtccctgacagggtgttaggtgaggggcgctattaaaagggttgtggagtcatgctggaagctataattataagaagagcattttttttgaacctcagagtagtggcaggtccattcaaccccatcacttttggagaaacagtcatttattttctgactaccctccttgccctccatggactctcaatttagtggctctatatcagtggcaaaattttccccatcattctaatgatgatttccattttttgtagtcagaccttcacctcagcaactgaggaaaaaaaaaaaaaaccaaaacccctgtctctcgttaacaaaatataaatattcagttaatggttgtaaagcagttgaagatgaaaagcgccctctatttgcaaatgatcataaataatggacataaaatagaagaggaggtaaaagctcaactgaacatttactgcatttttctcaacaagatctccgcatggaaatcttccaccccctacatagcccaaaacactgggactggaagaagcatgttatcatccagttctcatttttttttttttttggttgtaaaattagtggggttttcctgttcaatatttccattggaaacctcaacaaatccaacccacctggacctcgtggcatttttcaaaagaacaaacctgtgattgatcttgcagagcatacccccacactgcgggaatgggccagttctagaaagtatgttattctaccgaatcctatttctccacccctcccttctttgttgcgttcatagcaatgctgaaggctaagcacctgcaactgtagatgccttcaagttcttcagtttttgtgaaatccagggaaaaaaattactcaagttatagccttagtgaatttcaaacttcattagatgtcaaaactatatttttaatagttctagtataacacatttaagtgcagcgatacatataagtctctggaacttaagaatttaagattttttttaaatagatttctctttttctttttttttttttttgctgagttatattgtcagataaatctcagtacttacagttctaggacaagacagaacctctagtgcattttcctttagtgtagggaacagtccagtacacccacagagaaccagagaattttatgttcccacaaatgaaaacaataccgaacttgcttaggagtttaaagtgtgaaacaagtggtcccatatgttcattatttccttggccttttattttgccaaacacaaaagaaatcaatagagagaaaggaaagatatgatagaaaaaaaagggaagaatcagaaagacatgagaaaaaaagaaaaaaaaatcagaaaacactttctcaaaaatcattcacaaacccaaattttaaaagttcttttttttttaatcttagataaatggaatattaattgattccagatgtctgggccacaatgaaaatgccctgtaaaatttgagggcaacagtcataagaaaatactcactgtaggtgtaatcatttttgtttgttccaggtcttttacagcaggtcagggtgggtattatgaggccgatgtgaatagaaaactgaagtcttaaaaacatgtgctgctttgtgggtggggtttgtgaaagcatctagttacatttggacacccaggcaggtatgctattatgagcctgggtaaactgccttttgtccattgaaacaatgaacaaattgcacagctgggatttaagtcaatcttttccccccagtcaagccacctatttccattgtatgcctattgtagcagcccagatagtgacccaagctccagtccactcccttactcccttcccccgactcactcacttggaaataccttgagagtcagagtacaatcagctggtgagctctgcctctgggcaggacacctttacccactgaattacatgtgaaagaccacgcagctccctcaaaccacttcctgcttcaagtacagaaaaaagtaacaacttattaagagctccacttctgaagtgttcagcatacacagcatgaaaagtgcatttggaaacaattttcttaacttgtaattaatgcagagataacgctccacagcctcttttatgatcccctaagtaaggagacaaaaactccagctgctagatcacatagtatgtatgcacagtgacgtcatttctttgaaagcaaggtggcctgcatgtgttggcatctcaggaacagcagaatcaggtgcctgacaagggtgtatctttaactcctggagccacttacttgactagggaaagtcgtagtggtgaagtgtttgaaagcagcaactgaatgctgcactaagtggcagagacgtcttatgaattgagccctcaggcaattgaatcggtggagccagtgacagcagcttaaaagcgcttgcaaattgaaaaaaaaacacaagtcttgaaggatataattttgctgagaatggaaactagaactacggccagcaatcggaaacgagaagtcggtgcactgacagcagcagccagatttacctaaagggacttcacgacactgaatataaaatcagagttttataacacagaaccccaagtccaaactttgcccatgaaagtcctcttctaaacagaaaagttgggcaagcagctcttagaaagtttctgctttccatatacagtatgtatttgtttaaattatacaaatatgcaaggtcagcaagagttgtcaaggagttcttttttggaagaacaaattacactttactctaactttaacactctctctgggcataagtgcagagttccgggaccttagctccaaagatcatatttaaaagctttaatatcatctaaaatacaacccttcatatatagcatgccttgtaaataaagtcctgatgagttacacacacagagacacatacacacagagacacatacacacatgcaaaagaacatggtcttaaaaataaaacatctgcacctgcaaaagaaaaaaaaaatccccaagttcatatccatgctctatagcccttagccatagagaggatttaaaggaatcttctgtaatgacaccacggaagccctgcagaagtggaggatttagcataagtaccttgcaatagtttctactcatacagatatctgtgcaaatgcatccatctccccgagctatttttcagattccacagaattgcatattcagcaatttataaataactctcggttccgaaacaatgaaaattttaaagtgaagaacagttctaggcagaagcaaacagtacacaatttaaatagaattccccaatgacttcaaagagtaagaaatatttaccttcaagaaatcacaaaagcagcacttaaataattgggttggaagactgctgatttttcccattgcttctgaagtacaaagtctgaaaatgaattggttagcaggaataatgaagcaaaaagaaatccagagagatgggagatgttgagagcaatgtcacatttcaattttgaggactttattccattgcgcaggctctatctgctctgaatttagcagtgacagtgagatttagcaaacagaagagggatttagagaaaatcctcacatttatctacaaaacacagacactgtagacaggaaacagctgggggaacatttgccttctctctctctccctcttctggcaaagttattgagtaaggacttttttgggcatggtgacaaataacatcatacctttgcattttaaaactagagcacagaagcatttttttcccttaaaagaatgtgtgttagtgacagggttcgcagacattaaaatacttatgctgccatagaaaataaggatctgttttctgattaactttctgctgggcatgaagacacaaacgtctgctaatacaccttaccagtattaaaggaatatgggggatgggagagcaattttagattctagagcaaatgcattatttaaaacaaaaaaagaaagaaaggacgataagaccctctccagcaaactctacaattttaaccctgaagtgactggggtaaagtagattggaagacagcactcgggtgaccccttgtcccagttgccaagtgagaggtgtgatctcatttcctagaacctatggaggggcaggcagcattggattggtccctttagggcactgtctcatactttttctcctgcgatgaggcaaagactatgccgagctgtaaaacccaactgaaatagaacatttttctttattcttctactaggctgcctgtcactgtcccctccccaccccaccactctgggagaagggtacctggggggcaaacaattttcctgttgtttgaattttccatataactcaaacctgtgtgtgtgtgtgtgtgtgtgtgtgtgtgtgtgtgtgtgtatgacagagggagtctgtgtgccagagtgtgttttctttctctgatttttgtgtattctaaataacaccagctggctagcaataccctctcgagggttatgatgtcattcaaatccctcaactgggtgactggccggcaacatggtccaagccagctgttttgctatttataatgtacacttgcctttgccattgagaattcagttctgatcttttgtcgatacagtttgtacctatttccctttggttttgtgaagcagtagataagaaagtgaattataaaataaggttgcaaaagcccagagcagacatacctctttccctagagagctctccaggcctggtttcccaggagtggtggaaataacctggaccttgaattttttctttttttttttttccacatgactctcaggggactgacacatcaactgaaaacacagttctgcttgaaatcctactctggctctttgtgttatcctggggccagaaatttgtttgtagaagtgggtgccctaacaaaaaacaaacaaacctgctttgtttggaagggggttgggtttgtttgagtcttctgtgtggttaatacattgtagcaatgtttacctttcagaaatcaaagttagaaatctggaattatgttgtgtcaatggtgcactatgttcagcaacattttgtgagctctactatgtgcccaactacaacatccctaggaaaacaaagaggaataagatatggtcaagtcccttcaggggctttcagctgaatgtcagagacaaagaggaaaacttcacagtcatatgatgggcatgtgctcttttaaaaacatgaacagtgcacaatgagagggagtgacacattctctgggaagacaggggagtaaaatcttttggaaaatccaaaatgagggaggcagattgtgtcatgagaggctttggggtaccatgttgggaaatttcagtgggtgggatttgacccaaagagcacactaagaggtatcatcaagaggtggcctagtaggtggccctggattattcttaatgcagggattatccacatgtgcagatgtgtgagtaatccctgcatttaataataatccgtggcttcctttaataagctctctttgtacacttgatttgtgacaaatctttttcttttctgcagtttttgtggatcacaccctttctgaaaaatgtctattctcttacagactttgaggatgtagattgtataaaacaatagagctgatctcacctgtcttccagatgagaaaaaacctctttaaccaagtttggagagtcagatactggctggagtcttggtgctaagttcttgttccaacattggacaccattacaggtgaaggccaggactttgtttaaccccttcccactgcagttttagcatactttaattgttccaagatgtcctagaagctaactatatgtctccaagtctatcacccattttgatgttctctcttggcatgctcggtgcacagatataaccttatccacaagcatttcatatgaaaggctgttttggggacagatgctgtactccagcgatattgacacactgactcacagtctctcggttttgtaaccccaattacccttaaaggataattaggttttaatttatgtcctagtttttatgtcacaatcaaagaaaactgaaatttcagtgagtcgtaattgtcatcagctgtgctttggaaacattccaatgagagctatcagtttccaatgggggaagcaatttcctgaggtgattaatgtatatttcaatttggagaatggtctatatttttggacagggtgagccagcaatggatcagggcaataattcctagagaaaaggtcattttcttggctaattccaggagtcaatatgaaaatgaaagagcaataaacatgccaccagattactttttaatggctaagtgatgtacctgtttaggagtaaaagaaatgaatgcacctattactacaaatccaaggtagtagtaaatctaaagcccaagaggagttcaggttatgaagtcccattggagagaaacatctagggtcattataaaagtatggaatgattatgtagtctcctgcctgcaaaaatctgacagtgagatatggccaccaaaatagctaaccgcaaggatgtgcttatcataagaacatccactcctggaaattcagagattcacagtttcaccttttgcatgtgtaatgcctgtgggatataaataactctcccctaaagccttcttcttgagtagcatatttgcataaagctacagcctcagaaaacttctgacacctttcgcacacacacagaaaaaattgttcatttccttaaagggtgagctggctaaggtacacagaaagcaggggtggggtgggcaaggaggccctccctgtcttccccccaactttttttttcttctcaagccatgttcccagtctttcctgtgttaactggagaggcgttcatccaaaaggtaatttcatatccatgtacaatagggcatatttacaatttatttcatgaatgtctttgcttactcccaaggaaagctcagaatggacatttggaggtaagggaattttggaatcaaataaagggtgaggcttaaggttctagggcaaccaccaggcaaagaacttgggggaaactattggatgtttcttttggatcatggtttgtgaggagggttggtcatgggttgctcaaactaatgttggaggtcaagaacttgtcaattcagaatataaaactcagaggaaagacagggcctcaaaaactcaacatgctgccgagcaaggggcctaatgtcagctccaaaacatctgctcagaaagattcctgtgattccccaggaagatttgctcaaaggagctgctctaactccttaaagaagtgtttcgcccacgactagggaaaacagaaatagggaggagaaatcctctcactaaagaaatcaatgctttcttttcaacatcaaacttggatcttatttcttctaaaatgtcaaaagggcaaatactggaaacagaaacgaaactgttgtggttgtgtgagcaaagtaattcttcgttatggcagaggagaagtcacggcatggggtaaggatgggttggtggagtgagagaacttgaggactcgtcacgcttgccccacgttgcataaaatgtggggaaaagagacaccaacgccaaacttcaggggcaggacccacataaatgctttcttggggaataaaaaaatgtgcgcgccctctagtggacttctgagaaactgccactgcactcttgaccgtggatgcgttctggcaggagtgggttttttttttgaaagctctggatttaaatacattttaagctacacttatctttagttttattaagtcttttgaaataagtaagatagatgttcaactcactgtagtttaaaaaggggaagattgataagggggaaagaaagatcataaacttcatcagggcatggatggattcctcatggccatattcccagcacttaactccgggtgcatgagctcaaaacattttgttgaatgaatgcaagtctggaaaacaaatgatgataaaggtaaaatataaaaattgcacaaactctttaagagtaaaataaccaacctcctcattttataagaaaaataagaccaggaagaggggctgttggaggatagaaaaatgacttctcgagaagcaagacaaatttaggtgctcacaaaatagaattcaaacccagtctccttgtctgttctgcagtatttctatcatgttagttttcaaaatgtgggttataacacccctggtcaaagacgtggcgttaaagaatcacttaagtatagagatgattccatttacaattccctttctgatcctgaatctccaaaggagaaagtctcagtttggcgctagtctgtcttcagtgcttccctagcactcattagtctctctttattttattttttaatttaatttttaatttttgtgggtatgtagtaggtatatatatttatgggacacgtgagatattttgatacaggcatgaaatgtgaaataaacacatcatggagaattgggtatccatcccctcaaacatttatcctttgtgttgcaaaaacctctcgttttaacaaccaaaaagtgaatctcaagtccaaaatctttccagacagaagttcctattttgtttttatggaatttgcttttaagcaaaacttctatttaaggcaaatgatgctatatttaaaaaagatattttaaagtttagttttaaaatgtatgtatataagtcttaagaacatcaagtcaagaaaaacatatatatttaaagtaagtaaataatttgacaggtggccgaccgttatgacacacaattgtaggtggtgtttgaaaccctgatgtttggaaatcactacaataacatgtcattgtgttagaaaaacaaatacatagccacaacataaagacagggaacaaagaccctctacataaaaagatgccaccatataaatgcattaattacatttctagataattttgatctccattaagctcactcatttttcacttcagtctttcatagagactggaaatgttgaagaggggttggcagacagaaaagcatctgagttaggccttgaagcatgaattcaccaccaagatggaaaaacaatgataaaggctattccaggcagagggaacagcatgagcaaacttacgtaggcatgagaaagttcacagtgatggggggatgtgggagatgaggctgtggctgtgagctcagagtcctacctgtggaacccttttacctcccactccccgtcagtagcctccttcacacagttggatgacttgaaaacagtcttaatttcctcatgttcccttgtacacaaagatttgtgtgtaactaagtctgtgattaactctgggaatggcacagtgcctcaaggtaaatatgtaatagcagacgtgggttacatcagagcctaggcccacaagaggcaggcctgggtaagaactgaggtacctattgatcatctattcacctttccagatattccatttgtaaagcttaattgcagtgtttatactttgggaggtagattttaatgattacacttgataaagatttttcactgtaagagttgaggcaagatcttgtttctggggagcagtgaactctctaggaatgcaggttcatcagagcatcacatacttcatgtgggctgattaaggaagttttattatgctccgtgaaagcagggcatggagccccagactcaatcttttacctcaaggtggctaactggggaaacttctcagggtgcttcctgttggggtcccctttataaacagaagttaggacactcaattgcagcggggatgctgcatccagaagagccctttgtaatgctctacctgggaagcacatacccttcaaaatagtatcttgtcctgtctgggtgctgtggctcaagcctgtaatcccagtgctttgggaggcagaagcgggcggatcacctgaggtcgggagttcaagaccagcctgaccaacatggtgaaaccccatctctactaaaaatacaaaaagaattagcggggtgtggtggcgggtgcctgtaatcccagctactcgggaggctgaggcaggagaatcgcttgaacccaggaggcagaggttgtggtgagccaagatcgtgccattgtgctccagcctgggcaacgagagaaaaactccatctcaaaaaaaaaaaaaaaaaaaaaaagtaccttgtcctctgcccagcacaaaccctttaacacgagttaaacaccttgcagacactcagatattcttaggacaccctttgctcctttcataataccttggtgaagacctcagcttctttcggagctccagataaaatgttaagcccagttgtattagtcatggttctccagagaaccaaaatcaacaggatgtatacaagtatatatagagaggtttattttagggaattggctcacatgattgtggcagcttggaaagtcaaagtctgcagggtagaccagcaggctggagaaccagggaggggagcaaaggcagtctgctagcagaatttcttcttctgaggaagaggtcagtctctttttattaaggccttcaactgattagatgagaccactcgcattatggaggtaatctcctttgctcaaagtctactgacttacatgttaatctcaccttaaaaagtcacagagacatgtacaatgatgcttgacaaagtatttgggtactgtggcctagctaagtggacacataaaattaaccatcgtatcagtgcctctcaaaaggtgcgctcactggtcctccctcactaaaactgagtagtaataatactattttccaagtggcaaaaaagaaaacccaagttaataaattatattttccaattctaagttttcttactcatttttctttcacctgtggctcctgcacttactgtttcttgatcatttccaaagagaagttgtgaccacttgacttggctgtgtcattaatattgtatgaagatgacactcattggcaacaagaaaataaacagtgggtttttttttgtcttattctagaacgcacacagcactcaaacacatgcaaacaaatacaaaaataggcacctgtgcttagtttctctagataataagaagtacactcattccctcataagaaagttagctgtttagaccaatggagagaagtttcaagcctaaggtgatatttgagttgggatgatttcctgccctttagcaacaatgagagagagcttttacaacatgtttatgcctctagagactgactctgtgcctgaccctatgtgggactatgaacctttgtgtagcatgaggcaagtgatttttagcacctctaatacttttttgcattttttttttttaccttaagcaggtattttacagtcaggaaaagtctcccaaaacaatgattggaaacatgattgataggtgctctttgtaccatctgttcttagtgttgactgaaaatgtagcatatacatgtgtgtttatgtggatgtgtattttttaaattatactttaagttctggaatacatgtgtggacggtgcaggtttgttacataggtatacatgtgccatggtggtttgctgcacccatcaacctgtcatctatattaagtatttctcctaatgctatccctcccctagcctcccacgccagaaaggccctggtgtgtgatgttcccatccctgtgcccatgtgttctcattgttcaactcccacatataagtgagaacatgcgacatttggttttctgttcctgtgttagtttgcggagaatgatgtccctgcaaagaacatgaactcattcttttttatggctgcatagtattctatggtatgtatgtgccatattttctttatccagtctatcattgatgggtatttgggttggttccaagtctttgctattgtgaatactgccacaataaacatacgtgtgcatgtgtctttatagtagcatgatttataatcctttgggtatatacccagtaatgggattgctgggtcaaattgtatttctggttctagatccttgaagaattgccacactgtcttccacaatggttgaactaatttacactcccatcaacagtgtaaaagcatttcctctatttctccaaatcctcttcagcatctgttgtttcctggctttttaatgatcgccattctaactggcatgagatggtatctcattgtggttttgatttgcatttctctaatgaccagtgatgaagagcttttttcatatattttttggccacataaatgtcttcttttgaaaagtgtctgttcatatcctttgcccactttttgatggggttgtttgtttttttcttgtaaatttgtttaagttctttgtagattctggatattagccctttgtcagatggatacgttgcaaaaatcttctcccattctgtaggttgcctgttcactctgatgatagtttcttttgctgtgcagaaactctttagtttaattagatcccatttgtcaatcttggcttttgttgcaattgcttttggtgttttagttatggagtgtttgcctatgcctatgtcctgaatagtattgcctaggttttcttctaagatttttatggttttaagtcttccatttaagttgttaattcatcttgagttaatttttgtataaggtataaggaaggggtccagtttcagtttcctgcatatggctagccagttttcccagcaccatttattaaatagggaaccctttctccattgcttgtttttgtcaggacaaaaacctccattgcaggtttgtcaaagatcagatggttgtagatgtgtggcactatttctgaggcctctgttctgttccattggactatttatcggttttggtaccagtaccatgctgttttggttactgtagccttgtagtgtagtttaaagtcaggtagcatgatgcctccactttgttccttttgcttaggattgtcttggctacacgggcatttttttggttccatatgaaatttaaagtagtttttttttttctaattctgtgaagaaagtcaatggtaccttgatgggaatagcattgaatctataaattactatgggcagtatgaccattttcacaatattgattcttcctatccatgagcatagaatattttttcatttgtttgtgtcctctctgatttccttgagcagtggtttgtagttctccttgaagaggtccttcacatcccttgttagttgtatttctaggtattttattctctttgtagcaattgctaatgggagttcactcatgatttggctctctgtttgtctgttattggtgtataggaatgcttgtgaattttgcacattgactttgtatcctgagactttgctgaagttgcttatcagcttaaggagatttggggctgagatgatggggttttcttaatacacaatcatgtcatctacaaacaatttgacttcctctcttcccatttgaatatgctttgtttctttctcttgcttgattgccctggccagaatgtccaataatgtgttggataggagtgctgagagagggcatatttgtcttgtgctggttttcagagggaatgcttccagcttttgcccattcagtatgatattggctgtgggtttgtcataattagcacttactattttgagatatgttccactgatacctagtttattgagagtttttagcatgaagggctgttgaattttattgaaggacttttctgcatctcttgagataatcatgtggtttttgtcatcggttctgtttatgtgatggattatgtttattggtttgcatatgctgaaccagccttgcatcccagggatgaagctgacttggtcatcatggataagctttttgatgtgctgctggattcggtttgctagtattttattgaggatttttgcattgacgttcatcagggatattggcctgaaattttctttttttgttgtgtctgtgccaggttttggtatcagaatgatgctggcttcataaaatgagttagggaggagtccctctttttctcttgtttggtatagtttcagaaggaatggtaccagctcctctttgtacctctggaagaatttggctgtgaatccatctggtcctgagatttttttagttggtaggctattaattactgcctcaatttcagtacttgttattggtttattcagggattcgacttcttcctggtttagtcttggcagggtgtatgtgtccagcaatttatccatttcttctagattttctagtttgtttgcatagagatgtttatagcattatctgatggtagtttgtatttctgtaggatcagtggtgatatcccctttattattgtttattgtgtctatttgattcttctctcttttcttccttattagtctggctaacagtctatctattttgttaatctttcaaaaaaccagctcctggattcattgatttttttgatgggtttttcgtgtctctatgtctttcagttctgctctgatcttagttatttcgtgtcttctgctagcttttgaatttgtttgctcttgcttctctagttcttttaattttgatattagggtgtcaatttttgatcttttctcctctttcctgtgggcatttagtgctataaatttccctcgaaaccttgctttagctgtgtcccagagattctggtacattgtgtctttgctctcattggtttcaaagaacttatttatttctgccttcattttgttatttacccagtattcattaaggagtaggttgttcagtttttatgtagttgtgaagttttgagtgagtttcttgatcctgagttctaatttgattgcactgtggtccgagagactgtttgttatgatttctattcttttgcatttgctgaggagtgttttacttccaattatgtggtcagttttagaataagtgtgatgtggtgctgagaagaatgtatattctgttgatttggggtggagagttctgtagatgtctattaggtccacttggtccagagctgagttcaagtcctgaatatccttgctaattttctgtctcactgatttgtctaatattcacagtggggagttaaactctcctactattattgtgtggtgtatttaggatagttagttcttcttgttgcattgatccctttaccattatgtaataccctttgtcttttttgatctttgttggtttaaagtctgttttatcagagactaggattgcaacctctgctttttttttgctttccatttgcttggtaaatcttcctccatccctttattttgagcctgtgtgtgtttgcatgtgagattggtctcctgaatacagcacactggtgggtcttgactctttatccaatttgccagtctgtgccttttaattggggcatttagcccatttacatataaggttaatattgttatgtgtgaatttgaacctatcattatgatgttagctgcttattttgcccattagctggtgcagtttcttcatagtgttgatgatctttaaggtaccagtttttcctttacacatttagtgcttccttcaggagttcttataaggcaggcctgctggcgacaaaat

SEQ ID NO: 51 - DNA, 78660 bp, Mus musculus
gagcttcctccttctgcaaagtaaatgtctaattgtactcctcgggcttcatgctttgtttcagtagaggcagaccagtctgcaagaaagtctgtctggacctgtaccaactagatcacactatatatcagaccaacctgaacttaaatctggggactgtaatttactatccatacattagcaaaggcacttaagttctccttactctcctaatgtacctcacagctatcttgagagtgtcatatattcctagaactaaggcactaagcctttttaagtaaaaatgaaaatagaatattccattaaagtacatgagatcattaaatgagatcattaaagtaagacaaaagaaaaaattggatataacatatactcgatagtagtagcagttatatatcatcattcactgaccaattctattggccagccattaaatacctagaagtatactcagagctaggtatatgtgataaatggtgacaacatagctgtgcagatgctatactgggactagcaacagatgaggctattgaggaagagtatgcttttaaagttaagaggcggacttaaacaggccaaaggactttgaggacccatctcatgtccctgcagtgtgagactcatgaacagaacatattaggaaaatgctccagcaatggccattggctggattgcttgggggaagactggtttaaaaagagaaaaaagaattccacacagtaatgaggcattcattaatccaatggaggatgagggagaaaagtagaaaggaagggggtgggtcttaaggacattggaagggaatggaagtatatggtgatgcctgctgagtaattgtgtagtgttgtcacagaagcaagccaagatctcacccttggagaggtccagagtccttgaagaacaaaaaggaacactgagaaaataagtatgcacctatacaaatggatacatacactagaagttgagttgaccttgataacagagagtgtgcatagcacctagcactagaaaatgatgtttttaataaatgctgtagtagctgctcaatgaaaaagaaatcagagatcgcagaacagcattataaatgtttttttaatctcttatcactctgctactcaaagtgttatgacaccaacaagaccaagcaccctctgaaggcaaagggtgtacaaatgtctgtcttcatcgggcctcaccccaaacacaacctgggcttgattaggcctgaaatttctctccactgatccaaacaacagattgcaccgtgaggtaatgaacacacttcgtctcatctagaaaaacacagcgcagatggttaagtaggtgcttgtgtgcgtgtgtttgagtggtgtgaaggtgcgtgtgcgctttatgtatatttatttccttctgcagaaaaaaaaaaatccaaaacactttcaccagtaaacagcacctttgtaaaatggtaatggcatggtgaaggtaagggctggaagagaacatcctttgagccataatcaagcagcagtctgtgagccagccaaccatttgaagaaaaagaacagcacagataaaagcgtaaaattgaaaaacgtggaccattcacttgagatttcttctttgtaacttgagaaagattcatagtctcatggttcagttttagtgaggctcagtgagggtatctttggcaagccattggtgatgtggttaattccatgtcagctcacctgcttagtcagatgtcctttaaatgttactatattttttaagtttattaattttcatttagtgtgtgtgtaagcacttttgtatgtgtgtgtcacacactaatatgaaagcttgcctacataagcatatacatgtgtgtgctgacaaacttaaggggactgattgtctaccttatggttcctggagctacaactcaggttgtcaggaagggcagcaagcaccttcacctgctgatctatctcactggctttcctgtgattgttttgttttttcttttaagtattaatatataaatcagattcttagtaaagttgatttctattcatgatgtggctatgccttacccagttgattaaagagtcactagagagtaattggcctccttagatgaaaaagaaggaattgtgatatcaaactgcttttatttggtgagcaatttatccttggctttctagcccactggtctacctatagatttccgctctccaacccactacatctgtgtaagtcagttccttaaaagggaaaaactacatgcatatattatacttctctaaggaatcttgactaatgcaaatgtgcttaaaattttattaaatcaatattaaataattaatattcattctctgaaagaagctgaggctgtaaggtggaaaaatgtatattgtaagtacacatgtgtcttaaggagttgattcaaggttcaaggaaagatataaagggactatacagtcccgggtagcagcctcatctcacacatcaccccaacaattgaaatctctcattcttatgtgtctctgctcatactcccagtgcctgacacagcctgcattgtgcttcagcttagaagtgagctcatgcttcaagagtatattgcttacaaagtggcttattaccaaaggccccagtggatacaaagtatcctctttaattgagtactaaaacatttatccatgcacgggacccctacaggaagtagtctaaagggttcccaagagcctccttgatttttttttaagtgaggctggaggccatgtttcctgtctcagagagcacgataaaacctcctcagccatgtgaagaagtggaacgagctgacaatcctgcttcctggacacttcagggctttcctaggaattagaccctttatcgcaattcttaaattattatcaagtctaacgctctcatgtttccataaaaatctgtttcccaaaacataagcgttgcaggcaaatttttcaaaatggaatctctgtgaggactaaggagtgatcagtcagtgcgtcagctgtcctccaggctgctgaaaccaaactggataataacgtacactgtgttatggtaaatcttaattatcagcaggattggctatggagtcagcagagacatgcctcagggagggtctctgagggcatttccaggaggactatctgagagaagaagacccttcacctcaatgggggacatcttccacaggtagcccaattcctccagagaggtaacgttgccttgcctgcttgcctctgcttcctggttgtgaggacatctattttgtaaatgtccctgttgctgccatccttcataataccagaatctaacttttccagcatttcaatatggactggataccagcagctctacagaaatcctgcagctttcagtaccaaactaaggttgcgtccagccaagtgggctgtggagtcgtaggattctcagtttctcaagtttcaggtggccgctgttagattacctacgctctatcgtataagccaatctagtgcccccctctagtatgtgttgattctatcaattctgtccttctaacccccccaagtaacacagtccatgactgcataggtttttgtggggttggtttgtttgtttgtttgtttttgtttttgcttttgtttttgttttaagctctatgttgatcccagggatcaatgtacaagagaaacaggaaggactgagactattctccagtcattcaaggaagctgccaaggagagagaggagaaagggacactgtgaccgtggtgacagcctcatctcctatatcatcccaacccctggaactcaccttacccatgcctggaatagcacttgttgtgttccaacttggaaatgagcttgtgcttcaacccctaactcaattccagcttgttaaaacatctctagatccttccaaagactgattccaaacattagtgagactaacagagatctaacctatctagaatgtaattaacctatttacagggtgctattttttttaaacatccgtggcctttgttatcagcatttgtcttgtaactgcatttgctttcccaacacaataacatgtcatgcggcatgacactcaactgctacacttccacacttcatccatgtgctgtcctaactattaaacattcatagtttcatgaaactatgaatgctatgtatatagcattcatatacatacatatatattgttcttttgagacttgggtatgtatacttaatattcaatttcaaattatttaaggtcaaattaagaaaggcataaaatacatacttcttttttctcataggcagactctggatttaagtgtgtgtgtctctctctctgtgtgtgtgtgtgtgtgtgtgtgtgtgtgtgtgtgtgatgaaacaagaaagggagaggaagagaagatctgaaagaagagggaagagaccaatggaaagcatgtgacatgaaagtggaagaaaaagctatttaaggccaagagaggagcagatgtgggcagagaggccagagggaggcgaataagaacaaattgtaatgatgtctagtagagaaaacccatagtgaagcccactactttgtatactaactttaaaaataaaataaattagttcctagaaaataataatgtgtttattctaaatgcagcatcccttctcttaaataggagttcttaaaatcagatgcctaaaacaagccttgtaaattataataatgttaaacattaatattaataatataaaaccttgttattgaattctggctagaaactaccacctctaaaaactttgggtttgaggtcttctgtccctttgttagtaaagggagaagcaagatgggggggaggtgttcaaaacaaccagggtcagattgaaactttcttcttggtagattcgggatagaaagagggttaaaaatggaatcacgtctgtatttagtgagtctttgactgcaggtgttctaacccacattttgaaaaccgaggtgtcagaaactatgaggagtacacaagactgaatcaagctccactcgggagcatctaaatttaggtttcatgtaatacatcatttttccatccagcgatccttacaccccgtgtcatttttttttttttttgtattaataaaatgagaaacctggccattttactcagtggctttatgctgttaaaaaatattttacttttgctatcatttatcctttgtactctgattcgtttaacgctgtgttttaagctcataccaggagactagacatgaagaagtcatcgcgtaagtttatggtatttctttccccctgaacacctctccccttttaaatgatagtgaggtgaatatatgcatctttattttaaaatgtttaattaaagatatgcacagcttatgctcgagtctaggactgttcaaccctcccccaacacaaacacacatacacaaacacacaaacacacacaaaacacacacactctatcagacacatgcccaataaagattgaagtggcagtttcccaaatgcccacaagagggcgcgcttttctaaattcccaaggaaagagccccgaggtgggttctagcccgaggtttggaattggtgtatccttgcccactttcaatctagacaagtaccatgaactctcaaattctctctctctctctctctctctctctctctctctctctctctctctctctctctctctctctctctctctctctttctccctccctccctccctccctccctccctccctccctctctctctctctctttctccctccccccctccctccctctccctctctctctctctctctctctctctctctctctctctctctctctctctctctctctctctctctctctcccagcccacacttgccccttgcggtgacacctcatctaccaccactaagactgttttgctcacaaacccacatcaatttggtttctgtttccagtgtttgtccttttgacattttagcagaaatcacatccaagtttgatgttgagaagaaacaccgatttcttcagtgaacggatttgtcgtcccctttccccctgggaaagacgttccttcaagcagttacagcagttccccgagatagaatatggctttctaggatcaacaggaaggaggctctgggcaggagctgtgaagaacctagcaggtctcctctctttagcacattgtgttttgtgatacatccctttcctctaagatcaatgttatgtatgcatgctctccacatgtggtggagacattggatctcagtccagaaaacctgacccacaaagagggacaccagtgttaccaaattctctgcctggtggcctctggggatgccagagcccctttcctccaactctccacccagaccttctcttctcccctccccctccaccctgctctctcttggccctaaacaatccatccttctgctttcaattcagatgtgttctactatttactttttcttctttctccctgtcttctctttccctcctctgtaatattcgccacgcgcatgcgcacatacacgcaccactaacaatgttagcaactacattaaagacatattattaatatgcccaacagtacaacatgacctttgaaggtgacccctctctacggaacacagaggagctggggataaggctccagcagaaaggccagggaaccagggaatggctcgttttctgcgactctcagccaaccttcgctttctgaaaatgaacaagttcattttctttcttccttcctttcttttttaaaagaaaggtgtcagaagtcttctgaagctgtggctttatgcaaatacaccgctcaagtagaaggctcgaggggagagttatttataaccaacaggcattgcacacgcaaaaggtgaaactgtggatccaagtctccagagtggatgctctcacgatgagcacatctttgcagctagctatttttgtggcacacagttcccatatctgttagattccttttccagacaggcaactgtagaagcattctctaatttcagaatgaccatggatattcgtctccagtgggatttttcctggcctgagctctccctcagacccttcctgctgtacctcttgctttctctcctaaacaggcacagtgcccatagttcaaggtccccttcatctttacatttacacctggaatctacaaagaaaatggacatttccccaggaattattgacccctgcttcgttgctagctcaccctccctgctaataaagaccactccccagcttgaaattcatggcaatcacttcaggaaattgctccccacccccacacggaaaccgatagttcacctcagagtgtggccacagcacagctaatggcaattacggtgcactgaaattcagtttgctttgatcgggacatcgactgggacataagttaaaagtcaattatcctttaagggtgactggggtgataaacccaagtgattcgctgtgttggcactgatggggtgcagtatctcatgggatgacgtgttcagtcctcaaagcagcccttgagatgaagcaatggagggttcagtcacctgtgctgtgtactgcagagcatcacggctcagcacggcacagcataactatatggcaggacatgccagtacagtggcacagtataacgtggcacagcacaaagcattgcacagcacagcacagcgcccagaaagcacaatagtcagagtcacaaacatggagaaatgcagtaagcttctagaatgtaccaagacaaagtctgctacaattgcattggaaagaggtgattcaaagcactaacttacacgaaaggcgcccagaagtagatgagggtgcctagccgggacccagttctccagacttaaaaaccaaggacctggaaactctcaactgagaaagacttgaaaacaggaggtctttggtttcatacaatgttctcatcaaggtcctaaagaggaggggatgaactatttactgtttattctgtcccttgtccctctccctgtccctctccctccatctccctctgcctccttccccttcccccatctccctccatctctccttccccctccccctcccccccctctcacacacacacacacacacacacacacacacacacacaccatctccataagttgtcataaatcaagcactcaatgatagcctgttagtggaagccttgggttactgtatgtgcaagggattgcccacaactgcagatatggcaggaccacctgatgatgccacacttctgtgtgttctcagagtcagtcctacccacaggaacttcccagccccgtgcccttcacatagcattctctccttccccatctccatttccaaaaagctttcacttcctgcctccctgagagactgcggccccctcccaccactcataagtcttcacgcttcagatactcaacagacgtcaggaacgtgtgtctctccctgcctgttgcatgctcctttttgctttaccagaggtgtgtctaatcaagtacatagtaggtgctgtcatcacatgattccttcatcaagtgatacctagcatcacccaccactggaacagtctcacaccaggtttctaatgttcctgtctgaaaggtaaacactgctgtgaagtattgaccacacagagggttggaaagagcccaagccccttgcaaaaccaaactggtttcatttgaggacaatcaccacatccccaagcaggtttctatccatggggcagcgtaaagaggcagtgtagagtttccaactggcctctgtctccaccgatgtgtcagtaccttcaaatccccctgagagtccgagagagtaagagactgaggcaagtctggctcatttccatctcccctgggaaagcacacctggagagatatccgtggaaagcatgcagcgtctaatctgggcttttgtaaccttctttcataattcactttcttatctactgcctctgaaagaccactgagaaataggtacaaaccgtatcaacagaagatcagaactccattccctgtggcaaaggcgagtttatacattataaatagcagaagcagccggcttgaaccatgctgccagccacttacccagttgagggatttgaatgacatcataaccctggagagagtattgctagccagctggtattatttggaatacacactcagacacagacacagacagacacacacacttacacacacacacatatgcatgcatgcacacatacacacaactgtgtctcacacacacacacacacactcatttatagagaacaatacagccaacgggaaacagtgtgtgcctcccatactgcttccttggggtcaaggaggtgacaggcatccagctttgttgaaaactaggatcattttatttttcaatccatcccagatctcagcatagcctgattctctgcacaaagcatgacacagtgtcctgacaggagccagcccactgctgcctggccatctataggttttaggaaatgagatcattccccttgcctggcaactaggacaagggtcactctatcccctccacctccccttcccctgagagctgcctttcgatctagtttaccctggtcatttcagggttaacagcattgtgcttcctggagatagtctcttcttcctttttttgttttttttttccttcaaattttgcatttgccctaaaatataaagttgcccccgtgtcccacttagatcctctaatcctggtgaggtgtattagcacacaagtgtaccttcaaaccctgtggaaagttaatcagagaacagagcctatttttctatggcagcctcagtatttaatgtctgctaaccctgtcagagacacacattcttttagggggggggggggtgagtctctgtgctccagtttttaagagcgaaggtatgatgttatttgtcacggtgcccaaaaaagtccttactcgataactttgccagaagagggagagagagagaaggcgaatgttcccccagctgtttcctgtctacagtgtctgtgttttgtagataaatgtgaggattttctctaaatccctcttctgcttgctaaatctcactgtcactgctaaattcagagcagatagagcctgcgcaatggaataaagtcctcaaaattgaaatgtgacattgctctaacatctcccatctctctggatttctttttcgcctcattatccctgcccaccaattcatttccagactttgtacttcagaagcgatggggaaaatcagcagccttccaactcaattatttaagatctgcctctgtgacttcttgaaggtaaatatctcttactttttttttttttaactcgttggagaattgtatttaaactgtgtactgttttcttctgcctagagtctttatttgctttagaatttgcattgtttcagaactgggggttatttacaaattgctgaatgtgcagttctgtgcgagctgtaaaaggagctccgggggatgaatgcatttgcagaggtatctgtacgggtagaaactattgcaaggtacttctgctaaagcctccgcttccacagggcttccacactgccgttttaagagactcctttaaatctagcctatggctcggggcgagaaagatgactataaactcgggagtgcttctctctcacaggtgcaggcgttggctttttcagagcatgttcttgtgtctgtgtctatgtatgtgtgtgatttgtcaggactttatttacgaggcatgtcacagattaaaagttacattttagatgataggaaggcttttaaaaaatgcttttttctttctttttttttggagccaagaatcgggaattctttgcacttctgcccagaaagtcaaagttaggggaagtttaatttgcttttctgtaaaagctcttagacaacttgctgtctttgcatattcagaaattttaaacagatacaggctgtgctcagaaagcaggagcttactggcggctgcttgtccaacttttctctttggaaggggactttcgtgactgagctggggtttgaattttggtttaaggctctgctcttagactcaccgcgcggcgcggcaaggcaaagcctctttaggtgaatcggctgctgcttgcccctgctgctgctgtgctgcctctgtcacttgcctctggctctgtcgctcgcccctgccgctgctgctgctgctgctgctgctgctgctgctgctgctgctgccgtttgcccctgccgctgtctatgttctgccttctccttttgatcactggccctacttcaagtttccattctcagcaaaattatatccttccagacttgtgttttttcaatttgcaagcacttctaagccgctgtcaccggctccttggaggcagttgccggagggcttaattcataaaagatcccagtcaaagagtgcagcgggtttttttttgtgctgcattcaaatgcttcatcgctatgagtttttcttaggcaagtaagtggcttgggacttcgggagacaaccttgtcaagcacctaattgtgccgtcctcgcgctgccagcaagcttcagccaccttacaggagtgaagtcagcgttcatatacgctgtgtggtctggcagctgggattgtgtgtcccaaagggattgtggaatgttacctcggcaggcatgcattccacgtttggaaaatcggctccaaatgaactttctttccctgctgggtctgcagaacatttcagaagcggagctagcaatacccttcaacttttttcctgtgcttgcagcaggagatggctgaagggagctactgcatgcgtggtggtctttgaaacatagctcagggaagagaggtcagctgcctagagcgattggtacacacagggcgcctgctggctttgtactctgaggctcaaggtatttcccagtgcctgagccaggggacgatgggggaggaagggaaggagctggaacttgaatcactattctggatagccgagatagatagccatacaatggaaatgagtggcttcccttgggggaaaaagacggactccaactcccagctgtgcaatttactcattgtttaaatggacaaaaggcagtttacccaggctcagagcatacctgcctgggtgtccaaatgtaactagatgctttcacaaaccccacccacaaaacaacacctgttcttaagtcctcagttttgtgttcacctcggcctcatagtacccactctgacctgctgtgtaaacgacccggacctaccaaaatgaccgcacctgcagtgagtacctacttacaactattgcccttgtattttgaccagccatttttgttgttgttcggacacctggaatcaattgatatctcacttgtttaacacagaaaggtccttggagatgtggatttatcagtgatctttgaggaaagtgttctgagttcaggattgactttttttggctgtctcttgctcaggcccttcctcgccctcttcttattacatctatggcttctctctactggttttccttgtggttgacgaaataagggccaggggaaatggagaacatatggggagacttgttttggacttttttaaaactcctaagcaagtcctatattgttttctgtttggggaccatggtgtgataaactctgactctctgtgggtatgctggactagtctctgagctaaaggaaaatgtacagaggtctagtattgatatttatcagacagtggttttcagtataagtccatgcagaaaggaaaaaggaaaattggtttgagcagttttcagtttttcaattctacaggtacatatgtcttgctggacttaaatgcactatcccttaaaataactattaaaatgcagtttgggacagctcgtgacagtctaaatttacaaaggctgtgagattgagtaacagttgctgtggagttggttcaaactaaccattgcaggtgcctgctggccttcaccgctctctgaaactgagcaggggtagggggcagtgcttcagaaatgggtttgctggagtaactaacattcattctaaagttggtctgttgccagagtgtagggaagtgttctctaagaacagtcatggggattacaggcctgccctttcacaaagaaccatgaagccctgatgggttagatttattcaagtttccatgaaaaatactgaaggggaagctccgctgtcttctttttataactaagaggaatcaatagacattagctcatttctgtaaactctgatgtctttggttgtatggcgatggagtacttccagactgaaatcctactgagcaaaggtaccaagggcttaactggggaggtacctcctccttaattgcatgtcctctgtttcccgttgacttgagagtggagagttcctttcatctccagccactctatacacactactgaaatatttaccttgtgagatcaagaatcagggcctcctaggggtcccttgcccccctcctaatgctaggctgaagaacgagccactaaattgaaaatgagtttaaaatagttgagtaaaatttgccactgatatagagccattaagtagagagctcactcacacaggacagggaaatggccataaactcaatatctctgagtctcactctccaaacaagtggggattgaatgaatttgcctcaactgtgagattcaaaaaaaaaaaaaaaagaaaaaagaaaagaaaagaaaaaagaaaaagaaaacctcctttaaaaattatagcttccagtatatctccgttaccccttttatagggtggctcacctcatactctactggtgactctttccacaatattgaaagcatatgtctctgaaaggggtgaagtcgctcaccttaggggccttcctggaagaaagtacacgctggttccacaagcagcaaccctgaaaagtgggacgtcaccacagtgtctgactgcttcttagaatgaagagcgactggagtcccaggaatgctgactttggcaggggtgccatttggctactaaccatcggctagcttgtgccaaacaagggttccttggtagattttgttataaagttgataacagggatccgtgagtgcttcccagagaataagtcagagtggctgctgctcaagaaaaggctcttgcaggttttaagcccagtgtcctgcatttaaaaaacgtctctcagtctgatagtgagctagaagagaggaccctggcgtaaaagattacatttacgtcctgttgaagtttgggagatgattgttaaactccctgacctgctgccagcctcccttttcctgcttgtcactctcccctaaggcaggaagagaaatgagaaaccctcttccccaaggcagccataaaacttgaacatttgcttctgacctcccatgacttccagtagaggagctggccagagagaagtctgctgcctgccctgtctgatggcaggccactggcccctccccccagaggggtcctaaatcttatacccaggatttatgaatgcttcacaaaggggcatagaagaatcaggagaagcaagacacactgggttttccacctcagtctaccggtcattaaatgataattctgcccactgtccacgcccccattgaacaacaacatatgggaaagtttacccctgttatggaggcttctttttttcttttttttttcctgaaggctctcacctcacataaacctttaattaaataaagacatcatgactttcatcagcctgcactatgttatggaggtacagactatgaccttcatggtgtgtaaggagagggaatcacaccttcctttcacaatgcttttgtgagacaattgcattcctaaatcttgcatgattttcctgttttgagactgcttgtttggttttccacctgtggttgtgttagctgctaatattcgcaggtaagatttctccgcctcgtcccccacctctgctctccctgcctcccttcctttctctctctctctctctctggaaggctataataatagatttttttaatactgttctggccagtataaaatcttcttaatctatggacagagaatgatgccctggttaatttaatattcaaagcaataataaatataatgaatatatgtaccatctggaaatggtcaggttttagattatttaagttgaaacagtttgaatgtaaagctgagcacaatttaatatttgataatttagatgttttatatcagactggcatggggatcccaccccacacacacacataaacacatcccaccacaagcacacacatatacgcgcacacactaaaataactgcatcttttgtcacccaataaatgtttgtagcccttttaccctacttattaataataggaactcataaaagctccaggagaacctctgaagacccagtagcaaagggactaaccacagtttgtctgatgtcaagatgggctcaggccaggtccctcgggggcccttcatgccacactgctcttctaggacagagcgtttgaatgaatgatgagaaggagtaccaagtgcgagtcaacacatcgctgccccatcctttcaggacccagaaggatacctgaacctcctttttattttccccctccgacagataaagatacacatcatgtcgtcttcacacctcttctacctggcgctctgcttgctcaccttcaccagctccaccacagctggaccagagaccctttgcggggctgagctggtggatgctcttcagttcgtgtgtggaccgaggggcttttacttcagtgagtagctctcccatcccctctcccaaccctcttctccctgctacaatgattcagaagtagatggtttcctggatttataaccacagggattggtcgaataactgagtgactgcctatggctaacagccaccctccaccccccaacccccatatccatcaccttaatgtatgcataacacttcagtggggcattggcaggtttgggagatttagggtcgaattttcttccttaagagtttgcctttaactgcttcctctggggcccgcttccagaatttatggtcaacccccactctcctgttcctcccaatgaagaaatgagacagcataaccctaaagtattgcagattttgttcttagacatttgggcacatatagaaacatccagagggcgtacaggactactgtgggtgttctgaaatttaaagcaaaatggtaaggatcttgcaccccgaactcatgtgaacttaagaaatgaattaaatggagaacaaagtagatgtctccatgcaacacaaagccagcatgagtggacaaaaggtgatcattgccaagagatgtttgtaagtacataagctttctaactgtgaactatggcgtcattatcaatatgccctctatgcagactgactttaatactttcttttcttccttttgtcattatgtccctttgatgtagtccttccctgggtattatatccatctagaaaggagtctttgaaaacttcagcaccacatatcttttaaaagtaggtctcagacaatcagagagtcagcagtccatgggaaggagacagaggaatcaatgtctgtaaataagtcaatggccaccaaggggagtgatcacttgaaaaaaaaaatctacctcataggtatccatctcacagaatattacaatgcagtgaaaaactgaaagacagatgtgaactctgtacatttctttggaagtgcaaagagttcttggaacctgggcgtgagtcatttgccagggctcctgtcactcaagtggagacaaatcacctcagtgaacccccacacccacccccaagctcaggctcctgagatgattcacactcttgaagtctcgcttgtcttcttgccaaatgccagcctctcttgaggcaggtgatagtggctgtggcttgtgtggtattgtgtgtgtgtgtgtgtgtgcgtgtgcgtgtgcgtgtgcgtgtgcgtgtgcgtgtgcgtgtgtgtgtgtgtgtgtgtgtaagaaggaggcaaaagtttattcatataagtttgaaactacgaaaggaactaccaaggagactggtaatgtgtatttaccatggttttggcaaaataaaataaaaaagacaacttggcagaatagcgtcagagacggacatgctttcggctgtttgaatgggaaattttccactttgtgctccctgccagtcctttatttgaataaattcacttactcttctggcaatagaacagttccatccagttctctggtgtaggagaaatgaatgagttcattaggtgggtgactttttttttaataccagacttgtttcacctttaagaacatactatatcaagtgaaatgagacatgaacacaactgcacaacgaattgagagcattctataactcgctgtaatcgagccatgttttctctttggaagacataagtcattcttatctccagttcccaaggactttgtctcctcttggcagggcacttgtgtaagggccttctgggtagtggcaggttgaactgtaacacccaccctgatgtactccaggaattccatgcacgggacatgagtatgcttgtgctgtttacatcagataacgaaaactgagacgagaaataacaactcagctgtagataactgggcaatacttacatgtgtttgcacagacacttgagcgttgagcactgacaacggaaaccagttttaatgggctggaaaggtttttgcatttgatcaccaggaggatcaaatttcaatacgtgtgtttaagttgtgttttaataacttaaagggaaaagaattcatacggtcacttgatacttttagcagggttctggatttcaaaacagtggctgtatgaaacacgtgctgttgtgaattctgccattaagagtgtttttttttaaatcacatcccaccatatacatgacttaaactaaatcccaagccctgtttggttccttaaatgtgaaggtattcttgatagctttctgatcaactccacaatcctctctacacgagaagagccgatccttttaaattgctttagtttacttcaaaacactgggggcagggaggggaagcattttgtgtgtgtgtgtgtgtgtgtgtgtggtagcacaagatataaatgagaaaccgggagatgactgagagactgaccttgcctttgaagtactcagaggttagaaaaagagtgtatatcatatgctgtaagggaaaacaaccttgggaaaagaagtgcaattctttaagctctccctgaatcttccccatcactcatgacatgtctttgccaggctctgccctctaggtgaactcctcaaaggctgtagctatttatctttgaagatcagtgtcaagttcaatgtttgagtgatacagtagctgctggtatctatccattggaactggcaagattgaatccaagtaaactgaatagaactgtttttgtggggctctcccaggaagaaccaccaaggattaggatcgccaaacactttacaacatacttctcgcctccctcgtgcctacctagttatttgatgaaactgcttagctttctttgcagaatgcagtgtaggtatatcaccaggaacttagaagctgtcctttggccatctctaagctacactcatggtctgtttccttccagagccaattattcttacaggcattaactgttgtcaacaaattttattgagtttccttttcatcccctaagatttactgtgtgggggaaagtcagcactaagcatttacagtcctcgaagcaccttttaaaggagagtaccctttgcatgtctgtacccgcagttgacatttactagattttgctcttatttacaaagttttattgagcccatacctttttattttaagctggttcaacttcaatttggaagtatatatttctctccatggtggaaggcagggtctgatcttggattgatatttaaacatcataaagaaatttgcctctatatttatttatttatttatggataatacaaactatttaacaaagaggggttctaaaatcctattaaaactgttctgagtatgttttttttttgtttgtttgctttgtttgtttgttttgctaatacttgctttgtgtaggttgacccaattttgcaaatgagctcacaatcccagtctatcctaagttctgtggaagcagacacaacctccaggatgatcagttgtgagtctccctccagcataagtagagcagttgatccaaaattaatgtggcttccccagacattttacaaaatgaaggagccaatgacgagctaattatgggttcttccccatgtaccatagagagagggcatgtcaatcagatggatgctcttttggttctgtgaggagggcagcgccattgtggagatgaaagcttactagcagagattagctggtttgctggaacccacacagaggacagacgtcccgttataactttgttttgtctgaagcacaccagtgggtaaaacaaagtgaaagaagtgacgcttgccgcaggtataattttggacagttatggcaagaaaccatttttaacatgctctttgggaacttctggagtttttctcctttgaggtagttaagaagttgacagacaaccaaccatcttgaatggtttcaattaagaacgaccagaagaaagagaggttctggggtccttttcagttttaagagtctataaacagtcccttaaataaactgtatgtgctttacctcaggcagtctggggaaagcgagaagtaaatcaattaaaaaagaaagttggataccctttcagctaccccagattcatggcttttgtaaaacatccctccaatgcatgcttattaggaacagatctgaataaaccgatgacattcttcatgtgttaaagcatactgtttttaaagggtttaagtgaaactttgcaattagctttcgttattattgattgcacaaaccttccgaggctttggttattattataaactcggacttcttcctttgatatgcagagctcagaaaactacctccagacctgtcaatcattatttataggactttggcaggcatttaaacttcctgagctgaaatgcccttgtctataaaacaaggggattttgttaaagcaaatgacctttaactttaacagacttgacatctaggttgcaagcaacaagcattcatgctattggagaagggagaaccctggacttaactagtgcctgaggaccatttaacttcttttatcttcttgacatcatttcagttggtccccaaaggtagccaatccgctcacttcaagaaataagagccagctgctttgctttatttcagtttgaacttcagtcctccaaggacagaacagaaattcagacctgaccacaaagtccgaggtcataaacctaagcttgtcatttctctttgttatcaaagatgattggatgatactcatctttcaaacactttcacactgctttgacatgggtggtggtggtggtggggcaatgagtaaatttgttcattatctcagaagagaattttatgaatccacctcaatcctttgggcatcctattagatacagcctgtctagtgaaagaagaacaacacagtttaaaaaggcacccatccacccaccactcacttagggctagtgtggactttgagctccatccatctgcatttccttgcacagcacccctatgggaattccaggcatgcatttgtgtgagttctggtacaagttaggggcatggtccctgcctatggaaaaacaattctctttgaaattgatacatctggaattgaccttataaccttgccctcattagcacacagagctaataggccacagatattgtttgtttaaaaggacactgggcttttatcttgaccctccaatgctcgctactaccttttaaaatatacccaaggggacttgtgtgagggactaagaaaaatggaagtttctgtgtgaaattagaaaaaaactttcaagtttatgacatgttaatattcattatgactgtcttctcctggatcaatgacctataaacaggagaatgacaggttcaagaccaagactgtggcctcttttgaaaagaatccagagttgagccttagctctgcaaacttactcagtgggagaccttgaaactatgcggtgcctcaatttcttcatctgtaaaatgggacctgccttacggtgttgatattggggttgaatgaacagagagttttgaacatgttagtttagagtggtgcctggcacatcacaccatcctaattagctagcccatctatttactctcatctgagcctcagttgcagaatctgccataaaaggttcaatatctgaaaagtccacttagttattgactcactattttttctgcttggggcagaaacaattcattgttgagacaatcaatagtagtaacaattgtgtgcatagcatcagtataaatgatgagaagggtgatctgcttgtctccctgctctgtctttatcaccactttgacagatagagatggtttactgtattagacgaacaagaaatgtaaaggcatgggctgggaagatgctcagcaggtcacacttgtcccacaaatgtgaagatgtaaagccagatgcggtggtggtgcaagtctgcaattgtagtgctccaataaagagacgtgggaggtattcataggagaaccttagaggcttgcaatccagctagtctgacatacacagtgatgagagaccctgcctcatacaaggtgggagttaggaacttacatccatggatggcatccccacgtatgtgatggcattcaggcttgcactcagatacagaacagatacaccacatacatgctcatgtacacacaaagtgagatgagaggtgcggagattttgaaacttgatgggtcaaaaagccaagtccacagtttcttgtctccatgaaatactctcattttgtcacttgtattattcagaagtccacagttttgtagcctagggaaatgctccctaaaccctagtcaacccctgaaaaaatatagagcaagacccctggtatgaagcagttggttttcaacattctcttgaaatgaggcccttagggggtggggagaggtatatctatgtaatgaacttgcatttttacctctgagaccattgagaaaatactaagaaaatttcaacagagtaaagaagaaaagtttcctttgatgagagatagctgctgtacaagacattgcctaggactcccccagtcactacacacaccctttcctgtgagatccaagatgccctctgttctggggatcctcacccatcattcacaggtttcatattcttcttcctctaccagaaaacctcaaaggtttagcttcttgcagcatttagtttggaaggcttgcttcttctcaaagaattgccgggaggctatttagttggaacacatgcttctaggggggtaccaggaaagtgttgccaaaggtgataaaggaccagatgggagcccgatcaaagtgggagtggccggtgggttgtaacacaagatttccatctgtgcgatgtgtatttcaaccatgggatgagaagaccttacatcatcaattgcaggtagacatttaagaccccaaagggaaattgagtgtcacatagcttgactgttcttccaaataccttgtccagatacaatgtgccatgccagcatcgcttaggtactccgtcagaaccagtcccatctctgtgggcttctaaacaatacaagtgagcaaatgagtgtacttcatggagacaagaagctgtgggcttggcttttggacccataaagttccagaagccttcctttttatttcaaaacccacagcccagatccagacacactgagaataggcacaaggtctctcccaaggagattccccattgtcctcacttacagaccacagaggctttgatccttcctctagctagatgtccttgacaaccacggtggcaaattaccctgtttgctctgggctgtttgtctggcatagttcccacccagcacctttccacaaaacttcataagctcttctatcccaaagaattattttggttgcctggaaagttcaaacctcccatgaactgtcagactggggagacgacatctcggaggaggagttgtgtttgtctttatctatatgtgagatcgtgtttcaaacacagcaaagagctgttagttgacatgcaattccctaactgtagcaagttgtatgcctatttaatgcattgtttagtctcacattggctagagccatttaaagaagcacttggcaagctctaggtttgcattcttggcataactgccccttttagttttccactgaaccctggataccaagaaaaacccttcacttgctttacgtctggtgtactgcttgatgcaattcaccagaccctctgcgagtggtcccctctgtattcgtccgaaggtaattaatggctttgcaatatttgatctgcagaagcagggacacaaagggaaattgtgcaacccagaagagaccacacagccttttaaaattaaaaccttttgctttaaatgttcttcaggcattctgcaggagtagaaatttccatttcaagagaaaaaataaagtcatgctgaaatgcccaggaagatacttaagaacctgataattggtcagatgtacacacctctatctcccttttaaagctacctgattgttaaaaggaaggaacatcgagtgctcctacaagcttagaaacttttggaaaataatcttcccaacactaaaacagaaacctagagagaagttatgtgttcaaggtcacatagctaattagtggcagtaggagacgtgtggattctgttctctaatcccagtgcagcctgcctctgcttagcatgattaatcatgcctgtgtgaaattacctggtaacttcaaatgagtgggaacaggggaagggggggctcaagtcaagttcctgcaaacgagcagagcagtcccccagggaaccgtgcattctaataagcgcacctgagagttgacaatttgctcccttgtggcagaaattaaagtcatctgcctgcctgtagatatggaatacaatgccttcagatgtgctttgggcattgaaatctacttatggtataatttagactaatattgtatattatgttcttctggtcctctgactactctctccaaactcaacttcagtagaactcctttggaatgacaaagctgtgtgttcctggaaactctgaaacagtctcttgaattggaagatctgccgccccccccccccccgagagatttctctgtctcatgccaaaaaaaaaaaaatttatacctgatatttttttcagactcttaagcagatactctgtgaatctctagtggtttccttctttgtgccttttatggggtagacaagaaaggctgtctgaggagaagtgtggttaagctaaagtttggttacacttcgtaagaactgtcaggcaatcctgtgtttctgggaagatagcactacctctgtgccatttaccctggtgaaatggctctttcatcagaaacaagcaatttagaaagactgttgggagccaagcccatggagccaacttctgattatccaatgaaactgggggaaaggagcatgagcgttagaactgtggattaaactcatgtgtggactccgcagaatgtttctctcattcttcctccatgcccatttatgaaaccaggtaacatgttctgaaatcatattcattcttagacagcccctccttttcctgacagtgctactagcaataggggtttcagctgcaggaatattgatgtctggggtctggtaaattctactgaaaggagattcctgtccagtataggttcagagcagtatgtttggctcctgccaatgccaggagtcccatcctcccattgtaataaacacagatattgcctaatatattttggggtgctaaatcaccccctccaattcagaactactggactaggaaagtgtctagaagagaaataactaacaaagtggaacaaaatcaggcataaaattaaagataacacaccacctaggaagccttcctaaatgaagggattatggtctcaggccttggtcgctgattccaggagttgataacccattgcctgggtcaagcaatgagaagagtcaatggagctagaaaaacttttctatggaaatacacagctctttctagaagctatgtgaaaaagcttcagcaggctttcctttctgccttgcagctatagaacccactcacctgcttttggtaagagcggttaggacaaaaagaaatggtctactacaaatctgtaggccttagaagtgagcttgagatcacctgaagccagtataaatgacactggctgctggcacctttgtgcctatgcctgttcctttcttagacccataataaataaactctctatccttcactagtaaaaggcatagttcaaagcaaatgaccttccccccaccttattatgcttttcctatctgagcatcatcagactcactgtctagaaagtcagcagtcgcaagttgagtttgacccatatcacaaacagctctgtggtcctggggaggtcactctgatcatgagcctcacactcctcatcataaactgggaataaaaagattatagctcagaaatcttctgagactcagccatagtagggcttctgaaactcaaagagccatccacagacacatccctattaacacattgaaggagacactttaccttgtgtccttactcaggactgactatttagttcagtcattcaacctccacaacattttctgtaataattacaatctagaaaagttagctcagccacgtattctccttgaccttcttcattaaaagtaacggcacactgagatcttcttctcacctatctccttgtctttagattgaccaaggactacttactgcttagctttagtgtcagtttttcattttctctttctggaagaagcaagaatgagacaaagcctatcatgttaccacactgaggctgctgagagagtttattctctcggaggtagtcaggtagtcactgaagcagcatgcgtaggcaaaagatctgtttccaccagtcagctattagtgagttctgcttcgcctcaaagcatagtgttcagcggaggggttttatttctagtctgaaaagtaattttctctctcaagttgctcattgaaaggatgtttttgtttcatgattgtctgacttagatgatgatttacaaagcagctttttgcttacgcctgactttaatggaatcaaaagtatgagttgtatcaccctatggaccaggagcaaggtggtttttctctctcagaggatttccatgcaaccatctctcgagatacagatctgatgtagaaaatatacatccagggcacacagtgatgtattagctactgttgctgtggatttccatcctattttatagcttgttgggaaaaacagagactaaatatccatagatttctttttcctgatcaccacagttgccggcatgagacgcttaataaatccctgatttgatattgaaaacctcactccaaaatcgagtttattctgcccattcccagaataagccccttgactttctgttggctacactgtcattgtgtgttgagactgaagagatgggagaattcagtcttccggtctacttgaactatcagctctaaggttttcctcaccactgaacagtcagctcaagactaaggcaacagagacttttcgaagccttccagactctcatttatatgtcctcccaagtttgaaaaccctacctcatactccattcttctctcttgtgtttcttgattcatttacaagaagccattgtagaccagggaagtgaaaccctggcatataatcagaaagacagcacagccggagggcctttgctcagtaaacaccacaataaggttctatttgccaaccagaactaaagaattgaagagctatggagaaccatacacagccatcagatccagagaaccaagaatgagagaaaacctggtgtgcaccaggccctaaagtagactattggggaaagcaaactgctcatccacatccagtcctaagaaactcctgaacgagcaggcacattaagtggaaccttaaaaactcaagtaaaatagtcctggtgactacagtctaagtccccaccatgaattactaggtcacattttctggttagtgaaagagaacagtcatgaaaactccaagtgttcaatcattctgaaaacacttctttcgatttctatgaaccaacctcattgggtttcctttcttctctatcagtgtgactttattatactaaattagcttcctaaaacttagaagtttgatacattggaggcttcaaagagaaagagcaaaggtgaaaagggaattttcctgagtcagtttaatgttagctgcttggctaattaacacactttctttcgctagctgatataagctacccaaagcaaaaggtgtatattccagtcttccatgaagaagcttaaattttcctatgtattttgagttttctatttctttccattcaagtctccagttgttcataggcttatttagtttggcagaaggtgatggtgattcacgaaatgaaaaaatttgaaggcaaagctactgaaaatggatctaatttcttagagtaatttgggagcgagaaattgataatttgtctcctttttttctggtttcatcagctgccatgctgccaaatacttgcactgtatggatgtttggttattcctgaaacgcataacaaatcttagctgcaactctatctaatatggctgaagaataaaactatagttggctctcgggctcattgttcttggctgggcagcctcgatcaatggctattgagtgaaaacacaagatcagatggaaaccatttccagcttgttccctcctatggctccagccattttactgtgttcgtcaagcacagcaagtgttcccaacaagtatggctatattttcagcacagatgcaaatgatagtgagttccactctctcagcttgggtgttgagagagtattttttacgtttgggattacttctttcctgctggctcttacctcccagggtggaacagttatttggaggcaatgtcttagatgctcaatgatgtagtcacatagtaggcttcccttaagttagattttttttttgaggatcctaaagttgtaggaatgtaagactttgaaaagtgttcatgccctaagtctggttggcattcttagacttatcataataatgcttttacatgagactgtgggattttatcttaatacataagctactgattgaccagtaactatgcagaagtgatgtataagctaaagacaaagagggacttacttctagctagttcagaagctctcacttgctcctggaaaccttacagtcgctagataggtgatgggtttcaagataaataactttgacctcactcttaccaccacattaaaaaacaacaacaacaacaaaaaaaaaaaactagcaatactaaaaaatagagaaatctatcccttcagggatgtgattgataaatataaaaagtgttttatatccagaaacaacctattgttcacattgggtcaagtgtgtttgactagcaaatgctcttaaagatgcatgttaatgtcgcgtggtgtatgaaggtagatctgaaggcaggctgctcaaaacaccctaggagcttattggagaggcaggatcaggggctcctagcaccctcaaataatctcaaatttgcatgttaactagatcccttgggggattgcatgggcactggggtcggagaaaacttgttttagaaaataatgtgtggcattcattccagaagaaagaataaaaagtaggcactgctcagcttctactgaagccgaacgataatgctgaggtcaagcctgcttatagtttcttccaatgtagaaggcgaggcagtagcctctattttctcaagttagtggtttctctacagaggaaatacagagatgctctaaggataaccctgtggcctgattttctgtgaactagaaattggaattcccaattgctgtagctgcaattttcaaacctgtcaccagggccaggaactgagctccaagaccttaagatcttgccagtttctttctcaagagttacagttttcagaaataacccagcaacagtgctgtgtgtatatgtgcgtgcatgtacgcatatgtgtctacgtatatacgtgcatttgtacacatatatgtctgcttatgtgtgtatattatataaaagtgcattaagcaagaaaatgtgtttcattcctatcactttgcctccatctttatgccagccagattctcagatttctattagtctctgctgactgtttccctcatggctcctgttttggtttaatagaaatgattgggtatgataagaatatatttctaccacccatcagaaggcaaaggataaactttgaaactgtgtctcaaagtaatatccaagtttccccagggccattctagaatatgacaaatcccctgcttgagcataataatacaggaccaggcacacacacacacacacacacacacacacacacacactcacacacacaagacagcctcctggggatttggtcctatagcagagcagataaagatgaaagcaagccagcttgaacttctgtcccttaaatgaggctagaaagaaacaagagtggttttaaatcagatagttagaagatcttggaactactcagaactaaataaatctagtgaatgtaataatcaaatttgccactggaacaatgctattaagattaactaaggtgttctaccttggaaataggtaatggtgatctcttttctctgtttttcaggggaaaagaatagacaatacaacttccacgttttcttatatgcacttttcttaagctctttgaaacttcttaaagatacttggtctagaatcttggtgttgttcttagaccaaattgttacatttgatctgtttagaaccaggtgacaactatttgcatacaatcacatcactgactcaatattgacaaaataatatctacagccttatctggaacaagcagttcacaatgaatctgaatctccttagtcctgcttttaaagggtccagttagatacggagtcaagtatattgtttgtcttcacggttgctagcactcttctctcattaacctttacctggctctttgataaaaacacatagaagttaaatcacagcaaccaccagtttcactgtagactcagccactgagtatctgctttgtggtgaacggagtccatgggaaaatgaagcctgccttgacagaagatttactcttgtgccacaaggactccttaaatatcaatcttacaacccaaatcataagggtatatttcctgcattctctgattccgtctcttgatttcaccatttacagaatgtgctctgcttggccctggcctgataacaagaggttaaaaagtaagcacaaccactacactcatggagttggtgagcagatctcacaagattccagtcgccactcaaaacccatccaactgtaacccacatacatgaattgttatatgtgtgtgtgtgtgtgtgtgtgtgtgtgtttataaacatcaaaatatcctaaatgaaagcaaaaggtaacacagtctcttggaaaataggctggcatactatggcgggatctgctttgaagcccaagtggcatcccttgtctgcagctttcagaatatgcactgtgagcccagcacacaccatagtgaccttgaagggttgcttcattcatttatatagtcatctgctgttagcaccagcccacactgtttctgctgaagatatgcacaatccctttggatgcaaaatatccacttttctctcattcaatccatcatgcatttattggctctgtaagatcacccactcactcggctaacttccgctgactcataggaataccacacagactttatcttttgcacaacttcatagctctccccagacataccaaaggtacacgtcatcaagaatttgtaagctatcaggctctctttattgaaagaagaacccaagtctgaaatcccaaacatttaataaacttagagatcatcaaagggatgctccttcaacagcaagtgaagaatttggctacaggccttgtcaagcagaaaaggccaggtttgtagccaacttaatgaatcatttatgcaatcatccagtatgtttaagacagtgtggaccatcaaactcaacttttttagacaaagcaagctgtagcattatagtttgttttgcaccaagatcgagaacagctgttaccaattcactggaagattccacatgtgtccctccatccagtcccatcaccattctgagcctcctcatcactcagcaaaactattgcaacagcttcctcgatactcgctctgtgtccaatcttgcctgactccagccatcccacccaggagattcatctttataaacacagttctaatcgctttattcctttcctaaacaactttccagtgaccatgcatggctaaataaattgagcccaaattctctaatttgacagcaaggcatgttaaaagagggccactgccagactttgtccagttgcatttcttaatgtttccctacagcagaacccacaaaccaacagcctgtatcttgtatctagtcttcataagtatttttcttggaaaagactgtgttggttttttttaatctgaattatctgccaatatcttatttatttatttatttatttacaacccaaatgttgcctcccccgaacccccactgatttcccctcaaagaattcctctcctcatcccatctccccttagcctctaagacctgggataggtctaagagggtagctccccctgcttaccaccccacactggtgcatgaagtctctacaggattaggcacatcttctcccactgagtccaaacaaggcagcactctgctacatatgtgccaggggccttgaaccagcccatgtatgctctttggttggtggctcagtccctgagagctcccaggggtccaagttagttgacactgttggtcttcctgtaggattgtcattttttgagggccttcaatctttccccctaactcttccacaggggtccccgacctccatccaaagtttgtctgtgggtatctgcatctgtctcagttggctgatgggtagcgcctctcagagggctactatactaggcccctgtcttcaagtgtaacatagcatcattgatagtgtgatgaattgttacctgttcctgaaataggtcttaaaatgggctagtcagccattccttcagtctctgctccatctttgtccttgcattgcttttagacaggaccaatttttggccaatattcattgaaggacaactctcttcatcttgatacgtcttttcctttctgcctcacctaaacttccattgttctcaactatcttactctggcccatttcacctcttaatatgacttgcttcagtccaaaagtccctgaatcagttggcttattgggtctacaaatgtccgcaacatcttccaacatccaacctacatgatttattaccaggttttgttcatgggtttgttctctcagatgtaactgactttgtaaagtcttctagcagatgtcaactttcttctgaaacaagaaagcattaatattactctagatgcttttataatgtgttctatttcatgttgttgggtttggaggttttggagggtgggggttgttttgttttgttttggtgagtgttcctgctttctactatctgcttagaaataagcttgtcaaaggtaagagcgggccacatttaattaatttctgtaagatttccctagctccctgtacacagtatgctaatgttgcatggaattcattacgttgcccatttttctttggaccccacaggctgagagtagttgtgcattcccatgggaatgcagtaactcatttcaaatgcagtcatggctgggttggatgctccctctggacttttaggcattttcaaggagaaagtgaggagtgatgtatcaaaagaaaactgcagagggaatttaggtaaatagaacatgaacctttctgttggaagcttgctatgatctccagattaaaacactatggcatgtctcacaaggagcaactcgtttagaaatataggagccggtctatctccagggccccaactgaaagctgagcattggcccaatgctaggtaaaccacaaatatcacaagaaaaatgaaacactaaagttctgtctcctagatccaaaaatacctatttctacagttttggagtgcctataaaacagattctcatccctgaggacctggaaagatgggttattcaccatcaagattatagagtcaattttatgttacagaaatggattcaacataatgatttttgatttgaatggtcaactgtaaaatgctatagaaaaagcagaaagtccctattgtaaatgtaattaaagtctgagatatttcatgaactactatttatttactatagagttagtgtcaacaagaaagctgaatgaataaagccaaagactgtacagtactgttgatgggcacctatcatactatcaaaagtatgttgtaaggtctgtcaatcacgttttaaaaactgatccttacctgtttattagtaagttccaaaacctgctatttaaaatgatacattaaaatattattcctttctctccatttgccttcagaccatattcctgaatttccaaatcaataccaagaattttaattttactctctttatacatgatcatgtaagagtgcccactgatgtttaaatggacgatgggttgtattacttctgagcactctctgctgagatgcctggtgaggtagaggtttgaatgtgtttcctatcctgacagaggccagagagagtatgaggacaagctgatctaagttagaattgttggaaagatcacctaggaatccttcttcttgtgagcttgttagaccagcctttccaacataaaattaatactttccaaatcctacctagagttgtaagatccatcagcctcacccccggctgatctccatcccacaatacagatagggtctgacagagagcaccgtgggcattgataatttctcaaagcataagaatatttttcctgaattaagcagagatcctgctctaagtgactgtatgtattgacgtaacatttatttcactaccaaaaagacaacaattgttatataagggaactcttatagcttgaagttaactctggtcatcacaaagagctttgaagtagcagctttgagctgggaagtttcaggcaattttctccctttaaaacagggatctgagtatcccacctgtctgccaagtgatatgaatgacatctgtgatgttgttaccaaattcagagactcaaggctcaccactaacttctagatgtaatttgcataacaagttctcagaacagaaggagaattggactacagtacatgttgaagcagaaagtgggtcagccaggctggtcttcatgcacctttctggagagccggagtgctatcatttcttacttggggtcatgtatcatttcttctgactggaatgccaagggcaaaactgggagtcattatatcattggtcagtcctttgcacattccaccatcccttgagtagggctaaaaggttaattacatacatctctcgggctacaggaatgatcaagactgtccctggaatacagttacttcaaaaactaggcttttgtttcagggaaaaatctcccacagagaaacatggaaggcgaaggagaactataaataagactgccatgtatgtcaattataaatagatttgttcccttttgattagaatattaatggtagcagaatgtctacactcaaacagaaacaaaggaagagtctctgacaaaatattactaaatgttaacaggtttgacacctgctccttcgggagttagtttctctgacttttccttaaatgagggctttccttctcttttcagtttagaattcagcatagtcttcaaattctttgccaagtctccatgtacatgcagatccttataagcacttataaactgtgagtaacctgaccaagggatgacagaaaagggaaagtctacttctcacacctggacacttgctagataaggaatgagttttcctttcattctgaaggaatgaaactcattcccttatccggagggatcacaactctgtctctatcactggtttgccatttccctattctctgcttgtgttcatgagtcatcttttcccagtgtcagggtgagaaatggcagcttccaatccaagctgcctgctgagttcactctgggatgaggacaaaacagtagggtgcctttgtcctgcaccaggctcccctccgtgcaatgcagagacctgcatctcctctctgctaggataagaggacaggacatcttgcccaagtctacccaccttggcccattaagggttttgactctagccaccccagatggagtattaaaggaggggcagttgataaaagtagctgagaggtgagggctgagacactgagcagtgatccctctggaaaactcatatacatctgatatggccccttctgatttcactgtgggatatttttaaaatgagtttaactcatcagttggaaattcacttcttgacaaacagtgaccaccatgacaaaactgatgatagggtattgaaaagcctggctcccaacacttaaacataagttcttagaactcttggacaggttgctgtgtgtgagttctgtctccaagtggcattgctgaacagctcagctcccatcagaaagctggtgtgctcttgtctgacccagagccacagcaagggaattctgctaactacacttgctgtgcattcaaggtttgagtcagaagatccaaacaagaccattaccctgggggaaaaaaaatgagcccttcattcctcttaaatgtcaaaatacctttgggccttagaagtccagactatcatatctagtattttcctaatcaaaacctagaaatggcgatgtgggtggctggagccatggcctccgtcccttttctaccctccctccacaccccaagccaagattcttcaggctttgccagatctgaagtgacaaagcaactcaggaccttatgtggccagccctcaacctccctgccaagcactacattaatggcagactgactcaatgggaggtgaagacatgagtgtgtgcacaccaatttgttcccagactgttaggtaaacagaaaacagaaaacaccctcttgtcatccctgtaagatgtctgacctgtacccaatagcctgactttatagccagtgttgacctctaacttagctggccccttgatgagccatctttcaccttcactgaatcatgtatctggctctattggtgaacagttttcataattgaggatgtgaggtctttttaaaaatgattcttaaataagctgtccgagaatgtgcttggaggcttcataaaaagagtgccaagtcctggcttgctcacaaaggtggaggtggcctttagactcagtgaagtcaaacattggcacatgcccattgaccagatgatatgtttgtcttgttcctttggtattgctgtcatctttcagggaaatctaggaatagcagaaagatgagtctgcccttttcctgctgcatgtcctcctctctgaggataaagaagaagcccagccactcttagatcctatgagtcacttccaaaggtcattctcaggctcggttactctgaaggcaaattctgttatatgcactgggagaatccttgtgttcctctgcaatccgtagctagcagttaaggtagactgtgggacctgctaaatggagatgttctagagaatgggagggagaatctagagatcaccgtatggaatgtgtggcagtagtctacatattagggggtttatggggaggagggcaaaataagccaaatatataacatttacattgtagaataataaattacacattctgagctctcattacatgcatggcactgtcttaaacacttctgtgtgtcgttcacacacttcattctcagccacccgtgtaaaacaggaagcatcgttataattacaagtgagtgcactgagaaacacagatgcacactaacacctatgagaacataaaaggctaaatgtgactgctgatatcttcactcaggcaaccaaactaggcccaagctgtgcaggtgacagtcatgtcgttagtcctttgctctctctttcagtcctttttctgggtaacacctaaggctgagaccatctattctttacttactatagtctctgatatcattagcaagcagcagtgccttcacattccaagcatctctttatttgtacatgaaaaaaatccccatatatacttacaatagagttaagtgtacatttaattctaaggttcatccagccagactcaatggcctactcctctgtatcgtcttagaatgtcagacaatgtttagcacatggagaccacacaattaaaagttcctgaattaggctgaatgcccgagcttcaaagtgcttttactactgcaatatgtctttaagattatcttttgcaattcaaaacaagagctccacacaaataagtaagtgtctaagaaatgctgagccctacagggaactctcccactcccttaagtctataacctataaaaatgagtttgcaaaggcacagtatagacattcctgggctaccaccaagtccgaccatcccaggcttagccacccatggccataaaagaatgccattgaccacaatacttctaaaggcaaaactgtgtccgcaagtggattacttgcctcaccaagagctgtggggttccaggattttctagaaggcttcttccatcctaataaaagttctcagcttcacaacccctcaacctgaacaactctgagggagatttaaaaaaatccaatttaattgaaacctctttttttttttcacattgaagtcacaagttttcacagggtacgatgtgttgccaatctagcattttccaaactaactcttccgcaaggcacttgcagttttctttttcaaatttctttgcgacatagttgtctctaagtattctttgcactatagactaggttctcagtagaaaaacaaatatcaacctttaaacatacattttttttttaaatgtttgctgctggttgtctcaactcagcaagtcagtatcaatagtaaggatgtcatggagcctacgctgatctaacagctactattccagatgtgcacatctgagtgctggtaaatacgtggctgtgtgagcacctatcaggagcaagtgctggtgctgaactgctgacatggtttttgccataggtgcttagagctttggaaagcttcaggaccatgagaaagggaacgagccctgactactggaagtatctgattggaagatacatagtatatttactaggcattcttttctttccatcccaatgactggtatatatacatgaccaaactcctgcctccttcatctctctttttctccttattaagtcctgcggcgtgtgttgttgtatacccactgtggtggaaactgactggaattttctgtggtgagggagcttcactgtaaggtgcagtttaggctcttggttgttccttttatctcactctgccagaggaggcatgttggtccctatctagcatcagactttttgtttccacttgtcctgtgtaccttggaacaatctgagtgcattgtccttgccatgagaaggtccccaattctataagtgtcaagaaaaggtatcttggtaccctgatctaaaacttttaggagtatgaatgtctttaacatgttttgtaaacattatatttactatgctctgtaaacaaacaagaaagacgatgatgacaaatggtaatgctcatggtccttgttggggaaatgttgaactgagagcagtcatctcatatccttgaaggtagactttgtctatcttcagtcagggagactaatacacatttactgaccaagtcaatcccagctgggaagttcaatggtttgtctgcatgatttctggaaaaatacaagctagactaagtgtgtggacccactgataaaattccacatagaagactttgacttcacttgatacagctttggggtgttttaaccctagcttggtttcttaccagagcctttgtgatcttacagaacccttttctgtttgtctttaaacattatttagggtgactgactataatagaacaagatcctcccaggtttcttttagtgctgatttgtgactccgtttacccagaacacaaatcctaactctagttatcagaggcttgaagagaaatgaactcaatcccactcttctgacagtctacctaaggtattatgacagtcttattaaaattagacagaataagtcaaaagtggatgaacagatggaaagatggctatattggcaaaaaaaagcacgtaaatatgggaaaatgaagctaagagtatcaagaaatattgactcaatgaaccaaataaattgtaacaaaatatataaataattgcttaaaatgacaaatgtatcctttatctgtattgttcatgtagagaattagagtgtggttagtcttagccttcaaatgaagagcaaagaggacatggataaccccctcctctagaaaaaaaatcaatcaatactttatcaggactaatttagtctcagagccaatgagagtgcatctgtctccatgtgaaacattatttagtggcttgttttcattcatcacaaaagttgcttgttctattggagcaactgaggcttttgatctctggcattttctaattctttgtcatggaaagacttcattccaaaaatagacgttgatttgttctagtccagccaatgtggcagttgttaaaagaatgaataaaacaaatgctggccaggatgtgggaaaaggggagtcttatatactgctgattggaatgtaaaccaatctagacactgtggaagtcaggatggaggctccccaggactctaaaaggagatctatcagattcagctataccacttgtgagtattcccctgaaggacctcaagtcaatgtatcctagagatagttctacaccagggcttgctgcagctttgctcacagtacctaagtcacagaacccaatctacatgttcaacaacagagactggataaagaaaatgtgctgtgcacacagttcgagtaagttatgttcttttccggaaacggacacaactgggcataatgaagagagttaattatgtctcaaggacaaataccatgttttctttcatttgttgtttttacatagatacttcatgtatatacatatgacatgagagtagaacccaagctgtctagaggaacaaaagcctgatgaaggggaaggacaaaggtatagtgagaaatatagtcaaagaacaatataaacttacatgaaagtgcctgtgtaacatggtatcttgtaccaagaatagacacaatggaaactgaaaacaaaatttaaaaaaaaaatctcagaattaaggagttgggaaagacctccctcctcataaaacatgtctgtagagaagacagttgtttcctctacatcctgaaagaggcctgtgctgaaatatctccagggactgggcccagaaacagcttcccagccacccctactctgcaaacagaaaagcacatcagggtagcatcacaccagccagtgggagaatgactcagctgagttccttccctgaaccttccttgcctgcacctgctgaggcactgaacttccttctgttttgtattttccttatttatgggttgcttttctctctgctgagtcatagagtccttgagggtcactgttcttgctttcccatccattttcatattacactgcattgggactcagtgccctaaatatggtgggtaaccaatggtctggctcgatttttaacaactgctgtttttaaattgactaacagcttaactctctgagaaggcaatcaggttaaaagaaattatgtcatgttcactgagttggatagacctggggtccattaaatttttgtgtcttctgtttttatttctttacaagtcttttaaaagtttataaattttttaaattaaaaagaaatttttgtcaacatacatccaaatttctttactatttaatccactgaaaattatttctgacacagtagactataaataagtatttggagtgaacttatgaatgaatgaatgaatgaattaatgaatgaatgaatggatgctcattgttgtccatttccctgggaagtacaaaccctgtcccagaagtacctgttttgtgcctccttttgctcttttcatgtattgtatgtcttcccagaatctccatccgaatttaatagtctaaagatgtagccttccagtcatctgttcctttctttattcaagagatgagaaggaagagtgtcttgggattgtccaaactttaataagatgaaaatacaatctctcatctataagatttaagatacgtagttcaatactactgaattctatgtcatgcaaggcagttctgctccatagcatcctcaagaatccagctcttgagctagtgaggcagcagataaaagtgcttgtcctgcaatcctgatgacctgaggtcaatccccagcacccatatcccagtggaaggagagaactgactccacaaaaaaatgtcctcagacatacattcacaagctgctgtggtatatgtgaacacacacacacacaccataataaatgagcacataataataataataataataataataataataataacaaaaacaaagtatttttatataaagaatccagctctttctagcattcaattttatcctcctgtgttttattcttcaccaacatggccatatatgtttactgggcattcaactttgtaatcatgctatacccaaaagaaagatgacagagaggaagagagacagagacacagagactgagagacagcgagattgagacacacacagaaagtggggagggttactggatgacctttgaggaagaatcccaaagctcttatatgatgctttcacttatattcttttgtgcagaacttgagaaaatggtcaaatgtagctgcaagggaggcgggctaagaaatgtagtcatctgaagattagtagttctgttatcacacaaaaaaggaaggatagaaaaaccataagaataaatctccttgggttctttaagttatatgagttaggtaaagcacttgaggcactgtaaaatctgaggctgctctcgtgttagccaggtcttcacttatatcttgtctttgggcatcatttattgagctgtgtgatttctgaactatttccaaagctgccaaaaactgaagcaaaacctctttctaaggtttctgtggaatgatatgggacaacttggtggtgccgagcacagacagacagagagtagatgctcagatcacatttatcacttttatacttcagccgatatgtaagactggcttgaaatcaatctgggcaagaaaatattcccgaagttcctgacagctgtgtttcttgagtaatttcacactctatccactcaccagatgcatttgagcaaatgagcagctgctaaagagagtgtagtgtcctcatcttcacctaccctttccttcccaccttggttggatgctattgaaccaggcagaagacaccaataaacttctcagaggtgtaaaaaataagcctggataaacaagaagaaatagcaagtctaaagatctgacttgggtcaacttggctttagttggtagcaaagatgttgctcttgatttttatagatactgaaccacaaataataggcaatgctcatgggtcattaggataagaatccaaagctgaaagagggcatcacagaagaactggcttacaagtgtcactgtataggcaacagctacagcacagccttctactatactcagtaaacatgagtaaataaattacttttttaatggaaaaaaatagtctgtggaggtaacttcagtgggtaatatgtttgttgcacaaggatccaggtccctggggcctgtgtataaagccctgtgtgtgtcagcatgtacctataaccttagcccaaggggcatggggtgtgactgaaacagacaatccctaaagctcattggctagccaaccttgcttaactgaatcaatgaatttcatgttcagagagaaactttgcctcaaagagaaaatggagagccattaaagaagatttatggtctccacacatacatgaatacacaatcagtgcatatacaccacacacacacacacacacacacacacacacacaccacaccacaccacaccataccatacacatacacaactttttaaaaaataaatattaccattttagagtctcaaaaatattgaaagactcaatcacataagtgatcttctaagaaaattcaccctttggaccattaaccgaacatctacacattgttattttttgaaatcataaattcacagaaatataacatattgcaactagtagtaagactttcagtgctcttgttccaaatgcctcccttctattgaggataacagcaactcgggtggtaattctactaaaatatgtattctcccttgctcattatctcacttctagctaagctatcaaagataggattttagacactttatcttcatcaaaaatattccttctagctaaagcacagacacgggttaacagtagaccttgtgggctaaggggcttacaattctgtccattgcagaaagaaccagctggattccttgagagtttttttttttggtttggtttggtttttggtttttggtttatttttgttgttgttgttgtttttaagttcttagtctgagcctgagcaacaaggggatagatccaaactggatctcaaatgtcttggagatgtggcaactcatgactatgtctagtttgcacccaccttccaatcccacacaagatggtgaagcgcctgctgcaacatgttaggagccccaacaagacaagagctggcctctctctgtgggggctgcagaaaggaagcagctgaagcaacactatcagtttccttccagtactgagaagaacaattgcactcctcccaggggaagctattcagagttggacagtgtggggtctgtcctgtgatggcaatggaggattcctgaataatggtggtgcttagtcaccacaattctctaaacacagactcaaagatagatggaaagccaagaggtccttaggtccagttccctgcctctatctaagccttccaaagcagatggtagtcatcccacatttagagatctccagggtagcaacctcttcccacagaccctgtttaatcaaattcttcctgactctaaatggaaatgcattgggtgtagatagaacctacttctctgtgtctgttcttcagggcattggatgtctagtcctcaggggagatgaagattgtaaccttgcttttacctcaccacagtgattaagtcaccttgcttagccttgtctttctaggagacctacatcttaacttcgctttccatccagttaatcataaaaaaaaaaaaacttgctggaatatctccagcttctccaaatgaatcttaaaatagagcgaaatctaagttcccactctaattaaaagctcgggattgccaagttttgtgaaaagataactctctaggctttcatttcataatcttcctcatgagcctgcctcatattacagtgtgttgtactttcttggtcacccagagctcacagatatttttctatagtgtttgctgccagatggaaccagtggcttccattttaaatagttttctgtttgcagtgactctgtactggagtcactaaagatcgctttacattctaaccgctaccttcaactgttctgatgatctacttccagactcaaggctatctgaaaactattcttttctattatttgtcatgaaggaaggagtccaatcctgtgaagggctggaatatcactcatttctcccactccccatgaactttatttgaacatgaaaaatagtgccaatcacccctgtccattcacttaggcagtggtcatctcctgagcagtaatcatgtgagcttgggttggaataatagacaaattagcttccctatccattcatgagcccatctacccatgtattaagatgggttcattcagcaatgactctctgcagagctagtctgactggtgtggcaaaagtccttggcttctgagacctcacattctaatggtttgagggctaaaagagacaaagtacaagtcaacaaataaataaataggaccatgtcgaattttggcaaatgccttgaaagaatcgataggataatagaattgagggtggaattgccttagatagagtggacaatagggtcttctttgagtaggatatactgaagagattacagcttaagacagacctgatattctgaaccaatcccctctagcaaacccttctgttttctttgacccagaacatgtaatgggatgttaacatttggtaacacattgttcattggttaattattaacatacctcgtggattcgtttcagaacttttaatcaaatgtgataaacagggaattttgagattgttcctggaaagaaatgggagcatggtatcattaaatgcagaacaagtgactttagtatcatctgatagacttcttcatcagggggctttccatgagctcaggactctcaacacatactttcagcccatctgaatatttttatatggaatatcttgaacaacaaatactcttttatgagtgctgacataaagaaacatcttggacctttaggtgtcttttaacaatataattggcattagggatataaagcctgataggcaggcaagccctgggtgtctgagaaaagattgcagtgggagacagagcactgactacttcagttcctctgtgaggctgggcctgcacttctccagtttctttggaggatggagacttttgaattttttaatttcctctctgttagaaaatccacagacatgtggttatatatcatgcaaagggtgctgactattgacatagaccagcagatttctaaggacctgccctttgctgtaatttgaataagtctttgcttttggatcacatgagcctctggatcatgattttttagtaacctttgaacattttggaccaggcaacgtgttttgccagccttcaaaggttttctggccatggtggagtatctgcttattaaggaaggctcatcaatatttcctgtgcctgtagcaggtcctccctaaaggcccttggaaagtttgtaagaaatcattaaagaagatgaagagtatctcaacccagagacgccagtcatccctggggacacataacagccttctggttgagtgaatgagaccattcccatcttatctatcccaggaatagatctttgaagaagatatgtgaagagctccagagagtcaatggaaagtagatacctaggaaaagtatgattgaaaactcttggtttttttttttaagaggaaaatgcaaacagggacttgaagggagttgccacaccagccacagcttctgtcccccttctccattcaaccagttgggagctgctgccgacagggcactatttggcttaaagctatgtgaagctccaagtaagcctcatgaggcaggcttggaaactaaataaagcatcatttgccctccaccccaatacttctctctggagacaattgaatcaataaatcctgggtttgcagcaagacccatcctaggccttgcttgagacatgttgatgactatggatatagcttgactgacagacagaaagttgtaattcttcttcccatacacatgtcctctcgtctgacacccctagttgactctgtaagtaatcattaatggtatgcctcttccaacaccccttttgttccagtcctgaaacaaggttttgatgatacagtcctgaatgcgtgtcataaacctactgtacttcattttacttctctatattactctaggagataataaaggttgaaggcacagtcaaaggtataggttttgatggatcctgccttctgtgccttgttttacctgagcagggtggtgttgagcatgggtgaaacacccactgtagaattttgaaagctcaaaaaacaaatggaactcagaaaagcagtgttcagtatgagagggtgtttctagctttctggtttggctaggggacttgttaaggctccaatttcctaccctcagacccagcgtcttgtcttcaggtactagctgaaatccagaccaacacagactgtgaaaataaaagaacagtgaagggggaaaggtcaacatatggtttttgtttcatttcgtttcttcctttggaaggttttgatggtttttttttttccttcctctctgatttgcaataaaattggttctgctaccagactaacatatggatacctttatgaggcaatcatcaaaagagatatgaaaatagtctggcatattttaaatgtttgaaagaggtctttctcagcactgccattctcaatggttccttctttccattcttcttcctgggtcctatccatatcctattcagtgtcattaggtgacattattcagtgccacacagaagcaatggttatcaactgagaacttgaaaatgtgaattctcaggcactaggttagactgagtgaaacaaagatctgaggtatggtccattggcccgggttctaatagcccctccaggtgatggcaatgcaaacttaagtttgagaaccactatgcatgttcactgtgcatcctgggatgttagtcctcctgtccactagctgcttgagggaccgccacatattctgaagctttgaggacaggattgagaatcaaagacctggcacttgaggacaaaggaacttccagattcatccaccacttaagctttggcttattcacctatacaatgggaacgaaacaattccagggaatttttagggttgttaaaagggttaaaggacagaaaacctgtgacaatgatttgtactgccagggcatttctggagatagttgcacagtaagttgactgtatgaatcgataatgctgacgtacattatgaactgcaagttccaggaggtggggacaagaggcaggaactgtctgtctcctttgtcctcttctgcattcaaagcaccaagtctgggtccataatggccaatcactgactctttacgggatgacatcaactaaacttgccaagtgcttattcatgcatccatcccaagccttatgaggccactgcctcttgggatgagccctgagaggttcactagtttactcgtgtcacacagcttgacatagtggaaccaatgtcttcacttaagaaaagctccatattcaaaccagcttcccacaaaatctcactctggaatcatcatggtgatgattagaaaagtgatctgaggtggcatctttcaagttcctgctatgccacctcagatctctctacaccttaatttgaaattgcccatagaaataagtatgattaacagacactagccagaatacttgggggtggggtggggttgtttgtttggtagttattattgtgtgtggtggtggtgatggtggtagtgttgaagtatgtgttgttccaaactcaaacccaggaccgcacacagccaaggccagaattttattgctatgtccaatccttagtctctgatgctaggtttctttttcctaatgcccaggtgttttcatatggcttctctttgtgatatatttgtgtaccagctttgtcaatatgggtaccaatgagcatttaggaaatgcccacatagctgacatgattttatacctcgaagtacatagatgacatttctggttttaaggtacaaaaaagcaaacaagaaaagtgggctgatatttgaaaagcagaaggcaaaggcaaagaaacagttaaatactgattgtcggttgcttttatatgttcagagaggttaatggaatcagaatagagcagagtataccccaggacccaaaataactttcttgtgagatttaaactttctgagatttaaacactgaactgttgagttcagcatccctgcacggcagtatccaataagattgccatagtcactaggctcatgggtgtattgatctgtcatatccttcataatttttgcggagaagagtgtctagactgtagacagaataacaaatatggttgcctacttattttctttacatgggaagttagatcgtcagcatcttatgtgccccctccccgccccccacccccccaagaaggctaaacaagagcccagttctccagagagcacctcagctcaaaagaagcataaaaacagcacctttgttatttgggaggagaaagtctactttcttccctggggtggtatgttgctgtggcaactgtgacccttgagtgcctccctagagaggaaacctcataggtacatagtgcttttgaaaattgagaagcaggatttaggatttcttgtcatcgatttcatttcccttggtttttctcctatttggtaaacctttgaatgccaaactcaagcttggttacaccccatgttcccttcataagaaacagcactagtaattgaaaacagaaagtggttcctttattctaactcatgggacgcaggtatgtttcctgtttgggccccaccttaactttctctttccaaacactgggagaaaatctggatataattatctgcttttgtgactaaattctttctagttcttatggtgaaaaggcagtctgtcatcaaaataggactgtcggataatatcctttgatttgacaactccatttccgaacatttactctcatagatagtagatagtctaggaacatatctttatcaaaaaaaaaaaaaaaaaaaaaaaaaacacctaattgctgcattagttaaaacaataataaaactaaaaatagccaaaatatatagtaacacaaaaatgaagaaactaaggatgataaatctacccgataaaatattctgcaagtttaaaattatgactatgaagatcaggtggcaacattggaaaatgtttgcaataaaacattattttaattagattaaataattaaataaattttaattaaagaaatgcagcatcatattacattttggctatgactgtagctttatcataattatctacctccgaataaaaatgaggaaaatttgtaaaaacattggtaatgcaatttgttgagatatttgagtgatgggtgatatttcattattttactataacatttgaaacccagtagggttggaagtgaaattgtctaggtatgtgacagagctgaatatccccatctgaaactgagtcttggttttatggatgagatgtgagcatccaatgtccaagctatgttcttggcaggagaagtccaaagacatctctcccccagggacaaaagccacttgttccctttgagaactttttctagtgcctaggagaaaacaacttaatgcaaatgcttgaataattgagttgagggctcaacttaaaagacccctcacacccccttcacttatatcatgtagtatgcaagtctcattaatggttcttactttgagagtgttcccaggaaggtagactgattctgctacttaataaactaagttaaaacgtactctttgtaaatctcagcttccagacatgttaaatgaatataggcataatgcctagcccatgtagacgctataaagatatgcataagatgtacaaagtaattagtaagacatgaaaagtttaataaaagtcccttaaaaggaagacactgttggctatgtgttgtcggaaaggctttggtttttcaaagaaaacagtgtttaattggattgtatctctgtctctttataagtgtccctttggctcacttgctagtggatttcctcaaggtattaatcttcatctgtgttcttgtttctatggaattattgtctatactatagtgtgtaagttgggttagggaattttagacttcagataaggtagcattgcctccttagcaactctggcatttgaagaaaagcagcatttcaagttaggtaaaagtgttggagtagtgcaactggagatgccccagatgactaacccagatgggggctgtgagaggactcatatgccaagagccacagccaaggacaagagagggattttggttaaaggaagagtgttaggccatgcatggcctggaaaaagaagcaaggggtgatttgtggcctattgagcacaaaggacaaggtttggccaaagaaggcagggatgctgtgaagaatgtgaggaatttatgacgggtcatcatcccactgcaagaaatgtctgccaaagacaagtctccaccaaccaagtctcttgcattcagtgagaagaaagagaggggcttggacccaccaactgacctttatctgagtctcttcttgatccagaagcagaaaggacaaggagagtttatgttaggagagggaaggaattggtgaaccctttgaagcagatgaaagtgttcccacgccatccatttcctaacattctcttctttcaaagtcatcttctttctcagtgactcaagtttacagtctaggtgtgtctgatttgaacatgaagtgatgcccacagcttcagatccttgaggcctgggttcctagcctgtgttgttattgacaggtagttggataataaagacattagcttcatgaacagatggatttgatgatgatgcctaaatggactactagggagtggggcatggtttgaggaagaaggtcactggagtttattttgaagggcacatcttatctattcatctctctctttctctccctcccttcatctcctcccttccttttctctcccttctcctctctctttccttccctgttttgccatccgtccataaggtaaaatccattccttcaccatgcctttctagcatgacgctttctgccttgacccagaaccatgctcaaagcaactgagccagctcatcatgaactgaaaccatgagtcaaaataactcttccttcctgaagttgattaggtagttcatcacagccacagcaagatacctcacacagttaagaacatctgaggtgttctctgccagttcttagcagacctactattcaaagccaaaagcttcacttatctccgctatccctactatacagaaatggctaagagaccgagaggatcacttcttctcattagtccatttatagatgcagttctctcatgaaaacacatgtatttatcatggtggagcctatacagaccatgcccatcacaggtcactaggttttaaactgtctttttcttccaagatgagaaactttacatgggattctgaggaaaacagtcctgaaggcaggctaaaaaatggggtgaaggctgacctgctgcagggttatatagcagaagagaccattagaccccaattctgctataatagggacagagtttattgtactttagtacccctgaagcttccctaaacctaagctaaagtgggcagacagaagcagtcagggaaccacaggcaccatgccccggcatgaaatattcctcccagctgtgtgtcacattaggtctcacactgcctgctctccatgaggccaactcagtcggcaactgtgaattcgtttggcgaagaattggaaaatgacttctgaggcaacgggctccagttctcagaaaggaaattcgcagaagtgagtgaatggtcagaaggccaaaaggccattgcctcagaccaagtcccagggcagagtgctggggccgttctgggtttaggcttgtaataaaaaaattaaaaaaaaaatacaagtgaaaatgtgatttctctatccaatatcacaaccccaaagtggtttttctatgctgaatttagtaaaataattaagagaaacagttttcccccccttggtggacaattatatttgctaaaaagcgtttaatgagttttggaatgtaggcatgagattggtcccagatgaaataaagatgagaacatcttctaacttggagtcaggcaattatttgactctctggcccttcctctggccctcctctcttctctctctctctctctctctctctctctcacctcctttgggtggggctaggctgggagtgtaatggctcaaagctaacagactctatgattgccaaaagttcaccgagaaaccaatttatttgactctgactttgttgtaatatccaaagaaatttctttttcaaaagctaaagtgcaagagtttgaagaaaactcataaggtctcatggttatatttttaaaaaatcaaatgctagggagaagggataagaacagtggtagggaaacttaataatgataagttcactcttatctaaaatgccctaaaataatataattatttattaatatgtatttataggataatatctaatatatttatatactataaataatccatctggctccactctgtatgcttgcatggaaccttgacaagtaatagattctggaaggcttaagaacttcttatatgcacttaaaatcttttgaaaccatagaaaaagttagttttacaaacagagaggaaaagaacaagagagaaggaggggaagggagagaggaaatgagaataagagggcacttgaaaaacgcattacccgacgttgtcccctgggaaagcatggcagcctgcctagaagcccatttatgttatctaagtggagatactagaaactgtaactagtcttttccaaggaaactgcgtgtgcccacctcataggaaggaaatatcacacagaaggaccatatgccattgacagacattatggaacttggggagttaaaacccccactgagtactaggaagttaaacattctaatcaacaatattaatagcctttctgcctatcacagaaaacaacttattaccttctgcagatgaaactttgcaaatggtaacaatagagcagtagtaaaataatagaataatagtaaaagacccatcaaagatattaaaagaaagaaaaaaacagcgctagagaggtggttcagcagttaaaagtacttaatgtcctggcagagcaccctcgtcgtggctcacactgtctgtaactccagtttcaggcgctcccgcactctatcctgacttccatgggctccagccatgtttgtgtgtatttatacatgcaggtaaagtgttcatacacataaaatacaacaaagctttcaaaaatttcagggacgttttgcaagcactcttttttataccaagactcatttgcaaatcccaatgtaataagaagcactcctctttgttaacatcttggttagcaatatgtagttagtttcttcatgttgtctccaacaaataactttctggtgagttctctcctattctccttctaacttatactagaaccctacctctagtagcctctgaagtccccacaaatattcctggttttgtcccttaatggagcatcagaatttgacattttcttcatttttttttttttttttttttttggctaagcctaacactggtcttaactgtccttaaattgagctgatgaaacttgcgtgtatctaaaactaatcagagaaggaacttcagattcccctatcagacccttcttacctcagaatgcattcatgcaccatatgtaaacattatttagccacaaagtgggaagcatagctcacctaacactttgaagagttgaggcttcactaagggtgcctgatgctatcccgagtttattttgctcatgtgaatgaatcacgaaggctgtatttgcatttttcaagtgaaggctgtaaggctgagctccagtgttgctctcggtataccataccatcacctttctctcccctggttgtgtatggctcagcactgggtgctttagaaactctctccgtgatctttcaatcagagaacagcagtgttgacataccagcatgaaaggactgtcgcacacaacccaactggcatctcagtgcacatcaggaagttatttatgatgtgtaacacccaaactgtctcctcctgcccaccctcctcctttcctctccctgcgtgtgtttcaatctgtcattgactctggctgccttttcctctgccatagtgccaagagctgttcctgctgctgcgaaggctgtcttccaacagtttcctctctggtgcaaacctggatgcccgtctttcagggcctccacctctcaaggctctcccttcagacatgccagacttccttggcagctatcacctctttacctgccatactgaccctgtcacaggcacctctgagaaaatgtccagatgtgcccatacaaaaagcaaacaaacaaaagagcacccccccccagaaaaaaaaaacccagaagcctgagtagagaagattgacagggaacaggacccctgagaacccagggcaagtgccaaattgcaaaaagaatagagaaacaatagactctggagtgaaactaaaaatagtgtgttttaatacccccctcaccctctgtgtctgattcatctctctgtggcaccagaaagagaggtattgccctctaatcatgaatgcttgtgttttgactacaaggctcctatcacagctaagaggaaccaacaataacagtgtatgtgaaggagataataccaatagcaaggttattatctccagattggagccagactctctgacaacttttgtctcaatgtttcggcaagagaaaggagaaggcgggcactgagggtcaaaaatgtggttcctcagctccaagtctcattctttctcttagagtttctacctcagccaggctcaaggccaagatagagtggtgattagcagtctggtaatcctggatgcctggtgactattcattcccaaagcagacctggcaggaaggaatccctagtttttgattatttaaggagggaactagtatctaattcctagcctaccatgaactcagcatggcatgagcttccctgcttgatagtccttagtagggataaataacaccaaatggccttcaccatcgaaacaggaaaggcaaacttaagggtgaaaagaaaggtgagagtcacaggaaagaacagtgtctgcaagtgtgaggctgacctctccgaccctgtgttcagcccatacccatctcatgccttgcaagttgttttgatgtgagttggctatggaaaagcaatggttgtaactagtagatcacttgggatgaaccaaaggcagcaataggcaaagatacacatatctggcatcatgttattagacctggctggaggatccaatcaagtcagggtggtttacacaacataaacgttagctatcccctcaagggaacagttatttatttacctaaacacagaaagcctcgtctatcttgaaaacctgtttcaaacagactctcctttggggaggggtgggatgggtgcaatctaaacaggaagtgaggaagacaatcttgccctaatcaccatgttaatcaacatgacccaataatacagatagtcaatatgtatgcagtttactgcataccagtcattaggcaaagagctacttaataatttcagaatttctaggagatattcttggtatagcaagtctactgatgaagatctgaatctcagatttgatcccatcccaacatcatacagttgagtaagaggaaaaatctaaatagactgactccaaaccctgggctttaaccactcattcctctgcttccaccattggtgtgacagacattattggaagacctcagattcagtcatgtgttgcaaatggaataaattgcctaactggttaatggtagctaacttacgtggagagggccatagagttgaaatagttccaacataaaaatgacctcttggtatttgattacctttcaccttagacattgataaaccaaactgttccctcaggacaacagttctgtacagggaagcacttctcttgccaaagtataattttgttggctatatctatctccttcaagccttggaataagccccaaactagtaaattctgctgtcctggcaagacgcgtttcctccagggcattatatcaggctaaagtaatacatcacattgcttcccactctgtcagcccatttctctaaagagtcttaaagcagtaatgtttctgctttgaatctcagttgctcttgcccctaagtattgcactttgactctctgacctttgaaacaaagggcacgagaagagtctccttcccatacctgcccttgagttggggctcgcgagagagagagagagagagagagagagagagagagagagagagtatgtgtcaagaaagggtcagcctcctgatgctttatttcattcattttagaccaagagatacataaacattgacataattgggtaacaaggagactttggtctttggcattatggggatttagtcaatgggaaaggaaggctgggtggtagggtgggatggggtgggtactatagggtcatgattcctagaagagatgacctcatccaactgagaagtagtgggactagcaaaaactgccaattaaaaattaacataggccaaaagtgaaatcgatgcctaaatctgataggttgtcaggaccgtttctgacacatagttcacagaaaaagagaacattttctcagtgtgcacttttacagatgccaaaggtcaggctttggaaagatccttccacagacatgcaggactgaacacagctatctagagaaggctctgtcaggtgttatgtgtaaatacagattttaaaccttctccaaataatcctaatttgaaaaacattaacattgattatgattcactttattctataatacatgtatgtaagtacaaatgcatgttatcataaataagtaatgataggtccagcaatgaattctctttctacatttttttctaagcatacagccatgcataccttattaatttatttaatttaaataagacttctataaagtctttagagaataaaatattgactctcaaagacatcaaatgttaagtgctatagattcaggaaataccaaccatacaatgttttatcatagttttccttacattgggaattatgaaagatgtcagttttccatataaagctatcagagtaggaaagattggaaagcaactttcatttatacaaatgaaaattaaaatgtttccaggagttgcagcttaaacttacagtcccagcactcagtgggttggagctcccgagttcaaggttaaggccagcctgagctatgtcacaaaacatgtctccaagaaacaaagggaggaaggatacaaaaaaaaaaaaaggagtgagggagaaagggaggaaggggaagagaggaggagaggaggaaggaagggaaggaggagtggaaggagggagggaagtaagaagggaggggaggaaggaggcagggagggaagcaaggagagaaggacggagggagagagcaaggaaggaggtgaaggaggaaggacattaaaatgctcaaatgtagggcaagtaacttagttcagtggtgcattgtgtgttcagcatgcatagggtccacagggtaacaaaagagatttcactggacagctataatattgcttcttaacataattttcaaaactttcctactaatatgcaatgcaaattgatatcaactgaatttatttctattagataagtttcttaaagaccaatactgacttaagaagaattaacctatattgtcagtgaatctagagattagcaaaattaacaacaacaacaacaacaactacaacaataataataataataacttacagaagaaaacaaaggttctggctcctacagatcctaactgtgatatttcattgtgtaatcaatcttcagctaataaaagttaagggcaaattgtttattatctaacaatatcatttatattttctattaaacacgttactgagacatttctagaaactgctcccaaaccccaacttgaaatttcttgcttcttcatcctgtttttaactttaaacactaaatttaatttgtaaaaagaaaaaaggactctactttggtacttcttcctcctattaataatggttttagagaattgttgtatactttataacccagaaaggaataagtatgtatcttcaaaactaggtatgctcctaatttgaaaatgtttacatttgacattatttaaatattgatgcaccaaatcaatattttttctccttccaatgacagtttaaagagctttctcagtaatcagaaggggaaatttcccagggaaccaaggtactgtatctcaagtccatttccagaaactgatgagaaccacagctgtgtgtaggttggtaggcttagttttactcctggttaatggccacaactcttccctctagaaacaatgaccccagttaactctcagaagtgcacacttctctcagagaaggaggggagtgagttgcttgcatccatgacaaaatgtgatactcagctaattggtgtggttttgatgataccacagttctgcccaaaacccttgtaactagcaagttttgccctgaagattcttgagttactccactgaccatgcattatttaaagggaagtgctactaaacagaggccatctgtttaaccattggaagtctctctgttggccccagttttgacaaaacattatgtctcctcagagtggactcaaaaatctaggttaagtggtggccagcttgtctggaaagctttggtctacatgctagacaatctctgaaccaaaactactgacaaaataaatatgctattatacattttctccttttttttcttagtttatctttttattcactttgtatcctggtcgtggtccccctcctcctctcctcaagtcccaccttcacaagtcctttcttccattgccccctgcccttctcctcagagaaagagaagcccggtttgggtacctgcccaccctgggacatcaagttgcagcaggaccagatgcatcctctcacactgaggccagacaaggtggcccagttagggggagggatccaaaggctggcaacagagtcagagacagccagtgctccagttgttaggggacccacgtgaggacccagctgcatgtcgactataagtttcagtgttaagtctttgtcagcaaattatctgtggagtgttacacagtcaaacaattaagcagatagacaaggttagagactcctcagactgtgtcccattgtaaaaggcactggcccagtcacttgtcttttactattgcattggcaaaagacaataagtagttttgagctttctggagaactgaacgataatcaaatttcatcttctaagtttaaacatatttaaagctctttcttgaagacaatgtaagtgtttcccaactaggctgaataagtatccaagattttctatacaatctctggcatagaaaagatcacagcaggcatcttattcccaatataggattctgctcctaaggtcaccaacaggtatttgtacagccatcgcttagctgctttctacagtggagacttcattatagttcaagaaagtctttttttaaacttattttttggtaacaaattgtttaaaacattttatgttaagacaattttattttctgttcacctgataattctgattgaaccaaccagaataaaatatgtaacaggagtgtttaaaggcaacaacgtcacccctagttccacctcattacaaaaatagtcaaatgatcaaatgactaaaattttctgtaatttagatgtgattaagatactcatttatatcaaaaaaggtgctgagaagatttgttgattgcctacctgataaactgtattacactagtttttctattttaggccacaaccgtaaatagttttattaaggttcttttaaaaagactaataggaggtggttgaagaaaaaccaaacactttgacccacaactgtggtccctcagttgctgagaggtggctgttaaaatcaagcctataggagacttcaaaggatggattaagctttaagcagcaataggtaaacatttgctacattcataaattttgaataaagtacaacgagtccattgtagtcattgtgaattggcaaagacaaatatccctctagaattgtggtagctagaatgaatataagtggttgttgtattcctgggaaaatccacatgtgtatattaccactccaatagcacttaaaaaaaaagatacagatgttacataagaccaaagttcttaatcgaacattatataaaaatcctaaagctctctgcttcaaaccctatcagtgtgtggcctggaaagcacagaggaactgcaccaaactcgaagttcctctgtgagagtcagcaagctaggcactgagcacgtgggttattctctgctgtagtgatgactactgtccatttcatcttctgagatggtctcgtggctgttgagagtcacctggaagtatcacatggaagtgtttttggttatgccaaaataatggctggtatcttcttctcggagcaagcaaggatcacagaagtaagattagccaagaagggcttcaagtggaagtcctaaataggtcctcgaatcccccctcctcccacctctctccatttcaaattcataagcctgagttgtgaaaacagttatagctgaactggccaagttcagaagtttctggaagaactcctacaaccctaatcctaaacatcaaataactattccataatcaacaactgatggagtaaaaaatcagtttcttaagaaatcaggctctttaagaaacatgtactacaaacaaaggacagtcattgcatgaaggtattgttctgataggtacagcaaaagcaataggcctcttctctcttttgcccctacctgcaaagagaacccaaatgaatcctctagtcttaactggttagccagttagaaaactatgcagaagtccttcatggattacaaaagccatgtgcacccatttgtgtctttcctctaatttattgtcccaggaaaagattattaaagaaaaaagtcaggaaaacaaaaaacattgtttacattgcccaggggaccagccagtttgaactttccagggcctgaatggcaaacaaaagccctgagtccaattctatgttagtccttcctccaatggccagtaaaagtgttgctgagactccactgagaccagccgcctggcccctcccaaagcccacaaccatgaggagcccacagggtcggctgagggggttggggggagtaagaagggagggaggaagaaagagaaacctttccttcccaaagagaccacaaatgaaccctcagtaagttactacctccagctgccctgagaataaaccttccttgtgtgaggaagcagcaacaaggctcctgtgccaagcatcaggaaaacatttgggttcttagaagacgccataaacagttggcctctccagcagtgaagcagccaagctaatgtgagtgtgggccattgccatggtcctgatctccccagtgaggaagctgaaaatatagatgaagactttgattgtcaaatgcccattcttaagtattgtgtcagtcagtacctgtgtgataataagtctttatttaatgccatgccttcttgggttgggaattaagactaagcatatatcaggttactaatcgaattctcgtggtgtatgactctctctctctctctctctctgacaaaagcctacatggcaaaggagagatgagaagcatccagcctcccaaaggatgtaaagaagatgagaacagaccaaaatgttgtgaccctatctacaacaacacagcttcacatttggtgtgaatcaaatcaaatgttatccatacagtactgcatcaacgccagtaaacgtatggtcaaaaccaagatcaaattgactcaatacctacttggccaattaaggtgtctaactgatgtgcaaatatcaaaataggtttgatagcctcagtttcactgccacttagctctctgcctgtccttagtccagtagtttcttctataggaaacatacatgttgctccaggctttctggggcaactaggcaagccccttccccactagtattgtaatcagttctgagtttccaggcttctgcatatgctcaatagcaacaatgggctggttatttttttataggtcatttaagaccttggaaaagatcctcaggagaagcaaactaatatgaggttaagatctcttctgtagcaagtgctatatattactttatttaatacgtcatttcatcttatcctcaattctgacaagaaatatgtcactgcctatcacacaattcaatggagacctccagagctctcactgcttttctggggttattccccagaattttctggactccatgaagtccttgggcttaacagcagaaagatcagagtttgaagcccaactccaccaattacttcaaactctgagtctcagttatctcaccaataaaaggaagatatatgttttgacttccaactttgcttaaatgaaatttaatttacaagagaaatagaagataaaagagcagctgagctgcccaagtctgaaactgtaggcatttactaaagtgattggaaagatccagtgtcccagcaccatgcatccaagggggctcttgctcaaaaatttgagatgatgagcaacctaaataccttcagttgattattaaacagtatgcatcatactgtaccctcccaatattacaattgccttgtcaatttaacaatagaacaatatgtttgcaacattttaaaaaacttggtctatgattttattttaactagaactgttaaaagcctctcaactaagacaataaaaagaaaggtgataggactgggcataggcaggatcctggaacacagactgaaaacatgggaagacttcatacaaataaagtgcatgacaagtgaagtcttacttcttgagtatgcttacatatgggaatctaaaagaaagtactgggtcaggcatattggaaatacttaaagaaaagagtgacatgttggagaagtatgtagacttgatgtgggaagaagaaaggcatcagaggatagataaaagtctttgaaaaataggcagttctaacaccagcccattctgatttgtgcagacaagcccacaggctatggctccagcattcggagggcacctcagacaggcattgtggatgagtgttgcttccggagctgtgatctgaggagactggagatgtactgtgccccactgaagcctacaaaagcagcccgctctatccgtgcccagcgccacactgacatgcccaagactcagaaggtacgatcgagtgggtgaaatgcagtcattcttgaacggtctgttatatgtgatgcagggggaggggggcaaatggaaatcctatgtctcctgagtgataggtcacaaagttccaattctaccaataagatggcttatgggtgcacccttccaattactttctactctgaattatcttttccactcccctggacaatctgacacttggaaggtggtagaaagccaggactaaacctgtgaaaactcaaattgcccaatgaggccggttggccaaataggacagcaagtctaggctgccagaatttggtaaggtgatatacgctaagatggagaccatgtacaagtggaatgcctgcaccaagtaactgttagacaaggattaacatcgtctgtcataattgtatctaatatcaaaagttacaagtcctggaattctacaatggtccaaatacagactccttagtgggacctatttgaaattctcagcagcaattataaattaaagagaaatgcattgaaactagacatacttggtttagctgtaggaatgtttagatgtttctgatgatcaaaacacaaggcatcctttgtccaagcctttattataacgcaaccccaggaagaccatctgtgccataagaaacaggtaaaacatctgacacatgttggctacttgatacacttataaaatgaatgaatgaatgaatgaatgaatgaatatattagagtctaagtagaatcatagtttttatatagaaataaagagaagataaaatagaaagagaaagaaagagagaaagaatgagagaaagagagaaagaaaggaaagaaagaaagagagagagagagagaaagagagagagacagaaagagggaaagaaatagggagagaaagaaagagggaaaggaaggacggaaggaaaggagggagggagggagggagagaggaagggaggaaggaagaaagaaagaagtaaaagccctctcttaggtgttttgaggcattttttaaaaaagtgaacacataaattctatcattgaaactaaacaaacattgtgcagaaagcacaagataagagactcaaacgttcactctgacacctttgctgcttcctgatcctaagctaaagccgaggctgaaagaggaccctggggtcttagtggagacatcaccccaatgagtctcctgaaaggatttgaggggactgtttaggacttgagatagacaggatacggtgggcacaagagtcagaaaggatatcactgtgcaaattaagggaaaaggagtgttccttctagctgaagaggaagtgggtattagagataaggcgcaaagctcgggcacctcggctctggtgcctgaggtgtagaaccctctccagcagtaaagctagcttctgtttcctatggagcccaggcattctgggcagattcaaagaccgtcttcagcacaggagccacccgttctcaatgcaattatttttgtgatgtttgcagtccccgtccctatcgacaaacaagaaaacgaagctgcaaaggagaaggaaaggtgagccaaagacacacccagaaggggaacaggaggaggtaacggaggcaactcggaaaatcagaggtcccagagaaaaaagactgggctaggaactgtgagcaagcaggcaaagagggacatgcgggaacagggatgaaggacgtgcgggaacagggatgaagaaggagcagacaggagcccaggaaagccgcagaggagctgaagcaaggcagtcctcactaagctagataatgtctgtgacggaagtaagaaagtcctcctctgggatacggcacttacacatgggaagaatggtacggggaagtgtaacacctcagaaagtgacaagtgaccaggatggaacatcaacaacaataacaaccattaaaaacatgccaccaagaccttccctccccttcttaaaaatataaatcagagtaaaaaaaaaaaaaaaaaactatgcaaaacaaagattgcatcttcagcctgcattccaaattttatacaaatcttttatagaagaattgcccatgtcaatatatgttcagagttaaatattaaccataaattcgcagcaatgctgtattgtgtcattgaagttcccagatttctgtcctgaatttcaccggtggttctgcttcttggtcaagtccagggtataggccaaagaacatcgggtatttacaaaaaggcctgtgaggtaacttttaaaaagatcactgaacttttattttgtactgtggtatcagacacaaagacatattagttcaccatggctgctataacaccacagactaaatggcttaacccacagacacattttcccctcatagttctagagagtggaagtcctcactcaaggtatcagttccttggaggtctcctgcctgtgtccatacaatcttccctctgtaggtatctcagtgtctatatattgtgttttcattagaatatcattaagacgggagtggggttcgccctaatgacctcattttaatttgatgaccttaatacagactctatttttgaggtgctaggaattagaaccttaaacatgaattttggggtagaggatagcagttaatccataataatgaacatcaaactatattatatcatttagttctctctctctctctctctctctctctctctctctctctctctctctctgtcacacacacacacacacaggcacacacacacacacagacacaggcacacacagacaggcacacacacacacacacacaggcacacacacatgcacacacacacacaggcacacacacaggcacacgcacacataggcacatgcacgcacacacacacacacaggcacatgcacgcgcacacacacacacacacacaggcacatgcacgcacacacacacacacacaggcacacacacacaggcacacacacacacacaggcacacacgcacacacacacacacaggcacacgcacacacacatgtacacagagctagattctgaggtctcaaatcttatgagattcttcgttagaagactcttaagctgttagtggtggtaaaggccttggaagcctttcaattctgcctctttattttaaagactgggatactgggatctggacataggtgagatctctaattggtttctaagcttcttctgggcaccaagtcacaactatcaagtgaaccgagtaaaaagagaagaagggcacagaattggacatggggatttaatatttgtctgccagaagacagcttgcaagtgctatcaagagtgctgaattttctggggaaggtggcaatcaactcccagaagaaggtgggtcttagtgacctttgcaatcactacaagcaagattgtcatggggcagaaagcaaaacctcgagattatctaaatttgaatccccacacaacaagagagtatagaagacagaagaaatgaccctttggggtggtaaaatgactgaaagccacaagtgagacatttcatctacatcatctacttcgaagacccagtataaagaagcatctttcggcctagtccttccagttccttttttttttttcctactccaggattataacttctccgtggctcactgaaaatcttggatgtcctcaatattacaaaggtgttcagagctcaagatagggttgaagattcaattagcagtctgtgtcaaaactcccaatgaaagcaagtttacttccattatcactgcaaaaagattatctttacctaggttatcaggagaagctgtgttttattaagtcagaacaatttagggacagactcaggcaaaagctgtcactaatgccactgtagcctgagccttcagactcagacagctcttgaggaaagcacagttcaacaaaagaattcagaatctatgtcctatggaaaaaattgggtggttgtacttaattataaacttcattcaaaggaaacttaaagtgatgggactttctagttaaagtaagttctcatagccctagactgtgtattggaatacatttctttatgaagtaggttttaaccatttaaaagcaatccttagtatgcctacatatcttctctcaaacatgccgacaactgaatctatctcatactgttgtgaggatatatcaaaagtatatttaggcatatctatatttgtatatatatttatatatgtgtgtttattgtacatacacatagattactctaaataatgctggcacataatataagcactattgaactactagctagtattgccatgcttctggatattggagcaatagaaaagtctcctgaagtagaagtgtctcatattgccaataatgtcaagccaacatttgacaacagttccagcaatgtgcatattctcgtacatacaacagaagagatcttagtagtctaagattactcccaacctgtagaatacctgattctgtgactaattccaattaaaatggttagccagctcttccacatgaagaactgtctacatttatttatgtcttagtcagggtttgtattcctacacaaaacatcaagttggggaggaaagggtttatttagctaatacttccacatggctgctcatcaacaaaggaagtcagaacaggaactcacacagggcaggaacatggaggcaggagctgatgcagaggccatggagggtgctgcttattggcttgcttcccctgccttgctcagcttgctttttttaatagaactcaggaccaccagcccagggatgacaccaaccacaatgggctgggccctccccattttgatcactaattgagaaaatgccttacacccggatctcatggaggtatttcctcaactgagactcctatcttggtgataactccagtttgtgtcaaggtgacacacaaaaccagccagtacaactgacccgcttgtcaacttgacacacaaacacattacaagtaagcctcaacctttactttctgattcatccccaagatctaaacaactttaaaagtcccacagtctttacatattaaaatttccatccttttaaaatatccagtatctttaaaaattcaaagtcttgttacaactcaaagtctcttaactgtgggctccattaaaatactttcttacttcaagagggaaaaaaaaatcagggcacagtcacaatcaaaagcaaaatcaaactctaaccatccaatgtctgcgatccactcaccatcttctgggtccctccaagggcttgtgtcacttctccagctctgccctttgtagcacacaccttgtcttctaggttccagatgcctgtagtccactgctgctgttgttcttggtggtcatctcacggtactggcatctctaaaacactgctatcttctgttgcaactgggcttcactttcacaaatagtctctcataggctcttttcatgttgctaggcctcaacttctctgcatgacccctttcagtcctggaccttcaactgccactgaggcttcaccttcgccaatggcctctcctggcttctcaccgtgccaagcatcagctgctaccccttcatgtttcaaagccagtaccacctgggtgactcattcataaacaaatctggctgccaacaagaggcacgaccatggctgcctcttgaacacagcttctctgtgctctcaggaaacacttcccagaagatttcaccttagtattgttggtctcttcttaatcaccgctaatttcttagctccagctaaccagcaccaatggtcccagtaatgcaaagagttcactttgctttagttgttctggtatcttgttaatcacagctgattcttcagcctcagctaaccaaaaccacagaattttcacaatcaatatagcaatggatctgataagaatctttattcttccctctgaaatttcacaagacagccctccatcatttgcactgttctcaacattatcttccaagctcctacagaacatcccccagagctcttaatacccagtggttcttctagcccaaaattccaaagtccttccacagtcctctcaaaaacatggtcaggttgtcataggaatatctcactatgctggtaccaatttgccttagccagggcttgtattcatgcataaaacatcccgaccaaaaagcaagttagggagggaagtgtttatacatcttacacttccatattgctgttcatcactaaaggaagtcagaacaagaactcacacagggcaggaacatggaggcaggagctgatgcagaggccatggagggtgctgcttactgggttgcctcccattgcttgctcagcttgctttcttatagaacccagaatcaccagcccaaggatggcactactgaccaccagcccagggatggcactacctacaatgggctgggccctccccctttgaacactaattgagaagatgccttacagttcaatctcatggaggcacttcctcaactgaggctcctatctctgtgataactccagcttgtgtcaagttgacacaaaaccagccaatatagattatacaatggactttggagaaagccatcattttcttctcaacaagttaaaaccaaatgtaatatgtgtttccatgatggtgcctggggaaattttaattgtagcctgaattctagatctcaatagttttaagtgaaactgtcaaaataaatagaaacatgggacatttctgagctcacagagcttctaggacactttggttcctagggtagctaatctagtgcttttcattggcatttgatctttcacctgtctctttaaaacaagccaacttcatacagctttgaatgtgtactgttaagttgtaaggggtagtaaaggggacaaagaaaatcctccaaagagtaattcctcttctgctaccatctcctgacctccaagcaacaatggaaaggaaatagggctttccaaggtaatgcagccagcgagtggtcaagttcataagaatccataagggggagagggaaggctagtttatatccttgtcgggaagagaatcaaacttttttgaaatatgtaatagataactcaaagttgactcttcaggcagaatggaattaatgtgagggctttcgaaagcaatgggaagattaatgagttttaatcaaacacgatctctttatttcagttttagaacatctattatagactttactgtaaatgttacctagagactgaaaggccagttattggttcccataacccaagcaagaaaaggccccctgacaccagttaaagaagattcttcaggagccaccaaacatgcaacagtgaagtcagtttctctcccagggcctgactgaaatcagaattcttccctgaagtccacatatttgggaacctatctctaataagattttccaacaccattggctcttatccagcaaccaagatatataatttagaaaagtcaacttgggtttacactccagaaaacagaagtagatgtagcaaagactgggaatgagtgtgaggtagggtagaacaaatctgtgagtttatgcctgatgctcagcacctctaagaaagttctcagaacatcaggccctgaaacaatgctgtatcctactggatgagtccccagatattttaattctaaatgcctttggtaggacttaggaatgtgtaattcactacaataaacagtcttgtgagaagagaaagagtgtgtgtgtgttcaaaggaacacaagtgtacacgtatgtatgtctatgatgcgtgtgcttctgtagctttttttttttttttgacccagtagggtttgtgggtaagtgactttccaaaatcatgggtaactaccagggctctttctttcagtggatgtaaattcctttgtaaacatcacttgtcatccaccaagatctcaagagtcctttgtcttctgggaaataaagggaatgtttttggataggcagaaggaaattggtcttgtttcatatctcttagggaacaaggggcttcaaccaattctcagctaaagtacaatctatggagctctcatatctgtgaatcttggtggtttcccataaaatgacattacaacttgagacacgtggtccgcattgaaatcttgactccacaggttccttccaccaacctgtcagagattaggattattgtccatcactgccccaggcttctgcttcctctttcccctttcctttaaaacattttaaaattatgtctatttattctggaggagggcatatgccatggagtgtatgtggtgggtggagaacaacctcacacagtcaattctctccttctaccatgactttcctgaggatcaaactcaagttgttagactcagaagcaatttcctttaccctctaagccatcttgccaggcccccactctttcttagccataagtcgctgatgccctctcctcacttcagagcatccctaacagtctaagcaagctcgcaaatattcttctttgtgaaaatggctctaaagttcccagggacagatgaagaaatttcatttttttttaaatcaacacttagactggctgaatggcccggacttccaagcaagaattcatatgccaaaagtttttacaaaattctgtgtaaagtctagaagcgttcacatggggctttctgtctagccaacaccaagaggttaagtaatcaaagaccaaccagccctgccatctgtgaaaatatgatgggctattttcacagctggagataacaatgatggcaggacaaaaatatttcagataattaagagcaagagtgtggcaggttgggggtttgggaaagatccctacccatttgacaactgtgctcttggaaatgggtagtgctgatgtcacggcaagcatgtttaaaagtttatggaacattgcaaaacaagagaaaaaactagcgtgtaaatgatgagatatatgcatggcatcattaccgttcttttgccagtattggttgtccaggtcactatcagatgctctgtttgcctctgtgaataatattcatgttcttcaaaagaatatgaggctaggagttgaggtgctctgagcacaacaaaatgattctaaatttttaaagctggatgaatcacgcttgtagactgttctgtcttggaaaaccactgattggcagtccccatgtttgcttttatatgtcgagggctcccatcgacctcaaatagatgcaaatcacttcaacctgtcactgtgttattttgttcatcctaaaagtttgggagagtcttccaagcttccaaaatttctctcgactcagtgagaaggaaaattcagaacacagagtttgaatgttctgcccagatttgtcacacactctaagaccgagtggaagagaacaatgccctttcttactaaccctgtgaactcaccaccagtccattgaactgacaccagaagacttttcagagcctcaggtctctcaaggacactgtgatacaaattcacacacacacacacacacacacacacacacacacacacacacacacacacacacattaggtcaacattagcctaagccagttggaacaatggctcgggaaaagcatggggaagaagaacatcaaaacaggtcctcaggtgagatgtgcaaacatcagttgcattagcagagtctggtattgcccttttgaaatgtcgcattgaaacccttttagaaattccaaaatcaaccacctccggggacgatagtatggcttagttaggctaatttgtcaccatcaccaccattgttgttatttttgtcattgttgtcattgttattgaatttatcacaaataaaaatacctaagcaacttgtccataaaacctaatctaaacaaccttgaacctgcaggattttgtaacatctttccagactgttaaagacaatataaatattttctgcctgcttagcccccaaaaaatttcttcagtattttcttcttcttttatttccctctagcctttaaaaccatttaccaggagtttcttacatcacaggaaggtatgctggaaatcaaatcaagtggctatttgcagagtgagagagttgctaaattaggctgggctaaatcagaaaataaagggaagaagaatgcaagttccttgactcctgagatgcctacttatttatcagacatttatttgttacttattcatttgttattatgtattaaaagagcaaaggatgaaagagctatgggcatgctatcccaacatttgagggtactctgcaaacccaggaggtagctaatttggcccataatcagcagtaaaagaggtggcattctagcatggaaaatactctggtagtaggaactgttaaacactagataataagaatagctaccagttattcaatgcttaccctatgccactggctttagtgaataaccttgccataagcctacataggaaatgctatcattttccctgctatggagataagaaaataaactgagaaaggctaaatgtcttgtcaaaatcttgctctcatttgtccaagtcaggatacacacccaagatggatcccatttggccaagtcaggatacacacccaagatggatcccaacatgttaaccaggctccccactattccattcacttcttagttaacacagattgtgccacagtcatcagcgtaagttctgagacaggagagggtcattctatattgctttgtgaacacaacaagtggccatacaatgcttactgttgacctaaactctaccccattgtttctgcagaaaatttaagtcagtataaatgagaagccacatttgctattggcttttgtttctcaaacaccctgcttgagtttagggaggatacggagataaaagaaatatgtccccccagcctcagggagcttccctttaagtggggagataaacatgttcaaaatttactctaaaacatgtcagtattcttacaaaagtcggcacaccaaggttgcacacaagccagactagaatagcattgctaagggccaagttcacagagtggatctgaaccaactgtctctgatatggagcctccatgcacacaatggtagctatctccctgtgctaaataaaagtactaaagttaaagcaaccaatcaaatggcttggtgacatcagtgcttttaccccaactctttcaagttatagaagaggaaactgaggccagaacaagtcagtgactgtctaaagtcacataactcttgtgaggtagggaatctgcgatcaaacctagacatggaagcccatggcttctgggaaaacaagcaagacttgataagaatatgtacctatatcaaagaaaatagtttagtaatttgggaaaaccatcaaatagcaacaatacctgatcccaagagaagaagagttagaaaggagctcgggtaggactgtctgagattaatatcaggtgttaagggcagtgtaacaaccatagggggagtctttaagacaacgttggccactgaagatgtatattttctaagagtgtgtccagtctttgtattcccactacattcagacacagcttaggtgaagagtcagcctggaacaatagaaatgttcaaaggaagaagtcatagggatggagaggagtaactagagattcccatcagattaaaggaggaagaaagccgtgctaggaagacagccagaggctaggcaaactaaaatcatgtacacacgtgtgtgtgcctcgctcctaaagagtcaaccatacacaataggagtatgggtctttcgaactatcctaacactcagcttggctaccaagaaggaaaggccaactggagtgtcctggaatttgaacttggaattccttgaagtcaaaagatgtcaaagctggtagcaagacatctgaatcatcccgcacagtgccagtgctgtgtgttccaatcagaaaaaacaaaaacaaaaaacaacaacaacaacaaaacctacagcatatccttttcaacaagtgaagagttgctgtctgtgccacctgtcaatcatccactgttctttcttcttctatttgtccttctatggagaaggtcactgctgagttagtactttgttctgtaaataagatgctaatgttctatgccagacattatttccccagcattttttataggatgccaggcccttcatagactatgccctacaatacttaacttgtttgcagtgggtggaagatggaaacacagtctattgaaactatcaaggcttccttcctgaagtttattaaagagtctatcatctttcttttatatcctttcccctaggcaaaccccgacccaaaaaaataggcatggtgaaaaaaataagaaataataatatccaaggagatagctcttgctaactggaagtgctacatttctagatctctataaacaaccatgcgaatgtagccaagctgacattgtggtcaggaaggacacccaccctgttatcttacagtcctctacccgagacatcatgccttcattcataaaccagcaggggaggtggacagctgatgacatcatgagctaccactgttagatctttgagacttttgagatctttgaggtttttttttttttcttttttcttatctctttggagtggtgagtagcagagtaactaacaggtcacctccagaatcagaaagcacttccataaatctaaaccagaagcccagcttaactgtaataagaaatgtcaaatgatcatgatgccagtgcccatcctgtgtaatagtgtgggataaacaagaaagcttaagcagaagccatggatgacgtaacccttagcatgtgatggatgcttcagtgatgattactgtcattgcttctcttgactctaacaatcaccttagaggaatctaacggttcctctgcggccttaggcacgtcagtaaatcttagcaagcctcagtctggaaatggagtggacacaaataaggtcaccttgccaaaatggatgtgaggagctggtgagagaattcactcaaccataaagcctcagcaggtgtcgaatgagattcttgtgacatttgttagtaacctctgatgaccttcactctcaaagagtctaggggtaacttttcaggggaaagtgtgagagccgtggaagagagtaaacggcctccgttacagattaatcccttccccagctcattccttaataagctggttagcccttctttcaaaagggttggtttctttcatcaaccccagagagctggagaactggcatttttcttttaaatcttaccttctctggtgtcaattggaaataatatttactcactactgttttcctttcaaaaaaatctgtctagttgcacactagaaacagtttcagctggtttgtttgtcttggacaagctgctgaagtgagaaaaaaaaagtttttgcttggctgcatgtgaaactgtttcataaccgttcaataagtgcattgaaggtgggtgccagctccgaggagcgctgctcctaaaggacctccacttgtagactattgtcaagggtaaccagcataattaaattaagacaatgagaaaagcaacagatgcaactgagaccaagtccctgagtgcttttgttagtcactatcattgtctgcaacaaagaagtcacatgtgagagactgggaagggagccaagtgcaaactagactgcacagctggttttaaatgggttctctgagcctgtgtgcctggaagcatgctacttagagcagtggatgaggtgggtgagcttcgatccaccccccaccccctcaccccaccttgtcctcccgcccccgtcccccctggaggaggctgagtcagacccatgggataaccactaggggacacttcggctcaaccgcaccctgcctatcttctactttcagagaaaagaaaggcccagaagataaagatctgtaaaatggccaatcgaacctcatctctccactttcagctgctgcacaacc

SEQ ID NO: 52 - DNA, 78660 bp, Mus musculus
ggttgtgcagcagctgaaagtggagagatgaggttcgattggccattttacagatctttatcttctgggcctttcttttctctgaaagtagaagataggcagggtgcggttgagccgaagtgtcccctagtggttatcccatgggtctgactcagcctcctccaggggggacgggggcgggaggacaaggtggggtgagggggtggggggtggatcgaagctcacccacctcatccactgctctaagtagcatgcttccaggcacacaggctcagagaacccatttaaaaccagctgtgcagtctagtttgcacttggctcccttcccagtctctcacatgtgacttctttgttgcagacaatgatagtgactaacaaaagcactcagggacttggtctcagttgcatctgttgcttttctcattgtcttaatttaattatgctggttacccttgacaatagtctacaagtggaggtcctttaggagcagcgctcctcggagctggcacccaccttcaatgcacttattgaacggttatgaaacagtttcacatgcagccaagcaaaaactttttttttctcacttcagcagcttgtccaagacaaacaaaccagctgaaactgtttctagtgtgcaactagacagatttttttgaaaggaaaacagtagtgagtaaatattatttccaattgacaccagagaaggtaagatttaaaagaaaaatgccagttctccagctctctggggttgatgaaagaaaccaacccttttgaaagaagggctaaccagcttattaaggaatgagctggggaagggattaatctgtaacggaggccgtttactctcttccacggctctcacactttcccctgaaaagttacccctagactctttgagagtgaaggtcatcagaggttactaacaaatgtcacaagaatctcattcgacacctgctgaggctttatggttgagtgaattctctcaccagctcctcacatccattttggcaaggtgaccttatttgtgtccactccatttccagactgaggcttgctaagatttactgacgtgcctaaggccgcagaggaaccgttagattcctctaaggtgattgttagagtcaagagaagcaatgacagtaatcatcactgaagcatccatcacatgctaagggttacgtcatccatggcttctgcttaagctttcttgtttatcccacactattacacaggatgggcactggcatcatgatcatttgacatttcttattacagttaagctgggcttctggtttagatttatggaagtgctttctgattctggaggtgacctgttagttactctgctactcaccactccaaagagataagaaaaaagaaaaaaaaaaaaacctcaaagatctcaaaagtctcaaagatctaacagtggtagctcatgatgtcatcagctgtccacctcccctgctggtttatgaatgaaggcatgatgtctcgggtagaggactgtaagataacagggtgggtgtccttcctgaccacaatgtcagcttggctacattcgcatggttgtttatagagatctagaaatgtagcacttccagttagcaagagctatctccttggatattattatttcttatttttttcaccatgcctatttttttgggtcggggtttgcctaggggaaaggatataaaagaaagatgatagactctttaataaacttcaggaaggaagccttgatagtttcaatagactgtgtttccatcttccacccactgcaaacaagttaagtattgtagggcatagtctatgaagggcctggcatcctataaaaaatgctggggaaataatgtctggcatagaacattagcatcttatttacagaacaaagtactaactcagcagtgaccttctccatagaaggacaaatagaagaagaaagaacagtggatgattgacaggtggcacagacagcaactcttcacttgttgaaaaggatatgctgtaggttttgttgttgttgttgttttttgtttttgttttttctgattggaacacacagcactggcactgtgcgggatgattcagatgtcttgctaccagctttgacatcttttgacttcaaggaattccaagttcaaattccaggacactccagttggcctttccttcttggtagccaagctgagtgttaggatagttcgaaagacccatactcctattgtgtatggttgactctttaggagcgaggcacacacacgtgtgtacatgattttagtttgcctagcctctggctgtcttcctagcacggctttcttcctcctttaatctgatgggaatctctagttactcctctccatccctatgacttcttcctttgaacatttctattgttccaggctgactcttcacctaagctgtgtctgaatgtagtgggaatacaaagactggacacactcttagaaaatatacatcttcagtggccaacgttgtcttaaagactccccctatggttgttacactgcccttaacacctgatattaatctcagacagtcctacccgagctcctttctaactcttcttctcttgggatcaggtattgttgctatttgatggttttcccaaattactaaactattttctttgatataggtacatattcttatcaagtcttgcttgttttcccagaagccatgggcttccatgtctaggtttgatcgcagattccctacctcacaagagttatgtgactttagacagtcactgacttgttctggcctcagtttcctcttctataacttgaaagagttggggtaaaagcactgatgtcaccaagccatttgattggttgctttaactttagtacttttatttagcacagggagatagctaccattgtgtgcatggaggctccatatcagagacagttggttcagatccactctgtgaacttggcccttagcaatgctattctagtctggcttgtgtgcaaccttggtgtgccgacttttgtaagaatactgacatgttttagagtaaattttgaacatgtttatctccccacttaaagggaagctccctgaggctggggggacatatttcttttatctccgtatcctccctaaactcaagcagggtgtttgagaaacaaaagccaatagcaaatgtggcttctcatttatactgacttaaattttctgcagaaacaatggggtagagtttaggtcaacagtaagcattgtatggccacttgttgtgttcacaaagcaatatagaatgaccctctcctgtctcagaacttacgctgatgactgtggcacaatctgtgttaactaagaagtgaatggaatagtggggagcctggttaacatgttgggatccatcttgggtgtgtatcctgacttggccaaatgggatccatcttgggtgtgtatcctgacttggacaaatgagagcaagattttgacaagacatttagcctttctcagtttattttcttatctccatagcagggaaaatgatagcatttcctatgtaggcttatggcaaggttattcactaaagccagtggcatagggtaagcattgaataactggtagctattcttattatctagtgtttaacagttcctactaccagagtattttccatgctagaatgccacctcttttactgctgattatgggccaaattagctacctcctgggtttgcagagtaccctcaaatgttgggatagcatgcccatagctctttcatcctttgctcttttaatacataataacaaatgaataagtaacaaataaatgtctgataaataagtaggcatctcaggagtcaaggaacttgcattcttcttccctttattttctgatttagcccagcctaatttagcaactctctcactctgcaaatagccacttgatttgatttccagcataccttcctgtgatgtaagaaactcctggtaaatggttttaaaggctagagggaaataaaagaagaagaaaatactgaagaaattttttgggggctaagcaggcagaaaatatttatattgtctttaacagtctggaaagatgttacaaaatcctgcaggttcaaggttgtttagattaggttttatggacaagttgcttaggtatttttatttgtgataaattcaataacaatgacaacaatgacaaaaataacaacaatggtggtgatggtgacaaattagcctaactaagccatactatcgtccccggaggtggttgattttggaatttctaaaagggtttcaatgcgacatttcaaaagggcaataccagactctgctaatgcaactgatgtttgcacatctcacctgaggacctgttttgatgttcttcttccccatgcttttcccgagccattgttccaactggcttaggctaatgttgacctaatgtgtgtgtgtgtgtgtgtgtgtgtgtgtgtgtgtgtgtgtgtgtgtgtgtgtgtgaatttgtatcacagtgtccttgagagacctgaggctctgaaaagtcttctggtgtcagttcaatggactggtggtgagttcacagggttagtaagaaagggcattgttctcttccactcggtcttagagtgtgtgacaaatctgggcagaacattcaaactctgtgttctgaattttccttctcactgagtcgagagaaattttggaagcttggaagactctcccaaacttttaggatgaacaaaataacacagtgacaggttgaagtgatttgcatctatttgaggtcgatgggagccctcgacatataaaagcaaacatggggactgccaatcagtggttttccaagacagaacagtctacaagcgtgattcatccagctttaaaaatttagaatcattttgttgtgctcagagcacctcaactcctagcctcatattcttttgaagaacatgaatattattcacagaggcaaacagagcatctgatagtgacctggacaaccaatactggcaaaagaacggtaatgatgccatgcatatatctcatcatttacacgctagttttttctcttgttttgcaatgttccataaacttttaaacatgcttgccgtgacatcagcactacccatttccaagagcacagttgtcaaatgggtagggatctttcccaaacccccaacctgccacactcttgctcttaattatctgaaatatttttgtcctgccatcattgttatctccagctgtgaaaatagcccatcatattttcacagatggcagggctggttggtctttgattacttaacctcttggtgttggctagacagaaagccccatgtgaacgcttctagactttacacagaattttgtaaaaacttttggcatatgaattcttgcttggaagtccgggccattcagccagtctaagtgttgatttaaaaaaaaatgaaatttcttcatctgtccctgggaactttagagccattttcacaaagaagaatatttgcgagcttgcttagactgttagggatgctctgaagtgaggagagggcatcagcgacttatggctaagaaagagtgggggcctggcaagatggcttagagggtaaaggaaattgcttctgagtctaacaacttgagtttgatcctcaggaaagtcatggtagaaggagagaattgactgtgtgaggttgttctccacccaccacatacactccatggcatatgccctcctccagaataaatagacataattttaaaatgttttaaaggaaaggggaaagaggaagcagaagcctggggcagtgatggacaataatcctaatctctgacaggttggtggaaggaacctgtggagtcaagatttcaatgcggaccacgtgtctcaagttgtaatgtcattttatgggaaaccaccaagattcacagatatgagagctccatagattgtactttagctgagaattggttgaagccccttgttccctaagagatatgaaacaagaccaatttccttctgcctatccaaaaacattccctttatttcccagaagacaaaggactcttgagatcttggtggatgacaagtgatgtttacaaaggaatttacatccactgaaagaaagagccctggtagttacccatgattttggaaagtcacttacccacaaaccctactgggtcaaaaaaaaaaaaaaagctacagaagcacacgcatcatagacatacatacgtgtacacttgtgttcctttgaacacacacacactctttctcttctcacaagactgtttattgtagtgaattacacattcctaagtcctaccaaaggcatttagaattaaaatatctggggactcatccagtaggatacagcattgtttcagggcctgatgttctgagaactttcttagaggtgctgagcatcaggcataaactcacagatttgttctaccctacctcacactcattcccagtctttgctacatctacttctgttttctggagtgtaaacccaagttgacttttctaaattatatatcttggttgctggataagagccaatggtgttggaaaatcttattagagataggttcccaaatatgtggacttcagggaagaattctgatttcagtcaggccctgggagagaaactgacttcactgttgcatgtttggtggctcctgaagaatcttctttaactggtgtcagggggccttttcttgcttgggttatgggaaccaataactggcctttcagtctctaggtaacatttacagtaaagtctataatagatgttctaaaactgaaataaagagatcgtgtttgattaaaactcattaatcttcccattgctttcgaaagccctcacattaattccattctgcctgaagagtcaactttgagttatctattacatatttcaaaaaagtttgattctcttcccgacaaggatataaactagccttccctctcccccttatggattcttatgaacttgaccactcgctggctgcattaccttggaaagccctatttcctttccattgttgcttggaggtcaggagatggtagcagaagaggaattactctttggaggattttctttgtcccctttactaccccttacaacttaacagtacacattcaaagctgtatgaagttggcttgttttaaagagacaggtgaaagatcaaatgccaatgaaaagcactagattagctaccctaggaaccaaagtgtcctagaagctctgtgagctcagaaatgtcccatgtttctatttattttgacagtttcacttaaaactattgagatctagaattcaggctacaattaaaatttccccaggcaccatcatggaaacacatattacatttggttttaacttgttgagaagaaaatgatggctttctccaaagtccattgtataatctatattggctggttttgtgtcaacttgacacaagctggagttatcacagagataggagcctcagttgaggaagtgcctccatgagattgaactgtaaggcatcttctcaattagtgttcaaagggggagggcccagcccattgtaggtagtgccatccctgggctggtggtcagtagtgccatccttgggctggtgattctgggttctataagaaagcaagctgagcaagcaatgggaggcaacccagtaagcagcaccctccatggcctctgcatcagctcctgcctccatgttcctgccctgtgtgagttcttgttctgacttcctttagtgatgaacagcaatatggaagtgtaagatgtataaacacttccctccctaacttgctttttggtcgggatgttttatgcatgaatacaagccctggctaaggcaaattggtaccagcatagtgagatattcctatgacaacctgaccatgtttttgagaggactgtggaaggactttggaattttgggctagaagaaccactgggtattaagagctctgggggatgttctgtaggagcttggaagataatgttgagaacagtgcaaatgatggagggctgtcttgtgaaatttcagagggaagaataaagattcttatcagatccattgctatattgattgtgaaaattctgtggttttggttagctgaggctgaagaatcagctgtgattaacaagataccagaacaactaaagcaaagtgaactctttgcattactgggaccattggtgctggttagctggagctaagaaattagcggtgattaagaagagaccaacaatactaaggtgaaatcttctgggaagtgtttcctgagagcacagagaagctgtgttcaagaggcagccatggtcgtgcctcttgttggcagccagatttgtttatgaatgagtcacccaggtggtactggctttgaaacatgaaggggtagcagctgatgcttggcacggtgagaagccaggagaggccattggcgaaggtgaagcctcagtggcagttgaaggtccaggactgaaaggggtcatgcagagaagttgaggcctagcaacatgaaaagagcctatgagagactatttgtgaaagtgaagcccagttgcaacagaagatagcagtgttttagagatgccagtaccgtgagatgaccaccaagaacaacagcagcagtggactacaggcatctggaacctagaagacaaggtgtgtgctacaaagggcagagctggagaagtgacacaagcccttggagggacccagaagatggtgagtggatcgcagacattggatggttagagtttgattttgcttttgattgtgactgtgccctgatttttttttccctcttgaagtaagaaagtattttaatggagcccacagttaagagactttgagttgtaacaagactttgaatttttaaagatactggatattttaaaaggatggaaattttaatatgtaaagactgtgggacttttaaagttgtttagatcttggggatgaatcagaaagtaaaggttgaggcttacttgtaatgtgtttgtgtgtcaagttgacaagcgggtcagttgtactggctggttttgtgtgtcaccttgacacaaactggagttatcaccaagataggagtctcagttgaggaaatacctccatgagatccgggtgtaaggcattttctcaattagtgatcaaaatggggagggcccagcccattgtggttggtgtcatccctgggctggtggtcctgagttctattaaaaaaagcaagctgagcaaggcaggggaagcaagccaataagcagcaccctccatggcctctgcatcagctcctgcctccatgttcctgccctgtgtgagttcctgttctgacttcctttgttgatgagcagccatgtggaagtattagctaaataaaccctttcctccccaacttgatgttttgtgtaggaatacaaaccctgactaagacataaataaatgtagacagttcttcatgtggaagagctggctaaccattttaattggaattagtcacagaatcaggtattctacaggttgggagtaatcttagactactaagatctcttctgttgtatgtacgagaatatgcacattgctggaactgttgtcaaatgttggcttgacattattggcaatatgagacacttctacttcaggagacttttctattgctccaatatccagaagcatggcaatactagctagtagttcaatagtgcttatattatgtgccagcattatttagagtaatctatgtgtatgtacaataaacacacatatataaatatatatacaaatatagatatgcctaaatatacttttgatatatcctcacaacagtatgagatagattcagttgtcggcatgtttgagagaagatatgtaggcatactaaggattgcttttaaatggttaaaacctacttcataaagaaatgtattccaatacacagtctagggctatgagaacttactttaactagaaagtcccatcactttaagtttcctttgaatgaagtttataattaagtacaaccacccaattttttccataggacatagattctgaattcttttgttgaactgtgctttcctcaagagctgtctgagtctgaaggctcaggctacagtggcattagtgacagcttttgcctgagtctgtccctaaattgttctgacttaataaaacacagcttctcctgataacctaggtaaagataatctttttgcagtgataatggaagtaaacttgctttcattgggagttttgacacagactgctaattgaatcttcaaccctatcttgagctctgaacacctttgtaatattgaggacatccaagattttcagtgagccacggagaagttataatcctggagtaggaaaaaaaaaaaaggaactggaaggactaggccgaaagatgcttctttatactgggtcttcgaagtagatgatgtagatgaaatgtctcacttgtggctttcagtcattttaccaccccaaagggtcatttcttctgtcttctatactctcttgttgtgtggggattcaaatttagataatctcgaggttttgctttctgccccatgacaatcttgcttgtagtgattgcaaaggtcactaagacccaccttcttctgggagttgattgccaccttccccagaaaattcagcactcttgatagcacttgcaagctgtcttctggcagacaaatattaaatccccatgtccaattctgtgcccttcttctctttttactcggttcacttgatagttgtgacttggtgcccagaagaagcttagaaaccaattagagatctcacctatgtccagatcccagtatcccagtctttaaaataaagaggcagaattgaaaggcttccaaggcctttaccaccactaacagcttaagagtcttctaacgaagaatctcataagatttgagacctcagaatctagctctgtgtacatgtgtgtgtgcgtgtgcctgtgtgtgtgtgtgtgcgtgtgtgcctgtgtgtgtgtgtgtgcctgtgtgtgtgtgcctgtgtgtgtgtgtgtgtgcgtgcatgtgcctgtgtgtgtgtgtgtgtgtgcgcgtgcatgtgcctgtgtgtgtgtgtgtgcgtgcatgtgcctatgtgtgcgtgtgcctgtgtgtgtgcctgtgtgtgtgtgtgcatgtgtgtgtgcctgtgtgtgtgtgtgtgtgtgcctgtctgtgtgtgcctgtgtctgtgtgtgtgtgtgtgcctgtgtgtgtgtgtgtgtgacagagagagagagagagagagagagagagagagagagagagagagagagaactaaatgatataatatagtttgatgttcattattatggattaactgctatcctctaccccaaaattcatgtttaaggttctaattcctagcacctcaaaaatagagtctgtattaaggtcatcaaattaaaatgaggtcattagggcgaaccccactcccgtcttaatgatattctaatgaaaacacaatatatagacactgagatacctacagagggaagattgtatggacacaggcaggagacctccaaggaactgataccttgagtgaggacttccactctctagaactatgaggggaaaatgtgtctgtgggttaagccatttagtctgtggtgttatagcagccatggtgaactaatatgtctttgtgtctgataccacagtacaaaataaaagttcagtgatctttttaaaagttacctcacaggcctttttgtaaatacccgatgttctttggcctataccctggacttgaccaagaagcagaaccaccggtgaaattcaggacagaaatctgggaacttcaatgacacaatacagcattgctgcgaatttatggttaatatttaactctgaacatatattgacatgggcaattcttctataaaagatttgtataaaatttggaatgcaggctgaagatgcaatctttgttttgcatagttttttttttttttttttactctgatttatatttttaagaaggggagggaaggtcttggtggcatgtttttaatggttgttattgttgttgatgttccatcctggtcacttgtcactttctgaggtgttacacttccccgtaccattcttcccatgtgtaagtgccgtatcccagaggaggactttcttacttccgtcacagacattatctagcttagtgaggactgccttgcttcagctcctctgcggctttcctgggctcctgtctgctccttcttcatccctgttcccgcacgtccttcatccctgttcccgcatgtccctctttgcctgcttgctcacagttcctagcccagtcttttttctctgggacctctgattttccgagttgcctccgttacctcctcctgttccccttctgggtgtgtctttggctcacctttccttctcctttgcagcttcgttttcttgtttgtcgatagggacggggactgcaaacatcacaaaaataattgcattgagaacgggtggctcctgtgctgaagacggtctttgaatctgcccagaatgcctgggctccataggaaacagaagctagctttactgctggagagggttctacacctcaggcaccagagccgaggtgcccgagctttgcgccttatctctaatacccacttcctcttcagctagaaggaacactccttttcccttaatttgcacagtgatatcctttctgactcttgtgcccaccgtatcctgtctatctcaagtcctaaacagtcccctcaaatcctttcaggagactcattggggtgatgtctccactaagaccccagggtcctctttcagcctcggctttagcttaggatcaggaagcagcaaaggtgtcagagtgaacgtttgagtctcttatcttgtgctttctgcacaatgtttgtttagtttcaatgatagaatttatgtgttcacttttttaaaaaatgcctcaaaacacctaagagagggcttttacttctttctttcttccttcctcccttcctctctccctccctccctccctcctttccttccgtccttcctttccctctttctttctctccctatttctttccctctttctgtctctctctctttctctctctctctctctttctttctttcctttctttctctctttctctcattctttctctctttctttctctttctattttatcttctctttatttctatataaaaactatgattctacttagactctaatatattcattcattcattcattcattcattcattttataagtgtatcaagtagccaacatgtgtcagatgttttacctgtttcttatggcacagatggtcttcctggggttgcgttataataaaggcttggacaaaggatgccttgtgttttgatcatcagaaacatctaaacattcctacagctaaaccaagtatgtctagtttcaatgcatttctctttaatttataattgctgctgagaatttcaaataggtcccactaaggagtctgtatttggaccattgtagaattccaggacttgtaacttttgatattagatacaattatgacagacgatgttaatccttgtctaacagttacttggtgcaggcattccacttgtacatggtctccatcttagcgtatatcaccttaccaaattctggcagcctagacttgctgtcctatttggccaaccggcctcattgggcaatttgagttttcacaggtttagtcctggctttctaccaccttccaagtgtcagattgtccaggggagtggaaaagataattcagagtagaaagtaattggaagggtgcacccataagccatcttattggtagaattggaactttgtgacctatcactcaggagacataggatttccatttgcccccctccccctgcatcacatataacagaccgttcaagaatgactgcatttcacccactcgatcgtaccttctgagtcttgggcatgtcagtgtggcgctgggcacggatagagcgggctgcttttgtaggcttcagtggggcacagtacatctccagtctcctcagatcacagctccggaagcaacactcatccacaatgcctgtctgaggtgccctccgaatgctggagccatagcctgtgggcttgtctgcacaaatcagaatgggctggtgttagaactgcctatttttcaaagacttttatctatcctctgatgcctttcttcttcccacatcaagtctacatacttctccaacatgtcactcttttctttaagtatttccaatatgcctgacccagtactttcttttagattcccatatgtaagcatactcaagaagtaagacttcacttgtcatgcactttatttgtatgaagtcttcccatgttttcagtctgtgttccaggatcctgcctatgcccagtcctatcacctttctttttattgtcttagttgagaggcttttaacagttctagttaaaataaaatcatagaccaagttttttaaaatgttgcaaacatattgttctattgttaaattgacaaggcaattgtaatattgggagggtacagtatgatgcatactgtttaataatcaactgaaggtatttaggttgctcatcatctcaaatttttgagcaagagcccccttggatgcatggtgctgggacactggatctttccaatcactttagtaaatgcctacagtttcagacttgggcagctcagctgctcttttatcttctatttctcttgtaaattaaatttcatttaagcaaagttggaagtcaaaacatatatcttccttttattggtgagataactgagactcagagtttgaagtaattggtggagttgggcttcaaactctgatctttctgctgttaagcccaaggacttcatggagtccagaaaattctggggaataaccccagaaaagcagtgagagctctggaggtctccattgaattgtgtgataggcagtgacatatttcttgtcagaattgaggataagatgaaatgacgtattaaataaagtaatatatagcacttgctacagaagagatcttaacctcatattagtttgcttctcctgaggatcttttccaaggtcttaaatgacctataaaaaaataaccagcccattgttgctattgagcatatgcagaagcctggaaactcagaactgattacaatactagtggggaaggggcttgcctagttgccccagaaagcctggagcaacatgtatgtttcctatagaagaaactactggactaaggacaggcagagagctaagtggcagtgaaactgaggctatcaaacctattttgatatttgcacatcagttagacaccttaattggccaagtaggtattgagtcaatttgatcttggttttgaccatacgtttactggcgttgatgcagtactgtatggataacatttgatttgattcacaccaaatgtgaagctgtgttgttgtagatagggtcacaacattttggtctgttctcatcttctttacatcctttgggaggctggatgcttctcatctctcctttgccatgtaggcttttgtcagagagagagagagagagagagtcatacaccacgagaattcgattagtaacctgatatatgcttagtcttaattcccaacccaagaaggcatggcattaaataaagacttattatcacacaggtactgactgacacaatacttaagaatgggcatttgacaatcaaagtcttcatctatattttcagcttcctcactggggagatcaggaccatggcaatggcccacactcacattagcttggctgcttcactgctggagaggccaactgtttatggcgtcttctaagaacccaaatgttttcctgatgcttggcacaggagccttgttgctgcttcctcacacaaggaaggtttattctcagggcagctggaggtagtaacttactgagggttcatttgtggtctctttgggaaggaaaggtttctctttcttcctccctcccttcttactccccccaaccccctcagccgaccctgtgggctcctcatggttgtgggctttgggaggggccaggcggctggtctcagtggagtctcagcaacacttttactggccattggaggaaggactaacatagaattggactcagggcttttgtttgccattcaggccctggaaagttcaaactggctggtcccctgggcaatgtaaacaatgttttttgttttcctgacttttttctttaataatcttttcctgggacaataaattagaggaaagacacaaatgggtgcacatggcttttgtaatccatgaaggacttctgcatagttttctaactggctaaccagttaagactagaggattcatttgggttctctttgcaggtaggggcaaaagagagaagaggcctattgcttttgctgtacctatcagaacaataccttcatgcaatgactgtcctttgtttgtagtacatgtttcttaaagagcctgatttcttaagaaactgattttttactccatcagttgttgattatggaatagttatttgatgtttaggattagggttgtaggagttcttccagaaacttctgaacttggccagttcagctataactgttttcacaactcaggcttatgaatttgaaatggagagaggtgggaggaggggggattcgaggacctatttaggacttccacttgaagcccttcttggctaatcttacttctgtgatccttgcttgctccgagaagaagataccagccattattttggcataaccaaaaacacttccatgtgatacttccaggtgactctcaacagccacgagaccatctcagaagatgaaatggacagtagtcatcactacagcagagaataacccacgtgctcagtgcctagcttgctgactctcacagaggaacttcgagtttggtgcagttcctctgtgctttccaggccacacactgatagggtttgaagcagagagctttaggatttttatataatgttcgattaagaactttggtcttatgtaacatctgtatctttttttttaagtgctattggagtggtaatatacacatgtggattttcccaggaatacaacaaccacttatattcattctagctaccacaattctagagggatatttgtctttgccaattcacaatgactacaatggactcgttgtactttattcaaaatttatgaatgtagcaaatgtttacctattgctgcttaaagcttaatccatcctttgaagtctcctataggcttgattttaacagccacctctcagcaactgagggaccacagttgtgggtcaaagtgtttggtttttcttcaaccacctcctattagtctttttaaaagaaccttaataaaactatttacggttgtggcctaaaatagaaaaactagtgtaatacagtttatcaggtaggcaatcaacaaatcttctcagcaccttttttgatataaatgagtatcttaatcacatctaaattacagaaaattttagtcatttgatcatttgactatttttgtaatgaggtggaactaggggtgacgttgttgcctttaaacactcctgttacatattttattctggttggttcaatcagaattatcaggtgaacagaaaataaaattgtcttaacataaaatgttttaaacaatttgttaccaaaaaataagtttaaaaaaagactttcttgaactataatgaagtctccactgtagaaagcagctaagcgatggctgtacaaatacctgttggtgaccttaggagcagaatcctatattgggaataagatgcctgctgtgatcttttctatgccagagattgtatagaaaatcttggatacttattcagcctagttgggaaacacttacattgtcttcaagaaagagctttaaatatgtttaaacttagaagatgaaatttgattatcgttcagttctccagaaagctcaaaactacttattgtcttttgccaatgcaatagtaaaagacaagtgactgggccagtgccttttacaatgggacacagtctgaggagtctctaaccttgtctatctgcttaattgtttgactgtgtaacactccacagataatttgctgacaaagacttaacactgaaacttatagtcgacatgcagctgggtcctcacgtgggtcccctaacaactggagcactggctgtctctgactctgttgccagcctttggatccctccccctaactgggccaccttgtctggcctcagtgtgagaggatgcatctggtcctgctgcaacttgatgtcccagggtgggcaggtacccaaaccgggcttctctttctctgaggagaagggcagggggcaatggaagaaaggacttgtgaaggtgggacttgaggagaggaggagggggaccacgaccaggatacaaagtgaataaaaagataaactaagaaaaaaaaggagaaaatgtataatagcatatttattttgtcagtagttttggttcagagattgtctagcatgtagaccaaagctttccagacaagctggccaccacttaacctagatttttgagtccactctgaggagacataatgttttgtcaaaactggggccaacagagagacttccaatggttaaacagatggcctctgtttagtagcacttccctttaaataatgcatggtcagtggagtaactcaagaatcttcagggcaaaacttgctagttacaagggttttgggcagaactgtggtatcatcaaaaccacaccaattagctgagtatcacattttgtcatggatgcaagcaactcactcccctccttctctgagagaagtgtgcacttctgagagttaactggggtcattgtttctagagggaagagttgtggccattaaccaggagtaaaactaagcctaccaacctacacacagctgtggttctcatcagtttctggaaatggacttgagatacagtaccttggttccctgggaaatttccccttctgattactgagaaagctctttaaactgtcattggaaggagaaaaaatattgatttggtgcatcaatatttaaataatgtcaaatgtaaacattttcaaattaggagcatacctagttttgaagatacatacttattcctttctgggttataaagtatacaacaattctctaaaaccattattaataggaggaagaagtaccaaagtagagtccttttttctttttacaaattaaatttagtgtttaaagttaaaaacaggatgaagaagcaagaaatttcaagttggggtttgggagcagtttctagaaatgtctcagtaacgtgtttaatagaaaatataaatgatattgttagataataaacaatttgcccttaacttttattagctgaagattgattacacaatgaaatatcacagttaggatctgtaggagccagaacctttgttttcttctgtaagttattattattattattgttgtagttgttgttgttgttgttgttaattttgctaatctctagattcactgacaatataggttaattcttcttaagtcagtattggtctttaagaaacttatctaatagaaataaattcagttgatatcaatttgcattgcatattagtaggaaagttttgaaaattatgttaagaagcaatattatagctgtccagtgaaatctcttttgttaccctgtggaccctatgcatgctgaacacacaatgcaccactgaactaagttacttgccctacatttgagcattttaatgtccttcctccttcacctccttccttgctctctccctccgtccttctctccttgcttccctccctgcctccttcctcccctcccttcttacttccctccctccttccactcctccttcccttccttcctcctctcctcctctcttccccttcctccctttctccctcactcctttttttttttttgtatccttcctccctttgtttcttggagacatgttttgtgacatagctcaggctggccttaaccttgaactcgggagctccaacccactgagtgctgggactgtaagtttaagctgcaactcctggaaacattttaattttcatttgtataaatgaaagttgctttccaatctttcctactctgatagctttatatggaaaactgacatctttcataattcccaatgtaaggaaaactatgataaaacattgtatggttggtatttcctgaatctatagcacttaacatttgatgtctttgagagtcaatattttattctctaaagactttatagaagtcttatttaaattaaataaattaataaggtatgcatggctgtatgcttagaaaaaaatgtagaaagagaattcattgctggacctatcattacttatttatgataacatgcatttgtacttacatacatgtattatagaataaagtgaatcataatcaatgttaatgtttttcaaattaggattatttggagaaggtttaaaatctgtatttacacataacacctgacagagccttctctagatagctgtgttcagtcctgcatgtctgtggaaggatctttccaaagcctgacctttggcatctgtaaaagtgcacactgagaaaatgttctctttttctgtgaactatgtgtcagaaacggtcctgacaacctatcagatttaggcatcgatttcacttttggcctatgttaatttttaattggcagtttttgctagtcccactacttctcagttggatgaggtcatctcttctaggaatcatgaccctatagtacccaccccatcccaccctaccacccagccttcctttcccattgactaaatccccataatgccaaagaccaaagtctccttgttacccaattatgtcaatgtttatgtatctcttggtctaaaatgaatgaaataaagcatcaggaggctgaccctttcttgacacatactctctctctctctctctctctctctctctctctctctctctcgcgagccccaactcaagggcaggtatgggaaggagactcttctcgtgccctttgtttcaaaggtcagagagtcaaagtgcaatacttaggggcaagagcaactgagattcaaagcagaaacattactgctttaagactctttagagaaatgggctgacagagtgggaagcaatgtgatgtattactttagcctgatataatgccctggaggaaacgcgtcttgccaggacagcagaatttactagtttggggcttattccaaggcttgaaggagatagatatagccaacaaaattatactttggcaagagaagtgcttccctgtacagaactgttgtcctgagggaacagtttggtttatcaatgtctaaggtgaaaggtaatcaaataccaagaggtcatttttatgttggaactatttcaactctatggccctctccacgtaagttagctaccattaaccagttaggcaatttattccatttgcaacacatgactgaatctgaggtcttccaataatgtctgtcacaccaatggtggaagcagaggaatgagtggttaaagcccagggtttggagtcagtctatttagatttttcctcttactcaactgtatgatgttgggatgggatcaaatctgagattcagatcttcatcagtagacttgctataccaagaatatctcctagaaattctgaaattattaagtagctctttgcctaatgactggtatgcagtaaactgcatacatattgactatctgtattattgggtcatgttgattaacatggtgattagggcaagattgtcttcctcacttcctgtttagattgcacccatcccacccctccccaaaggagagtctgtttgaaacaggttttcaagatagacgaggctttctgtgtttaggtaaataaataactgttcccttgaggggatagctaacgtttatgttgtgtaaaccaccctgacttgattggatcctccagccaggtctaataacatgatgccagatatgtgtatctttgcctattgctgcctttggttcatcccaagtgatctactagttacaaccattgcttttccatagccaactcacatcaaaacaacttgcaaggcatgagatgggtatgggctgaacacagggtcggagaggtcagcctcacacttgcagacactgttctttcctgtgactctcacctttcttttcacccttaagtttgcctttcctgtttcgatggtgaaggccatttggtgttatttatccctactaaggactatcaagcagggaagctcatgccatgctgagttcatggtaggctaggaattagatactagttccctccttaaataatcaaaaactagggattccttcctgccaggtctgctttgggaatgaatagtcaccaggcatccaggattaccagactgctaatcaccactctatcttggccttgagcctggctgaggtagaaactctaagagaaagaatgagacttggagctgaggaaccacatttttgaccctcagtgcccgccttctcctttctcttgccgaaacattgagacaaaagttgtcagagagtctggctccaatctggagataataaccttgctattggtattatctccttcacatacactgttattgttggttcctcttagctgtgataggagccttgtagtcaaaacacaagcattcatgattagagggcaatacctctctttctggtgccacagagagatgaatcagacacagagggtgaggggggtattaaaacacactatttttagtttcactccagagtctattgtttctctattctttttgcaatttggcacttgccctgggttctcaggggtcctgttccctgtcaatcttctctactcaggcttctgggttttttttttctgggggggggtgctcttttgtttgtttgctttttgtatgggcacatctggacattttctcagaggtgcctgtgacagggtcagtatggcaggtaaagaggtgatagctgccaaggaagtctggcatgtctgaagggagagccttgagaggtggaggccctgaaagacgggcatccaggtttgcaccagagaggaaactgttggaagacagccttcgcagcagcaggaacagctcttggcactatggcagaggaaaaggcagccagagtcaatgacagattgaaacacacgcagggagaggaaaggaggagggtgggcaggaggagacagtttgggtgttacacatcataaataacttcctgatgtgcactgagatgccagttgggttgtgtgcgacagtcctttcatgctggtatgtcaacactgctgttctctgattgaaagatcacggagagagtttctaaagcacccagtgctgagccatacacaaccaggggagagaaaggtgatggtatggtataccgagagcaacactggagctcagccttacagccttcacttgaaaaatgcaaatacagccttcgtgattcattcacatgagcaaaataaactcgggatagcatcaggcacccttagtgaagcctcaactcttcaaagtgttaggtgagctatgcttcccactttgtggctaaataatgtttacatatggtgcatgaatgcattctgaggtaagaagggtctgataggggaatctgaagttccttctctgattagttttagatacacgcaagtttcatcagctcaatttaaggacagttaagaccagtgttaggcttagccaaaaaaaaaaaaaaaaaaaaaaatgaagaaaatgtcaaattctgatgctccattaagggacaaaaccaggaatatttgtggggacttcagaggctactagaggtagggttctagtataagttagaaggagaataggagagaactcaccagaaagttatttgttggagacaacatgaagaaactaactacatattgctaaccaagatgttaacaaagaggagtgcttcttattacattgggatttgcaaatgagtcttggtataaaaaagagtgcttgcaaaacgtccctgaaatttttgaaagctttgttgtattttatgtgtatgaacactttacctgcatgtataaatacacacaaacatggctggagcccatggaagtcaggatagagtgcgggagcgcctgaaactggagttacagacagtgtgagccacgacgagggtgctctgccaggacattaagtacttttaactgctgaaccacctctctagcgctgtttttttctttcttttaatatctttgatgggtcttttactattattctattattttactactgctctattgttaccatttgcaaagtttcatctgcagaaggtaataagttgttttctgtgataggcagaaaggctattaatattgttgattagaatgtttaacttcctagtactcagtgggggttttaactccccaagttccataatgtctgtcaatggcatatggtccttctgtgtgatatttccttcctatgaggtgggcacacgcagtttccttggaaaagactagttacagtttctagtatctccacttagataacataaatgggcttctaggcaggctgccatgctttcccaggggacaacgtcgggtaatgcgtttttcaagtgccctcttattctcatttcctctctcccttcccctccttctctcttgttcttttcctctctgtttgtaaaactaactttttctatggtttcaaaagattttaagtgcatataagaagttcttaagccttccagaatctattacttgtcaaggttccatgcaagcatacagagtggagccagatggattatttatagtatataaatatattagatattatcctataaatacatattaataaataattatattattttagggcattttagataagagtgaacttatcattattaagtttccctaccactgttcttatcccttctccctagcatttgattttttaaaaatataaccatgagaccttatgagttttcttcaaactcttgcactttagcttttgaaaaagaaatttctttggatattacaacaaagtcagagtcaaataaattggtttctcggtgaacttttggcaatcatagagtctgttagctttgagccattacactcccagcctagccccacccaaaggaggtgagagagagagagagagagagagagagagaagagaggagggccagaggaagggccagagagtcaaataattgcctgactccaagttagaagatgttctcatctttatttcatctgggaccaatctcatgcctacattccaaaactcattaaacgctttttagcaaatataattgtccaccaagggggggaaaactgtttctcttaattattttactaaattcagcatagaaaaaccactttggggttgtgatattggatagagaaatcacattttcacttgtattttttttttaatttttttattacaagcctaaacccagaacggccccagcactctgccctgggacttggtctgaggcaatggccttttggccttctgaccattcactcacttctgcgaatttcctttctgagaactggagcccgttgcctcagaagtcattttccaattcttcgccaaacgaattcacagttgccgactgagttggcctcatggagagcaggcagtgtgagacctaatgtgacacacagctgggaggaatatttcatgccggggcatggtgcctgtggttccctgactgcttctgtctgcccactttagcttaggtttagggaagcttcaggggtactaaagtacaataaactctgtccctattatagcagaattggggtctaatggtctcttctgctatataaccctgcagcaggtcagccttcaccccattttttagcctgccttcaggactgttttcctcagaatcccatgtaaagtttctcatcttggaagaaaaagacagtttaaaacctagtgacctgtgatgggcatggtctgtataggctccaccatgataaatacatgtgttttcatgagagaactgcatctataaatggactaatgagaagaagtgatcctctcggtctcttagccatttctgtatagtagggatagcggagataagtgaagcttttggctttgaatagtaggtctgctaagaactggcagagaacacctcagatgttcttaactgtgtgaggtatcttgctgtggctgtgatgaactacctaatcaacttcaggaaggaagagttattttgactcatggtttcagttcatgatgagctggctcagttgctttgagcatggttctgggtcaaggcagaaagcgtcatgctagaaaggcatggtgaaggaatggattttaccttatggacggatggcaaaacagggaaggaaagagagaggagaagggagagaaaaggaagggaggagatgaagggagggagagaaagagagagatgaatagataagatgtgcccttcaaaataaactccagtgaccttcttcctcaaaccatgccccactccctagtagtccatttaggcatcatcatcaaatccatctgttcatgaagctaatgtctttattatccaactacctgtcaataacaacacaggctaggaacccaggcctcaaggatctgaagctgtgggcatcacttcatgttcaaatcagacacacctagactgtaaacttgagtcactgagaaagaagatgactttgaaagaagagaatgttaggaaatggatggcgtgggaacactttcatctgcttcaaagggttcaccaattccttccctctcctaacataaactctccttgtcctttctgcttctggatcaagaagagactcagataaaggtcagttggtgggtccaagcccctctctttcttctcactgaatgcaagagacttggttggtggagacttgtctttggcagacatttcttgcagtgggatgatgacccgtcataaattcctcacattcttcacagcatccctgccttctttggccaaaccttgtcctttgtgctcaataggccacaaatcaccccttgcttctttttccaggccatgcatggcctaacactcttcctttaaccaaaatccctctcttgtccttggctgtggctcttggcatatgagtcctctcacagcccccatctgggttagtcatctggggcatctccagttgcactactccaacacttttacctaacttgaaatgctgcttttcttcaaatgccagagttgctaaggaggcaatgctaccttatctgaagtctaaaattccctaacccaacttacacactatagtatagacaataattccatagaaacaagaacacagatgaagattaataccttgaggaaatccactagcaagtgagccaaagggacacttataaagagacagagatacaatccaattaaacactgttttctttgaaaaaccaaagcctttccgacaacacatagccaacagtgtcttccttttaagggacttttattaaacttttcatgtcttactaattactttgtacatcttatgcatatctttatagcgtctacatgggctaggcattatgcctatattcatttaacatgtctggaagctgagatttacaaagagtacgttttaacttagtttattaagtagcagaatcagtctaccttcctgggaacactctcaaagtaagaaccattaatgagacttgcatactacatgatataagtgaagggggtgtgaggggtcttttaagttgagccctcaactcaattattcaagcatttgcattaagttgttttctcctaggcactagaaaaagttctcaaagggaacaagtggcttttgtccctgggggagagatgtctttggacttctcctgccaagaacatagcttggacattggatgctcacatctcatccataaaaccaagactcagtttcagatggggatattcagctctgtcacatacctagacaatttcacttccaaccctactgggtttcaaatgttatagtaaaataatgaaatatcacccatcactcaaatatctcaacaaattgcattaccaatgtttttacaaattttcctcatttttattcggaggtagataattatgataaagctacagtcatagccaaaatgtaatatgatgctgcatttctttaattaaaatttatttaattatttaatctaattaaaataatgttttattgcaaacattttccaatgttgccacctgatcttcatagtcataattttaaacttgcagaatattttatcgggtagatttatcatccttagtttcttcatttttgtgttactatatattttggctatttttagttttattattgttttaactaatgcagcaattaggtgttttttttttttttttttttttttttgataaagatatgttcctagactatctactatctatgagagtaaatgttcggaaatggagttgtcaaatcaaaggatattatccgacagtcctattttgatgacagactgccttttcaccataagaactagaaagaatttagtcacaaaagcagataattatatccagattttctcccagtgtttggaaagagaaagttaaggtggggcccaaacaggaaacatacctgcgtcccatgagttagaataaaggaaccactttctgttttcaattactagtgctgtttcttatgaagggaacatggggtgtaaccaagcttgagtttggcattcaaaggtttaccaaataggagaaaaaccaagggaaatgaaatcgatgacaagaaatcctaaatcctgcttctcaattttcaaaagcactatgtacctatgaggtttcctctctagggaggcactcaagggtcacagttgccacagcaacataccaccccagggaagaaagtagactttctcctcccaaataacaaaggtgctgtttttatgcttcttttgagctgaggtgctctctggagaactgggctcttgtttagccttcttgggggggtggggggcggggagggggcacataagatgctgacgatctaacttcccatgtaaagaaaataagtaggcaaccatatttgttattctgtctacagtctagacactcttctccgcaaaaattatgaaggatatgacagatcaatacacccatgagcctagtgactatggcaatcttattggatactgccgtgcagggatgctgaactcaacagttcagtgtttaaatctcagaaagtttaaatctcacaagaaagttattttgggtcctggggtatactctgctctattctgattccattaacctctctgaacatataaaagcaaccgacaatcagtatttaactgtttctttgcctttgccttctgcttttcaaatatcagcccacttttcttgtttgcttttttgtaccttaaaaccagaaatgtcatctatgtacttcgaggtataaaatcatgtcagctatgtgggcatttcctaaatgctcattggtacccatattgacaaagctggtacacaaatatatcacaaagagaagccatatgaaaacacctgggcattaggaaaaagaaacctagcatcagagactaaggattggacatagcaataaaattctggccttggctgtgtgcggtcctgggtttgagtttggaacaacacatacttcaacactaccaccatcaccaccaccacacacaataataactaccaaacaaacaaccccaccccacccccaagtattctggctagtgtctgttaatcatacttatttctatgggcaatttcaaattaaggtgtagagagatctgaggtggcatagcaggaacttgaaagatgccacctcagatcacttttctaatcatcaccatgatgattccagagtgagattttgtgggaagctggtttgaatatggagcttttcttaagtgaagacattggttccactatgtcaagctgtgtgacacgagtaaactagtgaacctctcagggctcatcccaagaggcagtggcctcataaggcttgggatggatgcatgaataagcacttggcaagtttagttgatgtcatcccgtaaagagtcagtgattggccattatggacccagacttggtgctttgaatgcagaagaggacaaaggagacagacagttcctgcctcttgtccccacctcctggaacttgcagttcataatgtacgtcagcattatcgattcatacagtcaacttactgtgcaactatctccagaaatgccctggcagtacaaatcattgtcacaggttttctgtcctttaacccttttaacaaccctaaaaattccctggaattgtttcgttcccattgtataggtgaataagccaaagcttaagtggtggatgaatctggaagttcctttgtcctcaagtgccaggtctttgattctcaatcctgtcctcaaagcttcagaatatgtggcggtccctcaagcagctagtggacaggaggactaacatcccaggatgcacagtgaacatgcatagtggttctcaaacttaagtttgcattgccatcacctggaggggctattagaacccgggccaatggaccatacctcagatctttgtttcactcagtctaacctagtgcctgagaattcacattttcaagttctcagttgataaccattgcttctgtgtggcactgaataatgtcacctaatgacactgaataggatatggataggacccaggaagaagaatggaaagaaggaaccattgagaatggcagtgctgagaaagacctctttcaaacatttaaaatatgccagactattttcatatctcttttgatgattgcctcataaaggtatccatatgttagtctggtagcagaaccaattttattgcaaatcagagaggaaggaaaaaaaaaaaccatcaaaaccttccaaaggaagaaacgaaatgaaacaaaaaccatatgttgacctttcccccttcactgttcttttattttcacagtctgtgttggtctggatttcagctagtacctgaagacaagacgctgggtctgagggtaggaaattggagccttaacaagtcccctagccaaaccagaaagctagaaacaccctctcatactgaacactgcttttctgagttccatttgttttttgagctttcaaaattctacagtgggtgtttcacccatgctcaacaccaccctgctcaggtaaaacaaggcacagaaggcaggatccatcaaaacctatacctttgactgtgccttcaacctttattatctcctagagtaatatagagaagtaaaatgaagtacagtaggtttatgacacgcattcaggactgtatcatcaaaaccttgtttcaggactggaacaaaaggggtgttggaagaggcataccattaatgattacttacagagtcaactaggggtgtcagacgagaggacatgtgtatgggaagaagaattacaactttctgtctgtcagtcaagctatatccatagtcatcaacatgtctcaagcaaggcctaggatgggtcttgctgcaaacccaggatttattgattcaattgtctccagagagaagtattggggtggagggcaaatgatgctttatttagtttccaagcctgcctcatgaggcttacttggagcttcacatagctttaagccaaatagtgccctgtcggcagcagctcccaactggttgaatggagaagggggacagaagctgtggctggtgtggcaactcccttcaagtccctgtttgcattttcctcttaaaaaaaaaaaccaagagttttcaatcatacttttcctaggtatctactttccattgactctctggagctcttcacatatcttcttcaaagatctattcctgggatagataagatgggaatggtctcattcactcaaccagaaggctgttatgtgtccccagggatgactggcgtctctgggttgagatactcttcatcttctttaatgatttcttacaaactttccaagggcctttagggaggacctgctacaggcacaggaaatattgatgagccttccttaataagcagatactccaccatggccagaaaacctttgaaggctggcaaaacacgttgcctggtccaaaatgttcaaaggttactaaaaaatcatgatccagaggctcatgtgatccaaaagcaaagacttattcaaattacagcaaagggcaggtccttagaaatctgctggtctatgtcaatagtcagcaccctttgcatgatatataaccacatgtctgtggattttctaacagagaggaaattaaaaaattcaaaagtctccatcctccaaagaaactggagaagtgcaggcccagcctcacagaggaactgaagtagtcagtgctctgtctcccactgcaatcttttctcagacacccagggcttgcctgcctatcaggctttatatccctaatgccaattatattgttaaaagacacctaaaggtccaagatgtttctttatgtcagcactcataaaagagtatttgttgttcaagatattccatataaaaatattcagatgggctgaaagtatgtgttgagagtcctgagctcatggaaagccccctgatgaagaagtctatcagatgatactaaagtcacttgttctgcatttaatgataccatgctcccatttctttccaggaacaatctcaaaattccctgtttatcacatttgattaaaagttctgaaacgaatccacgaggtatgttaataattaaccaatgaacaatgtgttaccaaatgttaacatcccattacatgttctgggtcaaagaaaacagaagggtttgctagaggggattggttcagaatatcaggtctgtcttaagctgtaatctcttcagtatatcctactcaaagaagaccctattgtccactctatctaaggcaattccaccctcaattctattatcctatcgattctttcaaggcatttgccaaaattcgacatggtcctatttatttatttgttgacttgtactttgtctcttttagccctcaaaccattagaatgtgaggtctcagaagccaaggacttttgccacaccagtcagactagctctgcagagagtcattgctgaatgaacccatcttaatacatgggtagatgggctcatgaatggatagggaagctaatttgtctattattccaacccaagctcacatgattactgctcaggagatgaccactgcctaagtgaatggacaggggtgattggcactatttttcatgttcaaataaagttcatggggagtgggagaaatgagtgatattccagcccttcacaggattggactccttccttcatgacaaataatagaaaagaatagttttcagatagccttgagtctggaagtagatcatcagaacagttgaaggtagcggttagaatgtaaagcgatctttagtgactccagtacagagtcactgcaaacagaaaactatttaaaatggaagccactggttccatctggcagcaaacactatagaaaaatatctgtgagctctgggtgaccaagaaagtacaacacactgtaatatgaggcaggctcatgaggaagattatgaaatgaaagcctagagagttatcttttcacaaaacttggcaatcccgagcttttaattagagtgggaacttagatttcgctctattttaagattcatttggagaagctggagatattccagcaagtttttttttttttatgattaactggatggaaagcgaagttaagatgtaggtctcctagaaagacaaggctaagcaaggtgacttaatcactgtggtgaggtaaaagcaaggttacaatcttcatctcccctgaggactagacatccaatgccctgaagaacagacacagagaagtaggttctatctacacccaatgcatttccatttagagtcaggaagaatttgattaaacagggtctgtgggaagaggttgctaccctggagatctctaaatgtgggatgactaccatctgctttggaaggcttagatagaggcagggaactggacctaaggacctcttggctttccatctatctttgagtctgtgtttagagaattgtggtgactaagcaccaccattattcaggaatcctccattgccatcacaggacagaccccacactgtccaactctgaatagcttcccctgggaggagtgcaattgttcttctcagtactggaaggaaactgatagtgttgcttcagctgcttcctttctgcagcccccacagagagaggccagctcttgtcttgttggggctcctaacatgttgcagcaggcgcttcaccatcttgtgtgggattggaaggtgggtgcaaactagacatagtcatgagttgccacatctccaagacatttgagatccagtttggatctatccccttgttgctcaggctcagactaagaacttaaaaacaacaacaacaacaaaaataaaccaaaaaccaaaaaccaaaccaaaccaaaaaaaaaaactctcaaggaatccagctggttctttctgcaatggacagaattgtaagccccttagcccacaaggtctactgttaacccgtgtctgtgctttagctagaaggaatatttttgatgaagataaagtgtctaaaatcctatctttgatagcttagctagaagtgagataatgagcaagggagaatacatattttagtagaattaccacccgagttgctgttatcctcaatagaagggaggcatttggaacaagagcactgaaagtcttactactagttgcaatatgttatatttctgtgaatttatgatttcaaaaaataacaatgtgtagatgttcggttaatggtccaaagggtgaattttcttagaagatcacttatgtgattgagtctttcaatatttttgagactctaaaatggtaatatttattttttaaaaagttgtgtatgtgtatggtatggtgtggtgtggtgtggtgtgtgtgtgtgtgtgtgtgtgtgtgtgtgtgtggtgtatatgcactgattgtgtattcatgtatgtgtggagaccataaatcttctttaatggctctccattttctctttgaggcaaagtttctctctgaacatgaaattcattgattcagttaagcaaggttggctagccaatgagctttagggattgtctgtttcagtcacaccccatgccccttgggctaaggttataggtacatgctgacacacacagggctttatacacaggccccagggacctggatccttgtgcaacaaacatattacccactgaagttacctccacagactatttttttccattaaaaaagtaatttatttactcatgtttactgagtatagtagaaggctgtgctgtagctgttgcctatacagtgacacttgtaagccagttcttctgtgatgccctctttcagctttggattcttatcctaatgacccatgagcattgcctattatttgtggttcagtatctataaaaatcaagagcaacatctttgctaccaactaaagccaagttgacccaagtcagatctttagacttgctatttcttcttgtttatccaggcttattttttacacctctgagaagtttattggtgtcttctgcctggttcaatagcatccaaccaaggtgggaaggaaagggtaggtgaagatgaggacactacactctctttagcagctgctcatttgctcaaatgcatctggtgagtggatagagtgtgaaattactcaagaaacacagctgtcaggaacttcgggaatattttcttgcccagattgatttcaagccagtcttacatatcggctgaagtataaaagtgataaatgtgatctgagcatctactctctgtctgtctgtgctcggcaccaccaagttgtcccatatcattccacagaaaccttagaaagaggttttgcttcagtttttggcagctttggaaatagttcagaaatcacacagctcaataaatgatgcccaaagacaagatataagtgaagacctggctaacacgagagcagcctcagattttacagtgcctcaagtgctttacctaactcatataacttaaagaacccaaggagatttattcttatggtttttctatccttccttttttgtgtgataacagaactactaatcttcagatgactacatttcttagcccgcctcccttgcagctacatttgaccattttctcaagttctgcacaaaagaatataagtgaaagcatcatataagagctttgggattcttcctcaaaggtcatccagtaaccctccccactttctgtgtgtgtctcaatctcgctgtctctcagtctctgtgtctctgtctctcttcctctctgtcatctttcttttgggtatagcatgattacaaagttgaatgcccagtaaacatatatggccatgttggtgaagaataaaacacaggaggataaaattgaatgctagaaagagctggattctttatataaaaatactttgtttttgttattattattattattattattattattattattatgtgctcatttattatggtgtgtgtgtgtgtgttcacatataccacagcagcttgtgaatgtatgtctgaggacatttttttgtggagtcagttctctccttccactgggatatgggtgctggggattgacctcaggtcatcaggattgcaggacaagcacttttatctgctgcctcactagctcaagagctggattcttgaggatgctatggagcagaactgccttgcatgacatagaattcagtagtattgaactacgtatcttaaatcttatagatgagagattgtattttcatcttattaaagtttggacaatcccaagacactcttccttctcatctcttgaataaagaaaggaacagatgactggaaggctacatctttagactattaaattcggatggagattctgggaagacatacaatacatgaaaagagcaaaaggaggcacaaaacaggtacttctgggacagggtttgtacttcccagggaaatggacaacaatgagcatccattcattcattcattaattcattcattcattcattcataagttcactccaaatacttatttatagtctactgtgtcagaaataattttcagtggattaaatagtaaagaaatttggatgtatgttgacaaaaatttctttttaatttaaaaaatttataaacttttaaaagacttgtaaagaaataaaaacagaagacacaaaaatttaatggaccccaggtctatccaactcagtgaacatgacataatttcttttaacctgattgccttctcagagagttaagctgttagtcaatttaaaaacagcagttgttaaaaatcgagccagaccattggttacccaccatatttagggcactgagtcccaatgcagtgtaatatgaaaatggatgggaaagcaagaacagtgaccctcaaggactctatgactcagcagagagaaaagcaacccataaataaggaaaatacaaaacagaaggaagttcagtgcctcagcaggtgcaggcaaggaaggttcagggaaggaactcagctgagtcattctcccactggctggtgtgatgctaccctgatgtgcttttctgtttgcagagtaggggtggctgggaagctgtttctgggcccagtccctggagatatttcagcacaggcctctttcaggatgtagaggaaacaactgtcttctctacagacatgttttatgaggagggaggtctttcccaactccttaattctgagattttttttttaaattttgttttcagtttccattgtgtctattcttggtacaagataccatgttacacaggcactttcatgtaagtttatattgttctttgactatatttctcactatacctttgtccttccccttcatcaggcttttgttcctctagacagcttgggttctactctcatgtcatatgtatatacatgaagtatctatgtaaaaacaacaaatgaaagaaaacatggtatttgtccttgagacataattaactctcttcattatgcccagttgtgtccgtttccggaaaagaacataacttactcgaactgtgtgcacagcacattttctttatccagtctctgttgttgaacatgtagattgggttctgtgacttaggtactgtgagcaaagctgcagcaagccctggtgtagaactatctctaggatacattgacttgaggtccttcaggggaatactcacaagtggtatagctgaatctgatagatctccttttagagtcctggggagcctccatcctgacttccacagtgtctagattggtttacattccaatcagcagtatataagactccccttttcccacatcctggccagcatttgttttattcattcttttaacaactgccacattggctggactagaacaaatcaacgtctatttttggaatgaagtctttccatgacaaagaattagaaaatgccagagatcaaaagcctcagttgctccaatagaacaagcaacttttgtgatgaatgaaaacaagccactaaataatgtttcacatggagacagatgcactctcattggctctgagactaaattagtcctgataaagtattgattgattttttttctagaggagggggttatccatgtcctctttgctcttcatttgaaggctaagactaaccacactctaattctctacatgaacaatacagataaaggatacatttgtcattttaagcaattatttatatattttgttacaatttatttggttcattgagtcaatatttcttgatactcttagcttcattttcccatatttacgtgcttttttttgccaatatagccatctttccatctgttcatccacttttgacttattctgtctaattttaataagactgtcataataccttaggtagactgtcagaagagtgggattgagttcatttctcttcaagcctctgataactagagttaggatttgtgttctgggtaaacggagtcacaaatcagcactaaaagaaacctgggaggatcttgttctattatagtcagtcaccctaaataatgtttaaagacaaacagaaaagggttctgtaagatcacaaaggctctggtaagaaaccaagctagggttaaaacaccccaaagctgtatcaagtgaagtcaaagtcttctatgtggaattttatcagtgggtccacacacttagtctagcttgtatttttccagaaatcatgcagacaaaccattgaacttcccagctgggattgacttggtcagtaaatgtgtattagtctccctgactgaagatagacaaagtctaccttcaaggatatgagatgactgctctcagttcaacatttccccaacaaggaccatgagcattaccatttgtcatcatcgtctttcttgtttgtttacagagcatagtaaatataatgtttacaaaacatgttaaagacattcatactcctaaaagttttagatcagggtaccaagataccttttcttgacacttatagaattggggaccttctcatggcaaggacaatgcactcagattgttccaaggtacacaggacaagtggaaacaaaaagtctgatgctagatagggaccaacatgcctcctctggcagagtgagataaaaggaacaaccaagagcctaaactgcaccttacagtgaagctccctcaccacagaaaattccagtcagtttccaccacagtgggtatacaacaacacacgccgcaggacttaataaggagaaaaagagagatgaaggaggcaggagtttggtcatgtatatataccagtcattgggatggaaagaaaagaatgcctagtaaatatactatgtatcttccaatcagatacttccagtagtcagggctcgttccctttctcatggtcctgaagctttccaaagctctaagcacctatggcaaaaaccatgtcagcagttcagcaccagcacttgctcctgataggtgctcacacagccacgtatttaccagcactcagatgtgcacatctggaatagtagctgttagatcagcgtaggctccatgacatccttactattgatactgacttgctgagttgagacaaccagcagcaaacatttaaaaaaaaaatgtatgtttaaaggttgatatttgtttttctactgagaacctagtctatagtgcaaagaatacttagagacaactatgtcgcaaagaaatttgaaaaagaaaactgcaagtgccttgcggaagagttagtttggaaaatgctagattggcaacacatcgtaccctgtgaaaacttgtgacttcaatgtgaaaaaaaaaaagaggtttcaattaaattggatttttttaaatctccctcagagttgttcaggttgaggggttgtgaagctgagaacttttattaggatggaagaagccttctagaaaatcctggaaccccacagctcttggtgaggcaagtaatccacttgcggacacagttttgcctttagaagtattgtggtcaatggcattcttttatggccatgggtggctaagcctgggatggtcggacttggtggtagcccaggaatgtctatactgtgcctttgcaaactcatttttataggttatagacttaagggagtgggagagttccctgtagggctcagcatttcttagacacttacttatttgtgtggagctcttgttttgaattgcaaaagataatcttaaagacatattgcagtagtaaaagcactttgaagctcgggcattcagcctaattcaggaacttttaattgtgtggtctccatgtgctaaacattgtctgacattctaagacgatacagaggagtaggccattgagtctggctggatgaaccttagaattaaatgtacacttaactctattgtaagtatatatggggatttttttcatgtacaaataaagagatgcttggaatgtgaaggcactgctgcttgctaatgatatcagagactatagtaagtaaagaatagatggtctcagccttaggtgttacccagaaaaaggactgaaagagagagcaaaggactaacgacatgactgtcacctgcacagcttgggcctagtttggttgcctgagtgaagatatcagcagtcacatttagccttttatgttctcataggtgttagtgtgcatctgtgtttctcagtgcactcacttgtaattataacgatgcttcctgttttacacgggtggctgagaatgaagtgtgtgaacgacacacagaagtgtttaagacagtgccatgcatgtaatgagagctcagaatgtgtaatttattattctacaatgtaaatgttatatatttggcttattttgccctcctccccataaaccccctaatatgtagactactgccacacattccatacggtgatctctagattctccctcccattctctagaacatctccatttagcaggtcccacagtctaccttaactgctagctacggattgcagaggaacacaaggattctcccagtgcatataacagaatttgccttcagagtaaccgagcctgagaatgacctttggaagtgactcataggatctaagagtggctgggcttcttctttatcctcagagaggaggacatgcagcaggaaaagggcagactcatctttctgctattcctagatttccctgaaagatgacagcaataccaaaggaacaagacaaacatatcatctggtcaatgggcatgtgccaatgtttgacttcactgagtctaaaggccacctccacctttgtgagcaagccaggacttggcactctttttatgaagcctccaagcacattctcggacagcttatttaagaatcatttttaaaaagacctcacatcctcaattatgaaaactgttcaccaatagagccagatacatgattcagtgaaggtgaaagatggctcatcaaggggccagctaagttagaggtcaacactggctataaagtcaggctattgggtacaggtcagacatcttacagggatgacaagagggtgttttctgttttctgtttacctaacagtctgggaacaaattggtgtgcacacactcatgtcttcacctcccattgagtcagtctgccattaatgtagtgcttggcagggaggttgagggctggccacataaggtcctgagttgctttgtcacttcagatctggcaaagcctgaagaatcttggcttggggtgtggagggagggtagaaaagggacggaggccatggctccagccacccacatcgccatttctaggttttgattaggaaaatactagatatgatagtctggacttctaaggcccaaaggtattttgacatttaagaggaatgaagggctcattttttttcccccagggtaatggtcttgtttggatcttctgactcaaaccttgaatgcacagcaagtgtagttagcagaattcccttgctgtggctctgggtcagacaagagcacaccagctttctgatgggagctgagctgttcagcaatgccacttggagacagaactcacacacagcaacctgtccaagagttctaagaacttatgtttaagtgttgggagccaggcttttcaataccctatcatcagttttgtcatggtggtcactgtttgtcaagaagtgaatttccaactgatgagttaaactcattttaaaaatatcccacagtgaaatcagaaggggccatatcagatgtatatgagttttccagagggatcactgctcagtgtctcagccctcacctctcagctacttttatcaactgcccctcctttaatactccatctggggtggctagagtcaaaacccttaatgggccaaggtgggtagacttgggcaagatgtcctgtcctcttatcctagcagagaggagatgcaggtctctgcattgcacggaggggagcctggtgcaggacaaaggcaccctactgttttgtcctcatcccagagtgaactcagcaggcagcttggattggaagctgccatttctcaccctgacactgggaaaagatgactcatgaacacaagcagagaatagggaaatggcaaaccagtgatagagacagagttgtgatccctccggataagggaatgagtttcattccttcagaatgaaaggaaaactcattccttatctagcaagtgtccaggtgtgagaagtagactttcccttttctgtcatcccttggtcaggttactcacagtttataagtgcttataaggatctgcatgtacatggagacttggcaaagaatttgaagactatgctgaattctaaactgaaaagagaaggaaagccctcatttaaggaaaagtcagagaaactaactcccgaaggagcaggtgtcaaacctgttaacatttagtaatattttgtcagagactcttcctttgtttctgtttgagtgtagacattctgctaccattaatattctaatcaaaagggaacaaatctatttataattgacatacatggcagtcttatttatagttctccttcgccttccatgtttctctgtgggagatttttccctgaaacaaaagcctagtttttgaagtaactgtattccagggacagtcttgatcattcctgtagcccgagagatgtatgtaattaaccttttagccctactcaagggatggtggaatgtgcaaaggactgaccaatgatataatgactcccagttttgcccttggcattccagtcagaagaaatgatacatgaccccaagtaagaaatgatagcactccggctctccagaaaggtgcatgaagaccagcctggctgacccactttctgcttcaacatgtactgtagtccaattctccttctgttctgagaacttgttatgcaaattacatctagaagttagtggtgagccttgagtctctgaatttggtaacaacatcacagatgtcattcatatcacttggcagacaggtgggatactcagatccctgttttaaagggagaaaattgcctgaaacttcccagctcaaagctgctacttcaaagctctttgtgatgaccagagttaacttcaagctataagagttcccttatataacaattgttgtctttttggtagtgaaataaatgttacgtcaatacatacagtcacttagagcaggatctctgcttaattcaggaaaaatattcttatgctttgagaaattatcaatgcccacggtgctctctgtcagaccctatctgtattgtgggatggagatcagccgggggtgaggctgatggatcttacaactctaggtaggatttggaaagtattaattttatgttggaaaggctggtctaacaagctcacaagaagaaggattcctaggtgatctttccaacaattctaacttagatcagcttgtcctcatactctctctggcctctgtcaggataggaaacacattcaaacctctacctcaccaggcatctcagcagagagtgctcagaagtaatacaacccatcgtccatttaaacatcagtgggcactcttacatgatcatgtataaagagagtaaaattaaaattcttggtattgatttggaaattcaggaatatggtctgaaggcaaatggagagaaaggaataatattttaatgtatcattttaaatagcaggttttggaacttactaataaacaggtaaggatcagtttttaaaacgtgattgacagaccttacaacatacttttgatagtatgataggtgcccatcaacagtactgtacagtctttggctttattcattcagctttcttgttgacactaactctatagtaaataaatagtagttcatgaaatatctcagactttaattacatttacaatagggactttctgctttttctatagcattttacagttgaccattcaaatcaaaaatcattatgttgaatccatttctgtaacataaaattgactctataatcttgatggtgaataacccatctttccaggtcctcagggatgagaatctgttttataggcactccaaaactgtagaaataggtatttttggatctaggagacagaactttagtgtttcatttttcttgtgatatttgtggtttacctagcattgggccaatgctcagctttcagttggggccctggagatagaccggctcctatatttctaaacgagttgctccttgtgagacatgccatagtgttttaatctggagatcatagcaagcttccaacagaaaggttcatgttctatttacctaaattccctctgcagttttcttttgatacatcactcctcactttctccttgaaaatgcctaaaagtccagagggagcatccaacccagccatgactgcatttgaaatgagttactgcattcccatgggaatgcacaactactctcagcctgtggggtccaaagaaaaatgggcaacgtaatgaattccatgcaacattagcatactgtgtacagggagctagggaaatcttacagaaattaattaaatgtggcccgctcttacctttgacaagcttatttctaagcagatagtagaaagcaggaacactcaccaaaacaaaacaaaacaacccccaccctccaaaacctccaaacccaacaacatgaaatagaacacattataaaagcatctagagtaatattaatgctttcttgtttcagaagaaagttgacatctgctagaagactttacaaagtcagttacatctgagagaacaaacccatgaacaaaacctggtaataaatcatgtaggttggatgttggaagatgttgcggacatttgtagacccaataagccaactgattcagggacttttggactgaagcaagtcatattaagaggtgaaatgggccagagtaagatagttgagaacaatggaagtttaggtgaggcagaaaggaaaagacgtatcaagatgaagagagttgtccttcaatgaatattggccaaaaattggtcctgtctaaaagcaatgcaaggacaaagatggagcagagactgaaggaatggctgactagcccattttaagacctatttcaggaacaggtaacaattcatcacactatcaatgatgctatgttacacttgaagacaggggcctagtatagtagccctctgagaggcgctacccatcagccaactgagacagatgcagatacccacagacaaactttggatggaggtcggggacccctgtggaagagttagggggaaagattgaaggccctcaaaaaatgacaatcctacaggaagaccaacagtgtcaactaacttggacccctgggagctctcagggactgagccaccaaccaaagagcatacatgggctggttcaaggcccctggcacatatgtagcagagtgctgccttgtttggactcagtgggagaagatgtgcctaatcctgtagagacttcatgcaccagtgtggggtggtaagcagggggagctaccctcttagacctatcccaggtcttagaggctaaggggagatgggatgaggagaggaattctttgaggggaaatcagtgggggttcgggggaggcaacatttgggttgtaaataaataaataaataaataagatattggcagataattcagattaaaaaaaaccaacacagtcttttccaagaaaaatacttatgaagactagatacaagatacaggctgttggtttgtgggttctgctgtagggaaacattaagaaatgcaactggacaaagtctggcagtggccctcttttaacatgccttgctgtcaaattagagaatttgggctcaatttatttagccatgcatggtcactggaaagttgtttaggaaaggaataaagcgattagaactgtgtttataaagatgaatctcctgggtgggatggctggagtcaggcaagattggacacagagcgagtatcgaggaagctgttgcaatagttttgctgagtgatgaggaggctcagaatggtgatgggactggatggagggacacatgtggaatcttccagtgaattggtaacagctgttctcgatcttggtgcaaaacaaactataatgctacagcttgctttgtctaaaaaagttgagtttgatggtccacactgtcttaaacatactggatgattgcataaatgattcattaagttggctacaaacctggccttttctgcttgacaaggcctgtagccaaattcttcacttgctgttgaaggagcatccctttgatgatctctaagtttattaaatgtttgggatttcagacttgggttcttctttcaataaagagagcctgatagcttacaaattcttgatgacgtgtacctttggtatgtctggggagagctatgaagttgtgcaaaagataaagtctgtgtggtattcctatgagtcagcggaagttagccgagtgagtgggtgatcttacagagccaataaatgcatgatggattgaatgagagaaaagtggatattttgcatccaaagggattgtgcatatcttcagcagaaacagtgtgggctggtgctaacagcagatgactatataaatgaatgaagcaacccttcaaggtcactatggtgtgtgctgggctcacagtgcatattctgaaagctgcagacaagggatgccacttgggcttcaaagcagatcccgccatagtatgccagcctattttccaagagactgtgttaccttttgctttcatttaggatattttgatgtttataaacacacacacacacacacacacacacacatataacaattcatgtatgtgggttacagttggatgggttttgagtggcgactggaatcttgtgagatctgctcaccaactccatgagtgtagtggttgtgcttactttttaacctcttgttatcaggccagggccaagcagagcacattctgtaaatggtgaaatcaagagacggaatcagagaatgcaggaaatatacccttatgatttgggttgtaagattgatatttaaggagtccttgtggcacaagagtaaatcttctgtcaaggcaggcttcattttcccatggactccgttcaccacaaagcagatactcagtggctgagtctacagtgaaactggtggttgctgtgatttaacttctatgtgtttttatcaaagagccaggtaaaggttaatgagagaagagtgctagcaaccgtgaagacaaacaatatacttgactccgtatctaactggaccctttaaaagcaggactaaggagattcagattcattgtgaactgcttgttccagataaggctgtagatattattttgtcaatattgagtcagtgatgtgattgtatgcaaatagttgtcacctggttctaaacagatcaaatgtaacaatttggtctaagaacaacaccaagattctagaccaagtatctttaagaagtttcaaagagcttaagaaaagtgcatataagaaaacgtggaagttgtattgtctattcttttcccctgaaaaacagagaaaagagatcaccattacctatttccaaggtagaacaccttagttaatcttaatagcattgttccagtggcaaatttgattattacattcactagatttatttagttctgagtagttccaagatcttctaactatctgatttaaaaccactcttgtttctttctagcctcatttaagggacagaagttcaagctggcttgctttcatctttatctgctctgctataggaccaaatccccaggaggctgtcttgtgtgtgtgagtgtgtgtgtgtgtgtgtgtgtgtgtgtgtgtgtgtgcctggtcctgtattattatgctcaagcaggggatttgtcatattctagaatggccctggggaaacttggatattactttgagacacagtttcaaagtttatcctttgccttctgatgggtggtagaaatatattcttatcatacccaatcatttctattaaaccaaaacaggagccatgagggaaacagtcagcagagactaatagaaatctgagaatctggctggcataaagatggaggcaaagtgataggaatgaaacacattttcttgcttaatgcacttttatataatatacacacataagcagacatatatgtgtacaaatgcacgtatatacgtagacacatatgcgtacatgcacgcacatatacacacagcactgttgctgggttatttctgaaaactgtaactcttgagaaagaaactggcaagatcttaaggtcttggagctcagttcctggccctggtgacaggtttgaaaattgcagctacagcaattgggaattccaatttctagttcacagaaaatcaggccacagggttatccttagagcatctctgtatttcctctgtagagaaaccactaacttgagaaaatagaggctactgcctcgccttctacattggaagaaactataagcaggcttgacctcagcattatcgttcggcttcagtagaagctgagcagtgcctactttttattctttcttctggaatgaatgccacacattattttctaaaacaagttttctccgaccccagtgcccatgcaatcccccaagggatctagttaacatgcaaatttgagattatttgagggtgctaggagcccctgatcctgcctctccaataagctcctagggtgttttgagcagcctgccttcagatctaccttcatacaccacgcgacattaacatgcatctttaagagcatttgctagtcaaacacacttgacccaatgtgaacaataggttgtttctggatataaaacactttttatatttatcaatcacatccctgaagggatagatttctctattttttagtattgctagttttttttttttgttgttgttgttgttttttaatgtggtggtaagagtgaggtcaaagttatttatcttgaaacccatcacctatctagcgactgtaaggtttccaggagcaagtgagagcttctgaactagctagaagtaagtccctctttgtctttagcttatacatcacttctgcatagttactggtcaatcagtagcttatgtattaagataaaatcccacagtctcatgtaaaagcattattatgataagtctaagaatgccaaccagacttagggcatgaacacttttcaaagtcttacattcctacaactttaggatcctcaaaaaaaaaatctaacttaagggaagcctactatgtgactacatcattgagcatctaagacattgcctccaaataactgttccaccctgggaggtaagagccagcaggaaagaagtaatcccaaacgtaaaaaatactctctcaacacccaagctgagagagtggaactcactatcatttgcatctgtgctgaaaatatagccatacttgttgggaacacttgctgtgcttgacgaacacagtaaaatggctggagccataggagggaacaagctggaaatggtttccatctgatcttgtgttttcactcaatagccattgatcgaggctgcccagccaagaacaatgagcccgagagccaactatagttttattcttcagccatattagatagagttgcagctaagatttgttatgcgtttcaggaataaccaaacatccatacagtgcaagtatttggcagcatggcagctgatgaaaccagaaaaaaaggagacaaattatcaatttctcgctcccaaattactctaagaaattagatccattttcagtagctttgccttcaaattttttcatttcgtgaatcaccatcaccttctgccaaactaaataagcctatgaacaactggagacttgaatggaaagaaatagaaaactcaaaatacataggaaaatttaagcttcttcatggaagactggaatatacaccttttgctttgggtagcttatatcagctagcgaaagaaagtgtgttaattagccaagcagctaacattaaactgactcaggaaaattcccttttcacctttgctctttctctttgaagcctccaatgtatcaaacttctaagttttaggaagctaatttagtataataaagtcacactgatagagaagaaaggaaacccaatgaggttggttcatagaaatcgaaagaagtgttttcagaatgattgaacacttggagttttcatgactgttctctttcactaaccagaaaatgtgacctagtaattcatggtggggacttagactgtagtcaccaggactattttacttgagtttttaaggttccacttaatgtgcctgctcgttcaggagtttcttaggactggatgtggatgagcagtttgctttccccaatagtctactttagggcctggtgcacaccaggttttctctcattcttggttctctggatctgatggctgtgtatggttctccatagctcttcaattctttagttctggttggcaaatagaaccttattgtggtgtttactgagcaaaggccctccggctgtgctgtctttctgattatatgccagggtttcacttccctggtctacaatggcttcttgtaaatgaatcaagaaacacaagagagaagaatggagtatgaggtagggttttcaaacttgggaggacatataaatgagagtctggaaggcttcgaaaagtctctgttgccttagtcttgagctgactgttcagtggtgaggaaaaccttagagctgatagttcaagtagaccggaagactgaattctcccatctcttcagtctcaacacacaatgacagtgtagccaacagaaagtcaaggggcttattctgggaatgggcagaataaactcgattttggagtgaggttttcaatatcaaatcagggatttattaagcgtctcatgccggcaactgtggtgatcaggaaaaagaaatctatggatatttagtctctgtttttcccaacaagctataaaataggatggaaatccacagcaacagtagctaatacatcactgtgtgccctggatgtatattttctacatcagatctgtatctcgagagatggttgcatggaaatcctctgagagagaaaaaccaccttgctcctggtccatagggtgatacaactcatacttttgattccattaaagtcaggcgtaagcaaaaagctgctttgtaaatcatcatctaagtcagacaatcatgaaacaaaaacatcctttcaatgagcaacttgagagagaaaattacttttcagactagaaataaaacccctccgctgaacactatgctttgaggcgaagcagaactcactaatagctgactggtggaaacagatcttttgcctacgcatgctgcttcagtgactacctgactacctccgagagaataaactctctcagcagcctcagtgtggtaacatgataggctttgtctcattcttgcttcttccagaaagagaaaatgaaaaactgacactaaagctaagcagtaagtagtccttggtcaatctaaagacaaggagataggtgagaagaagatctcagtgtgccgttacttttaatgaagaaggtcaaggagaatacgtggctgagctaacttttctagattgtaattattacagaaaatgttgtggaggttgaatgactgaactaaatagtcagtcctgagtaaggacacaaggtaaagtgtctccttcaatgtgttaatagggatgtgtctgtggatggctctttgagtttcagaagccctactatggctgagtctcagaagatttctgagctataatctttttattcccagtttatgatgaggagtgtgaggctcatgatcagagtgacctccccaggaccacagagctgtttgtgatatgggtcaaactcaacttgcgactgctgactttctagacagtgagtctgatgatgctcagataggaaaagcataataaggtggggggaaggtcatttgctttgaactatgccttttactagtgaaggatagagagtttatttattatgggtctaagaaaggaacaggcataggcacaaaggtgccagcagccagtgtcatttatactggcttcaggtgatctcaagctcacttctaaggcctacagatttgtagtagaccatttctttttgtcctaaccgctcttaccaaaagcaggtgagtgggttctatagctgcaaggcagaaaggaaagcctgctgaagctttttcacatagcttctagaaagagctgtgtatttccatagaaaagtttttctagctccattgactcttctcattgcttgacccaggcaatgggttatcaactcctggaatcagcgaccaaggcctgagaccataatcccttcatttaggaaggcttcctaggtggtgtgttatctttaattttatgcctgattttgttccactttgttagttatttctcttctagacactttcctagtccagtagttctgaattggagggggtgatttagcaccccaaaatatattaggcaatatctgtgtttattacaatgggaggatgggactcctggcattggcaggagccaaacatactgctctgaacctatactggacaggaatctcctttcagtagaatttaccagaccccagacatcaatattcctgcagctgaaacccctattgctagtagcactgtcaggaaaaggaggggctgtctaagaatgaatatgatttcagaacatgttacctggtttcataaatgggcatggaggaagaatgagagaaacattctgcggagtccacacatgagtttaatccacagttctaacgctcatgctcctttcccccagtttcattggataatcagaagttggctccatgggcttggctcccaacagtctttctaaattgcttgtttctgatgaaagagccatttcaccagggtaaatggcacagaggtagtgctatcttcccagaaacacaggattgcctgacagttcttacgaagtgtaaccaaactttagcttaaccacacttctcctcagacagcctttcttgtctaccccataaaaggcacaaagaaggaaaccactagagattcacagagtatctgcttaagagtctgaaaaaaatatcaggtataaatttttttttttttggcatgagacagagaaatctctcggggggggggggggcggcagatcttccaattcaagagactgtttcagagtttccaggaacacacagctttgtcattccaaaggagttctactgaagttgagtttggagagagtagtcagaggaccagaagaacataatatacaatattagtctaaattataccataagtagatttcaatgcccaaagcacatctgaaggcattgtattccatatctacaggcaggcagatgactttaatttctgccacaagggagcaaattgtcaactctcaggtgcgcttattagaatgcacggttccctgggggactgctctgctcgtttgcaggaacttgacttgagcccccccttcccctgttcccactcatttgaagttaccaggtaatttcacacaggcatgattaatcatgctaagcagaggcaggctgcactgggattagagaacagaatccacacgtctcctactgccactaattagctatgtgaccttgaacacataacttctctctaggtttctgttttagtgttgggaagattattttccaaaagtttctaagcttgtaggagcactcgatgttccttccttttaacaatcaggtagctttaaaagggagatagaggtgtgtacatctgaccaattatcaggttcttaagtatcttcctgggcatttcagcatgactttattttttctcttgaaatggaaatttctactcctgcagaatgcctgaagaacatttaaagcaaaaggttttaattttaaaaggctgtgtggtctcttctgggttgcacaatttccctttgtgtccctgcttctgcagatcaaatattgcaaagccattaattaccttcggacgaatacagaggggaccactcgcagagggtctggtgaattgcatcaagcagtacaccagacgtaaagcaagtgaagggtttttcttggtatccagggttcagtggaaaactaaaaggggcagttatgccaagaatgcaaacctagagcttgccaagtgcttctttaaatggctctagccaatgtgagactaaacaatgcattaaataggcatacaacttgctacagttagggaattgcatgtcaactaacagctctttgctgtgtttgaaacacgatctcacatatagataaagacaaacacaactcctcctccgagatgtcgtctccccagtctgacagttcatgggaggtttgaactttccaggcaaccaaaataattctttgggatagaagagcttatgaagttttgtggaaaggtgctgggtgggaactatgccagacaaacagcccagagcaaacagggtaatttgccaccgtggttgtcaaggacatctagctagaggaaggatcaaagcctctgtggtctgtaagtgaggacaatggggaatctccttgggagagaccttgtgcctattctcagtgtgtctggatctgggctgtgggttttgaaataaaaaggaaggcttctggaactttatgggtccaaaagccaagcccacagcttcttgtctccatgaagtacactcatttgctcacttgtattgtttagaagcccacagagatgggactggttctgacggagtacctaagcgatgctggcatggcacattgtatctggacaaggtatttggaagaacagtcaagctatgtgacactcaatttccctttggggtcttaaatgtctacctgcaattgatgatgtaaggtcttctcatcccatggttgaaatacacatcgcacagatggaaatcttgtgttacaacccaccggccactcccactttgatcgggctcccatctggtcctttatcacctttggcaacactttcctggtacccccctagaagcatgtgttccaactaaatagcctcccggcaattctttgagaagaagcaagccttccaaactaaatgctgcaagaagctaaacctttgaggttttctggtagaggaagaagaatatgaaacctgtgaatgatgggtgaggatccccagaacagagggcatcttggatctcacaggaaagggtgtgtgtagtgactgggggagtcctaggcaatgtcttgtacagcagctatctctcatcaaaggaaacttttcttctttactctgttgaaattttcttagtattttctcaatggtctcagaggtaaaaatgcaagttcattacatagatatacctctccccaccccctaagggcctcatttcaagagaatgttgaaaaccaactgcttcataccaggggtcttgctctatattttttcaggggttgactagggtttagggagcatttccctaggctacaaaactgtggacttctgaataatacaagtgacaaaatgagagtatttcatggagacaagaaactgtggacttggctttttgacccatcaagtttcaaaatctccgcacctctcatctcactttgtgtgtacatgagcatgtatgtggtgtatctgttctgtatctgagtgcaagcctgaatgccatcacatacgtggggatgccatccatggatgtaagttcctaactcccaccttgtatgaggcagggtctctcatcactgtgtatgtcagactagctggattgcaagcctctaaggttctcctatgaatacctcccacgtctctttattggagcactacaattgcagacttgcaccaccaccgcatctggctttacatcttcacatttgtgggacaagtgtgacctgctgagcatcttcccagcccatgcctttacatttcttgttcgtctaatacagtaaaccatctctatctgtcaaagtggtgataaagacagagcagggagacaagcagatcacccttctcatcatttatactgatgctatgcacacaattgttactactattgattgtctcaacaatgaattgtttctgccccaagcagaaaaaatagtgagtcaataactaagtggacttttcagatattgaaccttttatggcagattctgcaactgaggctcagatgagagtaaatagatgggctagctaattaggatggtgtgatgtgccaggcaccactctaaactaacatgttcaaaactctctgttcattcaaccccaatatcaacaccgtaaggcaggtcccattttacagatgaagaaattgaggcaccgcatagtttcaaggtctcccactgagtaagtttgcagagctaaggctcaactctggattcttttcaaaagaggccacagtcttggtcttgaacctgtcattctcctgtttataggtcattgatccaggagaagacagtcataatgaatattaacatgtcataaacttgaaagtttttttctaatttcacacagaaacttccatttttcttagtccctcacacaagtccccttgggtatattttaaaaggtagtagcgagcattggagggtcaagataaaagcccagtgtccttttaaacaaacaatatctgtggcctattagctctgtgtgctaatgagggcaaggttataaggtcaattccagatgtatcaatttcaaagagaattgtttttccataggcagggaccatgcccctaacttgtaccagaactcacacaaatgcatgcctggaattcccataggggtgctgtgcaaggaaatgcagatggatggagctcaaagtccacactagccctaagtgagtggtgggtggatgggtgcctttttaaactgtgttgttcttctttcactagacaggctgtatctaataggatgcccaaaggattgaggtggattcataaaattctcttctgagataatgaacaaatttactcattgccccaccaccaccaccacccatgtcaaagcagtgtgaaagtgtttgaaagatgagtatcatccaatcatctttgataacaaagagaaatgacaagcttaggtttatgacctcggactttgtggtcaggtctgaatttctgttctgtccttggaggactgaagttcaaactgaaataaagcaaagcagctggctcttatttcttgaagtgagcggattggctacctttggggaccaactgaaatgatgtcaagaagataaaagaagttaaatggtcctcaggcactagttaagtccagggttctcccttctccaatagcatgaatgcttgttgcttgcaacctagatgtcaagtctgttaaagttaaaggtcatttgctttaacaaaatccccttgttttatagacaagggcatttcagctcaggaagtttaaatgcctgccaaagtcctataaataatgattgacaggtctggaggtagttttctgagctctgcatatcaaaggaagaagtccgagtttataataataaccaaagcctcggaaggtttgtgcaatcaataataacgaaagctaattgcaaagtttcacttaaaccctttaaaaacagtatgctttaacacatgaagaatgtcatcggtttattcagatctgttcctaataagcatgcattggagggatgttttacaaaagccatgaatctggggtagctgaaagggtatccaactttcttttttaattgatttacttctcgctttccccagactgcctgaggtaaagcacatacagtttatttaagggactgtttatagactcttaaaactgaaaaggaccccagaacctctctttcttctggtcgttcttaattgaaaccattcaagatggttggttgtctgtcaacttcttaactacctcaaaggagaaaaactccagaagttcccaaagagcatgttaaaaatggtttcttgccataactgtccaaaattatacctgcggcaagcgtcacttctttcactttgttttacccactggtgtgcttcagacaaaacaaagttataacgggacgtctgtcctctgtgtgggttccagcaaaccagctaatctctgctagtaagctttcatctccacaatggcgctgccctcctcacagaaccaaaagagcatccatctgattgacatgccctctctctatggtacatggggaagaacccataattagctcgtcattggctccttcattttgtaaaatgtctggggaagccacattaattttggatcaactgctctacttatgctggagggagactcacaactgatcatcctggaggttgtgtctgcttccacagaacttaggatagactgggattgtgagctcatttgcaaaattgggtcaacctacacaaagcaagtattagcaaaacaaacaaacaaagcaaacaaacaaaaaaaaaacatactcagaacagttttaataggattttagaacccctctttgttaaatagtttgtattatccataaataaataaataaatatagaggcaaatttctttatgatgtttaaatatcaatccaagatcagaccctgccttccaccatggagagaaatatatacttccaaattgaagttgaaccagcttaaaataaaaaggtatgggctcaataaaactttgtaaataagagcaaaatctagtaaatgtcaactgcgggtacagacatgcaaagggtactctcctttaaaaggtgcttcgaggactgtaaatgcttagtgctgactttcccccacacagtaaatcttaggggatgaaaaggaaactcaataaaatttgttgacaacagttaatgcctgtaagaataattggctctggaaggaaacagaccatgagtgtagcttagagatggccaaaggacagcttctaagttcctggtgatatacctacactgcattctgcaaagaaagctaagcagtttcatcaaataactaggtaggcacgagggaggcgagaagtatgttgtaaagtgtttggcgatcctaatccttggtggttcttcctgggagagccccacaaaaacagttctattcagtttacttggattcaatcttgccagttccaatggatagataccagcagctactgtatcactcaaacattgaacttgacactgatcttcaaagataaatagctacagcctttgaggagttcacctagagggcagagcctggcaaagacatgtcatgagtgatggggaagattcagggagagcttaaagaattgcacttcttttcccaaggttgttttcccttacagcatatgatatacactctttttctaacctctgagtacttcaaaggcaaggtcagtctctcagtcatctcccggtttctcatttatatcttgtgctaccacacacacacacacacacacacacaaaatgcttcccctccctgcccccagtgttttgaagtaaactaaagcaatttaaaaggatcggctcttctcgtgtagagaggattgtggagttgatcagaaagctatcaagaataccttcacatttaaggaaccaaacagggcttgggatttagtttaagtcatgtatatggtgggatgtgatttaaaaaaaaacactcttaatggcagaattcacaacagcacgtgtttcatacagccactgttttgaaatccagaaccctgctaaaagtatcaagtgaccgtatgaattcttttccctttaagttattaaaacacaacttaaacacacgtattgaaatttgatcctcctggtgatcaaatgcaaaaacctttccagcccattaaaactggtttccgttgtcagtgctcaacgctcaagtgtctgtgcaaacacatgtaagtattgcccagttatctacagctgagttgttatttctcgtctcagttttcgttatctgatgtaaacagcacaagcatactcatgtcccgtgcatggaattcctggagtacatcagggtgggtgttacagttcaacctgccactacccagaaggcccttacacaagtgccctgccaagaggagacaaagtccttgggaactggagataagaatgacttatgtcttccaaagagaaaacatggctcgattacagcgagttatagaatgctctcaattcgttgtgcagttgtgttcatgtctcatttcacttgatatagtatgttcttaaaggtgaaacaagtctggtattaaaaaaaaagtcacccacctaatgaactcattcatttctcctacaccagagaactggatggaactgttctattgccagaagagtaagtgaatttattcaaataaaggactggcagggagcacaaagtggaaaatttcccattcaaacagccgaaagcatgtccgtctctgacgctattctgccaagttgtcttttttattttattttgccaaaaccatggtaaatacacattaccagtctccttggtagttcctttcgtagtttcaaacttatatgaataaacttttgcctccttcttacacacacacacacacacacacgcacacgcacacgcacacgcacacgcacacgcacacgcacacacacacacacacacaataccacacaagccacagccactatcacctgcctcaagagaggctggcatttggcaagaagacaagcgagacttcaagagtgtgaatcatctcaggagcctgagcttgggggtgggtgtgggggttcactgaggtgatttgtctccacttgagtgacaggagccctggcaaatgactcacgcccaggttccaagaactctttgcacttccaaagaaatgtacagagttcacatctgtctttcagtttttcactgcattgtaatattctgtgagatggatacctatgaggtagattttttttttcaagtgatcactccccttggtggccattgacttatttacagacattgattcctctgtctccttcccatggactgctgactctctgattgtctgagacctacttttaaaagatatgtggtgctgaagttttcaaagactcctttctagatggatataatacccagggaaggactacatcaaagggacataatgacaaaaggaagaaaagaaagtattaaagtcagtctgcatagagggcatattgataatgacgccatagttcacagttagaaagcttatgtacttacaaacatctcttggcaatgatcaccttttgtccactcatgctggctttgtgttgcatggagacatctactttgttctccatttaattcatttcttaagttcacatgagttcggggtgcaagatccttaccattttgctttaaatttcagaacacccacagtagtcctgtacgccctctggatgtttctatatgtgcccaaatgtctaagaacaaaatctgcaatactttagggttatgctgtctcatttcttcattgggaggaacaggagagtgggggttgaccataaattctggaagcgggccccagaggaagcagttaaaggcaaactcttaaggaagaaaattcgaccctaaatctcccaaacctgccaatgccccactgaagtgttatgcatacattaaggtgatggatatgggggttggggggtggagggtggctgttagccataggcagtcactcagttattcgaccaatccctgtggttataaatccaggaaaccatctacttctgaatcattgtagcagggagaagagggttgggagaggggatgggagagctactcactgaagtaaaagcccctcggtccacacacgaactgaagagcatccaccagctcagccccgcaaagggtctctggtccagctgtggtggagctggtgaaggtgagcaagcagagcgccaggtagaagaggtgtgaagacgacatgatgtgtatctttatctgtcggagggggaaaataaaaaggaggttcaggtatccttctgggtcctgaaaggatggggcagcgatgtgttgactcgcacttggtactccttctcatcattcattcaaacgctctgtcctagaagagcagtgtggcatgaagggcccccgagggacctggcctgagcccatcttgacatcagacaaactgtggttagtccctttgctactgggtcttcagaggttctcctggagcttttatgagttcctattattaataagtagggtaaaagggctacaaacatttattgggtgacaaaagatgcagttattttagtgtgtgcgcgtatatgtgtgtgcttgtggtgggatgtgtttatgtgtgtgtgtggggtgggatccccatgccagtctgatataaaacatctaaattatcaaatattaaattgtgctcagctttacattcaaactgtttcaacttaaataatctaaaacctgaccatttccagatggtacatatattcattatatttattattgctttgaatattaaattaaccagggcatcattctctgtccatagattaagaagattttatactggccagaacagtattaaaaaaatctattattatagccttccagagagagagagagagagaaaggaagggaggcagggagagcagaggtgggggacgaggcggagaaatcttacctgcgaatattagcagctaacacaaccacaggtggaaaaccaaacaagcagtctcaaaacaggaaaatcatgcaagatttaggaatgcaattgtctcacaaaagcattgtgaaaggaaggtgtgattccctctccttacacaccatgaaggtcatagtctgtacctccataacatagtgcaggctgatgaaagtcatgatgtctttatttaattaaaggtttatgtgaggtgagagccttcaggaaaaaaaaaagaaaaaaagaagcctccataacaggggtaaactttcccatatgttgttgttcaatgggggcgtggacagtgggcagaattatcatttaatgaccggtagactgaggtggaaaacccagtgtgtcttgcttctcctgattcttctatgcccctttgtgaagcattcataaatcctgggtataagatttaggacccctctggggggaggggccagtggcctgccatcagacagggcaggcagcagacttctctctggccagctcctctactggaagtcatgggaggtcagaagcaaatgttcaagttttatggctgccttggggaagagggtttctcatttctcttcctgccttaggggagagtgacaagcaggaaaagggaggctggcagcaggtcagggagtttaacaatcatctcccaaacttcaacaggacgtaaatgtaatcttttacgccagggtcctctcttctagctcactatcagactgagagacgttttttaaatgcaggacactgggcttaaaacctgcaagagccttttcttgagcagcagccactctgacttattctctgggaagcactcacggatccctgttatcaactttataacaaaatctaccaaggaacccttgtttggcacaagctagccgatggttagtagccaaatggcacccctgccaaagtcagcattcctgggactccagtcgctcttcattctaagaagcagtcagacactgtggtgacgtcccacttttcagggttgctgcttgtggaaccagcgtgtactttcttccaggaaggcccctaaggtgagcgacttcacccctttcagagacatatgctttcaatattgtggaaagagtcaccagtagagtatgaggtgagccaccctataaaaggggtaacggagatatactggaagctataatttttaaaggaggttttctttttcttttttcttttcttttcttttttcttttttttttttttttgaatctcacagttgaggcaaattcattcaatccccacttgtttggagagtgagactcagagatattgagtttatggccatttccctgtcctgtgtgagtgagctctctacttaatggctctatatcagtggcaaattttactcaactattttaaactcattttcaatttagtggctcgttcttcagcctagcattaggaggggggcaagggacccctaggaggccctgattcttgatctcacaaggtaaatatttcagtagtgtgtatagagtggctggagatgaaaggaactctccactctcaagtcaacgggaaacagaggacatgcaattaaggaggaggtacctccccagttaagcccttggtacctttgctcagtaggatttcagtctggaagtactccatcgccatacaaccaaagacatcagagtttacagaaatgagctaatgtctattgattcctcttagttataaaaagaagacagcggagcttccccttcagtatttttcatggaaacttgaataaatctaacccatcagggcttcatggttctttgtgaaagggcaggcctgtaatccccatgactgttcttagagaacacttccctacactctggcaacagaccaactttagaatgaatgttagttactccagcaaacccatttctgaagcactgccccctacccctgctcagtttcagagagcggtgaaggccagcaggcacctgcaatggttagtttgaaccaactccacagcaactgttactcaatctcacagcctttgtaaatttagactgtcacgagctgtcccaaactgcattttaatagttattttaagggatagtgcatttaagtccagcaagacatatgtacctgtagaattgaaaaactgaaaactgctcaaaccaattttcctttttcctttctgcatggacttatactgaaaaccactgtctgataaatatcaatactagacctctgtacattttcctttagctcagagactagtccagcatacccacagagagtcagagtttatcacaccatggtccccaaacagaaaacaatataggacttgcttaggagttttaaaaaagtccaaaacaagtctccccatatgttctccatttcccctggcccttatttcgtcaaccacaaggaaaaccagtagagagaagccatagatgtaataagaagagggcgaggaagggcctgagcaagagacagccaaaaaaagtcaatcctgaactcagaacactttcctcaaagatcactgataaatccacatctccaaggacctttctgtgttaaacaagtgagatatcaattgattccaggtgtccgaacaacaacaaaaatggctggtcaaaatacaagggcaatagttgtaagtaggtactcactgcaggtgcggtcattttggtaggtccgggtcgtttacacagcaggtcagagtgggtactatgaggccgaggtgaacacaaaactgaggacttaagaacaggtgttgttttgtgggtggggtttgtgaaagcatctagttacatttggacacccaggcaggtatgctctgagcctgggtaaactgccttttgtccatttaaacaatgagtaaattgcacagctgggagttggagtccgtctttttcccccaagggaagccactcatttccattgtatggctatctatctcggctatccagaatagtgattcaagttccagctccttcccttcctcccccatcgtcccctggctcaggcactgggaaataccttgagcctcagagtacaaagccagcaggcgccctgtgtgtaccaatcgctctaggcagctgacctctcttccctgagctatgtttcaaagaccaccacgcatgcagtagctcccttcagccatctcctgctgcaagcacaggaaaaaagttgaagggtattgctagctccgcttctgaaatgttctgcagacccagcagggaaagaaagttcatttggagccgattttccaaacgtggaatgcatgcctgccgaggtaacattccacaatccctttgggacacacaatcccagctgccagaccacacagcgtatatgaacgctgacttcactcctgtaaggtggctgaagcttgctggcagcgcgaggacggcacaattaggtgcttgacaaggttgtctcccgaagtcccaagccacttacttgcctaagaaaaactcatagcgatgaagcatttgaatgcagcacaaaaaaaaacccgctgcactctttgactgggatcttttatgaattaagccctccggcaactgcctccaaggagccggtgacagcggcttagaagtgcttgcaaattgaaaaaacacaagtctggaaggatataattttgctgagaatggaaacttgaagtagggccagtgatcaaaaggagaaggcagaacatagacagcggcaggggcaaacggcagcagcagcagcagcagcagcagcagcagcagcagcagcagcggcaggggcgagcgacagagccagaggcaagtgacagaggcagcacagcagcagcaggggcaagcagcagccgattcacctaaagaggctttgccttgccgcgccgcgcggtgagtctaagagcagagccttaaaccaaaattcaaaccccagctcagtcacgaaagtccccttccaaagagaaaagttggacaagcagccgccagtaagctcctgctttctgagcacagcctgtatctgtttaaaatttctgaatatgcaaagacagcaagttgtctaagagcttttacagaaaagcaaattaaacttcccctaactttgactttctgggcagaagtgcaaagaattcccgattcttggctccaaaaaaaaagaaagaaaaaagcattttttaaaagccttcctatcatctaaaatgtaacttttaatctgtgacatgcctcgtaaataaagtcctgacaaatcacacacatacatagacacagacacaagaacatgctctgaaaaagccaacgcctgcacctgtgagagagaagcactcccgagtttatagtcatctttctcgccccgagccataggctagatttaaaggagtctcttaaaacggcagtgtggaagccctgtggaagcggaggctttagcagaagtaccttgcaatagtttctacccgtacagatacctctgcaaatgcattcatcccccggagctccttttacagctcgcacagaactgcacattcagcaatttgtaaataacccccagttctgaaacaatgcaaattctaaagcaaataaagactctaggcagaagaaaacagtacacagtttaaatacaattctccaacgagttaaaaaaaaaaaaagtaagagatatttaccttcaagaagtcacagaggcagatcttaaataattgagttggaaggctgctgattttccccatcgcttctgaagtacaaagtctggaaatgaattggtgggcagggataatgaggcgaaaaagaaatccagagagatgggagatgttagagcaatgtcacatttcaattttgaggactttattccattgcgcaggctctatctgctctgaatttagcagtgacagtgagatttagcaagcagaagagggatttagagaaaatcctcacatttatctacaaaacacagacactgtagacaggaaacagctgggggaacattcgccttctctctctctccctcttctggcaaagttatcgagtaaggacttttttgggcaccgtgacaaataacatcataccttcgctcttaaaaactggagcacagagactcaccccccccccccctaaaagaatgtgtgtctctgacagggttagcagacattaaatactgaggctgccatagaaaaataggctctgttctctgattaactttccacagggtttgaaggtacacttgtgtgctaatacacctcaccaggattagaggatctaagtgggacacgggggcaactttatattttagggcaaatgcaaaatttgaaggaaaaaaaaaacaaaaaaaggaagaagagactatctccaggaagcacaatgctgttaaccctgaaatgaccagggtaaactagatcgaaaggcagctctcaggggaaggggaggtggaggggatagagtgacccttgtcctagttgccaggcaaggggaatgatctcatttcctaaaacctatagatggccaggcagcagtgggctggctcctgtcaggacactgtgtcatgctttgtgcagagaatcaggctatgctgagatctgggatggattgaaaaataaaatgatcctagttttcaacaaagctggatgcctgtcacctccttgaccccaaggaagcagtatgggaggcacacactgtttcccgttggctgtattgttctctataaatgagtgtgtgtgtgtgtgtgtgagacacagttgtgtgtatgtgtgcatgcatgcatatgtgtgtgtgtgtaagtgtgtgtgtctgtctgtgtctgtgtctgagtgtgtattccaaataataccagctggctagcaatactctctccagggttatgatgtcattcaaatccctcaactgggtaagtggctggcagcatggttcaagccggctgcttctgctatttataatgtataaactcgcctttgccacagggaatggagttctgatcttctgttgatacggtttgtacctatttctcagtggtctttcagaggcagtagataagaaagtgaattatgaaagaaggttacaaaagcccagattagacgctgcatgctttccacggatatctctccaggtgtgctttcccaggggagatggaaatgagccagacttgcctcagtctcttactctctcggactctcagggggatttgaaggtactgacacatcggtggagacagaggccagttggaaactctacactgcctctttacgctgccccatggatagaaacctgcttggggatgtggtgattgtcctcaaatgaaaccagtttggttttgcaaggggcttgggctctttccaaccctctgtgtggtcaatacttcacagcagtgtttacctttcagacaggaacattagaaacctggtgtgagactgttccagtggtgggtgatgctaggtatcacttgatgaaggaatcatgtgatgacagcacctactatgtacttgattagacacacctctggtaaagcaaaaaggagcatgcaacaggcagggagagacacacgttcctgacgtctgttgagtatctgaagcgtgaagacttatgagtggtgggagggggccgcagtctctcagggaggcaggaagtgaaagctttttggaaatggagatggggaaggagagaatgctatgtgaagggcacggggctgggaagttcctgtgggtaggactgactctgagaacacacagaagtgtggcatcatcaggtggtcctgccatatctgcagttgtgggcaatcccttgcacatacagtaacccaaggcttccactaacaggctatcattgagtgcttgatttatgacaacttatggagatggtgtgtgtgtgtgtgtgtgtgtgtgtgtgtgtgtgtgtgagaggggggggagggggagggggaaggagagatggagggagatgggggaaggggaaggaggcagagggagatggagggagagggacagggagagggacaagggacagaataaacagtaaatagttcatcccctcctctttaggaccttgatgagaacattgtatgaaaccaaagacctcctgttttcaagtctttctcagttgagagtttccaggtccttggtttttaagtctggagaactgggtcccggctaggcaccctcatctacttctgggcgcctttcgtgtaagttagtgctttgaatcacctctttccaatgcaattgtagcagactttgtcttggtacattctagaagcttactgcatttctccatgtttgtgactctgactattgtgctttctgggcgctgtgctgtgctgtgcaatgctttgtgctgtgccacgttatactgtgccactgtactggcatgtcctgccatatagttatgctgtgccgtgctgagccgtgatgctctgcagtacacagcacaggtgactgaaccctccattgcttcatctcaagggctgctttgaggactgaacacgtcatcccatgagatactgcaccccatcagtgccaacacagcgaatcacttgggtttatcaccccagtcacccttaaaggataattgacttttaacttatgtcccagtcgatgtcccgatcaaagcaaactgaatttcagtgcaccgtaattgccattagctgtgctgtggccacactctgaggtgaactatcggtttccgtgtgggggtggggagcaatttcctgaagtgattgccatgaatttcaagctggggagtggtctttattagcagggagggtgagctagcaacgaagcaggggtcaataattcctggggaaatgtccattttctttgtagattccaggtgtaaatgtaaagatgaaggggaccttgaactatgggcactgtgcctgtttaggagagaaagcaagaggtacagcaggaagggtctgagggagagctcaggccaggaaaaatcccactggagacgaatatccatggtcattctgaaattagagaatgcttctacagttgcctgtctggaaaaggaatctaacagatatgggaactgtgtgccacaaaaatagctagctgcaaagatgtgctcatcgtgagagcatccactctggagacttggatccacagtttcaccttttgcgtgtgcaatgcctgttggttataaataactctcccctcgagccttctacttgagcggtgtatttgcataaagccacagcttcagaagacttctgacacctttcttttaaaaaagaaaggaaggaagaaagaaaatgaacttgttcattttcagaaagcgaaggttggctgagagtcgcagaaaacgagccattccctggttccctggcctttctgctggagccttatccccagctcctctgtgttccgtagagaggggtcaccttcaaaggtcatgttgtactgttgggcatattaataatatgtctttaatgtagttgctaacattgttagtggtgcgtgtatgtgcgcatgcgcgtggcgaatattacagaggagggaaagagaagacagggagaaagaagaaaaagtaaatagtagaacacatctgaattgaaagcagaaggatggattgtttagggccaagagagagcagggtggagggggaggggagaagagaaggtctgggtggagagttggaggaaaggggctctggcatccccagaggccaccaggcagagaatttggtaacactggtgtccctctttgtgggtcaggttttctggactgagatccaatgtctccaccacatgtggagagcatgcatacataacattgatcttagaggaaagggatgtatcacaaaacacaatgtgctaaagagaggagacctgctaggttcttcacagctcctgcccagagcctccttcctgttgatcctagaaagccatattctatctcggggaactgctgtaactgcttgaaggaacgtctttcccagggggaaaggggacgacaaatccgttcactgaagaaatcggtgtttcttctcaacatcaaacttggatgtgatttctgctaaaatgtcaaaaggacaaacactggaaacagaaaccaaattgatgtgggtttgtgagcaaaacagtcttagtggtggtagatgaggtgtcaccgcaaggggcaagtgtgggctgggagagagagagagagagagagagagagagagagagagagagagagagagagagagagagagagagagagagggagagggagggagggggggagggagaaagagagagagagagagggagggagggagggagggagggagggagggagggagaaagagagagagagagagagagagagagagagagagagagagagagagagagagagagagagagagagagagagagaatttgagagttcatggtacttgtctagattgaaagtgggcaaggatacaccaattccaaacctcgggctagaacccacctcggggctctttccttgggaatttagaaaagcgcgccctcttgtgggcatttgggaaactgccacttcaatctttattgggcatgtgtctgatagagtgtgtgtgttttgtgtgtgtttgtgtgtttgtgtatgtgtgtttgtgttgggggagggttgaacagtcctagactcgagcataagctgtgcatatctttaattaaacattttaaaataaagatgcatatattcacctcactatcatttaaaaggggagaggtgttcagggggaaagaaataccataaacttacgcgatgacttcttcatgtctagtctcctggtatgagcttaaaacacagcgttaaacgaatcagagtacaaaggataaatgatagcaaaagtaaaatattttttaacagcataaagccactgagtaaaatggccaggtttctcattttattaatacaaaaaaaaaaaaaaatgacacggggtgtaaggatcgctggatggaaaaatgatgtattacatgaaacctaaatttagatgctcccgagtggagcttgattcagtcttgtgtactcctcatagtttctgacacctcggttttcaaaatgtgggttagaacacctgcagtcaaagactcactaaatacagacgtgattccatttttaaccctctttctatcccgaatctaccaagaagaaagtttcaatctgaccctggttgttttgaacacctcccccccatcttgcttctccctttactaacaaagggacagaagacctcaaacccaaagtttttagaggtggtagtttctagccagaattcaataacaaggttttatattattaatattaatgtttaacattattataatttacaaggcttgttttaggcatctgattttaagaactcctatttaagagaagggatgctgcatttagaataaacacattattattttctaggaactaatttattttatttttaaagttagtatacaaagtagtgggcttcactatgggttttctctactagacatcattacaatttgttcttattcgcctccctctggcctctctgcccacatctgctcctctcttggccttaaatagctttttcttccactttcatgtcacatgctttccattggtctcttccctcttctttcagatcttctcttcctctccctttcttgtttcatcacacacacacacacacacacacacacacacacacacagagagagagacacacacacttaaatccagagtctgcctatgagaaaaaagaagtatgtattttatgcctttcttaatttgaccttaaataatttgaaattgaatattaagtatacatacccaagtctcaaaagaacaatatatatgtatgtatatgaatgctatatacatagcattcatagtttcatgaaactatgaatgtttaatagttaggacagcacatggatgaagtgtggaagtgtagcagttgagtgtcatgccgcatgacatgttattgtgttgggaaagcaaatgcagttacaagacaaatgctgataacaaaggccacggatgtttaaaaaaaatagcaccctgtaaataggttaattacattctagataggttagatctctgttagtctcactaatgtttggaatcagtctttggaaggatctagagatgttttaacaagctggaattgagttaggggttgaagcacaagctcatttccaagttggaacacaacaagtgctattccaggcatgggtaaggtgagttccaggggttgggatgatataggagatgaggctgtcaccacggtcacagtgtccctttctcctctctctccttggcagcttccttgaatgactggagaatagtctcagtccttcctgtttctcttgtacattgatccctgggatcaacatagagcttaaaacaaaaacaaaagcaaaaacaaaaacaaacaaacaaacaaaccaaccccacaaaaacctatgcagtcatggactgtgttacttgggggggttagaaggacagaattgatagaatcaacacatactagaggggggcactagattggcttatacgatagagcgtaggtaatctaacagcggccacctgaaacttgagaaactgagaatcctacgactccacagcccacttggctggacgcaaccttagtttggtactgaaagctgcaggatttctgtagagctgctggtatccagtccatattgaaatgctggaaaagttagattctggtattatgaaggatggcagcaacagggacatttacaaaatagatgtcctcacaaccaggaagcagaggcaagcaggcaaggcaacgttacctctctggaggaattgggctacctgtggaagatgtcccccattgaggtgaagggtcttcttctctcagatagtcctcctggaaatgccctcagagaccctccctgaggcatgtctctgctgactccatagccaatcctgctgataattaagatttaccataacacagtgtacgttattatccagtttggtttcagcagcctggaggacagctgacgcactgactgatcactccttagtcctcacagagattccattttgaaaaatttgcctgcaacgcttatgttttgggaaacagatttttatggaaacatgagagcgttagacttgataataatttaagaattgcgataaagggtctaattcctaggaaagccctgaagtgtccaggaagcaggattgtcagctcgttccacttcttcacatggctgaggaggttttatcgtgctctctgagacaggaaacatggcctccagcctcacttaaaaaaaaatcaaggaggctcttgggaaccctttagactacttcctgtaggggtcccgtgcatggataaatgttttagtactcaattaaagaggatactttgtatccactggggcctttggtaataagccactttgtaagcaatatactcttgaagcatgagctcacttctaagctgaagcacaatgcaggctgtgtcaggcactgggagtatgagcagagacacataagaatgagagatttcaattgttggggtgatgtgtgagatgaggctgctacccgggactgtatagtccctttatatctttccttgaaccttgaatcaactccttaagacacatgtgtacttacaatatacatttttccaccttacagcctcagcttctttcagagaatgaatattaattatttaatattgatttaataaaattttaagcacatttgcattagtcaagattccttagagaagtataatatatgcatgtagtttttcccttttaaggaactgacttacacagatgtagtgggttggagagcggaaatctataggtagaccagtgggctagaaagccaaggataaattgctcaccaaataaaagcagtttgatatcacaattccttctttttcatctaaggaggccaattactctctagtgactctttaatcaactgggtaaggcatagccacatcatgaatagaaatcaactttactaagaatctgatttatatattaatacttaaaagaaaaaacaaaacaatcacaggaaagccagtgagatagatcagcaggtgaaggtgcttgctgcccttcctgacaacctgagttgtagctccaggaaccataaggtagacaatcagtccccttaagtttgtcagcacacacatgtatatgcttatgtaggcaagctttcatattagtgtgtgacacacacatacaaaagtgcttacacacacactaaatgaaaattaataaacttaaaaaatatagtaacatttaaaggacatctgactaagcaggtgagctgacatggaattaaccacatcaccaatggcttgccaaagataccctcactgagcctcactaaaactgaaccatgagactatgaatctttctcaagttacaaagaagaaatctcaagtgaatggtccacgtttttcaattttacgcttttatctgtgctgttctttttcttcaaatggttggctggctcacagactgctgcttgattatggctcaaaggatgttctcttccagcccttaccttcaccatgccattaccattttacaaaggtgctgtttactggtgaaagtgttttggatttttttttttctgcagaaggaaataaatatacataaagcgcacacgcaccttcacaccactcaaacacacgcacacaagcacctacttaaccatctgcgctgtgtttttctagatgagacgaagtgtgttcattacctcacggtgcaatctgttgtttggatcagtggagagaaatttcaggcctaatcaagcccaggttgtgtttggggtgaggcccgatgaagacagacatttgtacaccctttgccttcagagggtgcttggtcttgttggtgtcataacactttgagtagcagagtgataagagattaaaaaaacatttataatgctgttctgcgatctctgatttctttttcattgagcagctactacagcatttattaaaaacatcattttctagtgctaggtgctatgcacactctctgttatcaaggtcaactcaacttctagtgtatgtatccatttgtataggtgcatacttattttctcagtgttcctttttgttcttcaaggactctggacctctccaagggtgagatcttggcttgcttctgtgacaacactacacaattactcagcaggcatcaccatatacttccattcccttccaatgtccttaagacccacccccttcctttctacttttctccctcatcctccattggattaatgaatgcctcattactgtgtggaattcttttttctctttttaaaccagtcttcccccaagcaatccagccaatggccattgctggagcattttcctaatatgttctgttcatgagtctcacactgcagggacatgagatgggtcctcaaagtcctttggcctgtttaagtccgcctcttaactttaaaagcatactcttcctcaatagcctcatctgttgctagtcccagtatagcatctgcacagctatgttgtcaccatttatcacatatacctagctctgagtatacttctaggtatttaatggctggccaatagaattggtcagtgaatgatgatatataactgctactactatcgagtatatgttatatccaattttttcttttgtcttactttaatgatctcatttaatgatctcatgtactttaatggaatattctattttcatttttacttaaaaaggcttagtgccttagttctaggaatatatgacactctcaagatagctgtgaggtacattaggagagtaaggagaacttaagtgcctttgctaatgtatggatagtaaattacagtccccagatttaagttcaggttggtctgatatatagtgtgatctagttggtacaggtccagacagactttcttgcagactggtctgcctctactgaaacaaagcatgaagcccgaggagtacaattagacatttactttgcagaaggaggaagctc

SEQ ID NO: 53 - DNA, 28892 bp, Homo sapiens
ccggaggaaaaggttttgtttctcttacagaatggcacttccagggctgggcagaagctatgagctagaagaggctgacagggcctggtcttgtgctgacctggtggatttggaaaggaaggaaaatatgtatcagaaccactcatgttcgctcgctcctgccgaggggaacagaaggggcaggctgggaggagagataggggaatcacaaaatttaagggcattagctttggaaatcttcttagaaaaacaactctggcaagcccttggattattgatgcggaaagcaaggccaagggatgaaaaggaacttgtttgggatctcatagtagaaggtccagggctggaaactaggcctcctaaatgcctgagccagtcagtctttctactatgagactgacttctctgtctccctgtaacatcctcagaatattggagttgaaattggtctgttccaagtcttcagatccacgaagagacatacttagcttttagcagctgagtattcccaaggaaaaacatcaaccactacacttcaggtgggctggctacttgctgtatgtcaagtattcatccaagcattgtgtacagtcactcattccgcccttgcaacactacgacagcaccaattatcatctccaattgtatatagatactgccgcacagggaggctcagaaacttgcccaaggtcacacagatgggaaagggcagagctgggttgcaaacccagtccgactccagggcccgcacacttaaccaccatgctctgctgcaaagacaagcccaaagacagagcacatcttggggtttccaataacagaacacttggacccagggtagggctgggggttgagcaaagtggggaaggcacttccagcctttgctgtcagaggtatataaggtctgccacataagagaggctcaagtgcacaacccttagccgctttcgtgaaaccagttgactacctgataccaatttatatccaacccactgcttgaggcacctgaattcaaggttcttgctgggaacagtctcagatcacccaaaagccaaggtacaaacagattctccttaattacttgaaagaataatactgtttagaaagtattccttgtattttaagtattttaatcttaaaaagaatacttttaaaatcatcaaaagagtatcagaaccttgttgggcctccttaaactattttgaactacatctgaaggtcgagacaacttagggcctctggagttcttagtccagcaccctgggaaaaggagtttctttttcccctccttctatagatggtctcccacaatcaggtgggcaaccagggattgagctttaatatgaccacacaatgtctgacccagttcctaaaagggtgccctccttataaaatgatttctaagttcaccagagcacttagagctcacctactgtgtgtgccaggcaaatctgcatgggatgagacgagaatggcaagccaatgatattgatttaattggacaaattctggccagtggggctaggaaatgtctgtttttattttcaatgttgttctaaaaactgagaaagcacaagagttaccaaagactaagcagggtttttaatgccccttagaattaaagaggagggagagaggagaataaaaggcagaagaagaaagcagagcccaaaataagcctgcagtagagcctgtccaacagctctgtgccccttgaccacacccagcctctagaacctagtcctaggcctggggccccttggagaaggggtttacagtaatgacaggtcactggcaaatcaaccccagaactcccatgggttttgacttgaaaccacaaacaccgcttgtgaggcactgtagcttccgtgacatgtgagaggctcacaggagctgctaaactgaaagaccaccctggctatttggaaactctgaataaagaatacagcagtaggcttctcccttgtctacccaagccaggtgccctttgggtacatcctctgcacctgcctctgaggccacactttgatcattctcctcctacttgtcctcacccagagatttctgtgaaacacttacagcattcattctctaagggtggtctgagaaaccctgagaggtcttcccttttccaggggaaaattcttatgctccaactaaaacggcatattacaacagaccgcatgtaagagcagttgtgaggatcctgcttctatcaagccagagagttaaaaatgcttggaaaaaaatgcagaacactgccactcttctcactaaatgtgttttggtttggaaaatagttacatctcatttaaaaatgccatgttaacatgtaagggtttattattgtttatgactttaaaaagatgtcataggaggtatttttaaaaatttatcagttttactttctaatatgataaatgtttacacatatatgtatatataactatatacatatatatgtatatataactatatacatatatatgtatatataacatatacatatatatgtatatataacatatacatatatatgtatatataactatatacatatatatgtatatataactatatacatatatatgtatatataactatatacatatatatgtatatataactatatacatatatatgtatatataacccacataagtgaaagctctttgggggtcctctataactttgaagatgtaaaagagtcctggatccacatagttcgccaacagctgacttagggaaccgggggcaaggctggacgcagttgctcgcacccactccctttcccttctcccttagtctatgagctaagaggggcacatgtaaatgacagtcatagtggaagtagcatgaatccagggtgggaggaagcaactgcatcttcatgtgtgatgcagctgtgcatccaaaatgcacaaaacacacggagtatggggaggattgagagtcagtggcacgttttagaggtaaggaccagaatgggcaggatgatgtccttctgagcaaagtgctcaacttcctcctctctctcttttttttctttttttttcttttttttttttttttttttttttgagacagagtcttgctctgtcgcccaggctggagcacagtggcgcgatctctgctcactgcagcctcagcctcccagattcaagtgattctcctgcctcagcctcaccacgcccagctaatttttgtatttttagtagagacagggtttcaccatgttggccaggctggtcttgaactactgacctagtgatccgcccatctcggcctcccaaagtgctgggattacaggcgtgagccaccgcgcctggcccctctcctctcttttataaggtttctggaaggtgttgctcctgtaggggtactgcagtgggaaggcaggccaaactatgctttataacactgtgacactcatggatcagagacaaaatagaaacaccattctgtctgaaaacactccaaggcagaaatcttcccctaagacaaaaatatctaagccaccctcactatcattcccaattcctaaacttaaggtacccaaggagtacaaaatagattcataactgtttaatggatggaaacttattgtcacagactttcaacttcttaccaccacaacctcacacaccgaacacatcttagacagctgcccctaattgttgctgcaggcccagagaacccagagtgatttgatacttacatgagtaaaggaattaggtactgatctgaaaaagaattgcattcagattctacctttgccattaactacctctaggacctgggaaagtcttcttctctaggcctctgtttgcccatttataaaagaagacacgtgaatttgataagaccccctcttcttctgacgtccatatagaattttaacattccagcagccatggaggagttaacatccgcctggaagagcactaattagtaatcagatcaattcttttaaaaactggaaaagctataataggtataggcatatagtttgtaaggacagtggtttcttcagatgaatccattctctacttctactttataagagatggaagaacagacatatagccatgtagcactacaaaaagtttaggaagcacatgctcagccgcccagtcagccaacaaatatttagtgagaaccttggatgtgcccagaaccatgctgagtactgagcaaacaacactcatcaaaaacagatacaggccctgccctcgaagtggtcacagtctcacaggagagacagaggtcaatcaaatgatcacatagccacatgtctaattacaaactgacataaatactacagaggggtgggagcaaggtgttctgagaagatacacccagggggcctgacctagactggggaatgatgaactcatttaaggaaggaacatctgagctgagagctgaaggatgaagacaggaggagagcaggaagggagaactaaatgtgcaaaggccctgtgataggagagagaggggataaatcactgggcatagtggctggtgcaatgtaagcccagccacttggaggctgaggcaagaggattacttgagcctaggagttcaaaaacagcctgggcaacatagcaagaccctgtctctttaaaaaaaaaaaaagagagagagagagcatgcggatcatttgaaaaaaaagaagaagaaagtcaatgaggctggagtgcagagggaagtagaaagtgaagagtgccgcaagttgaagcagaagagataggcagtgtcagatgataaaggaagttatagaaaacattagaatatgagtccttatttgaccaagagagggaaagtgggaagccatggaagggttcaagtagcaacagagtcatgatcagattggtgcttggaaataattactcttgctacaacgtggagaacggtctagagaatggatattagaataacaatttggcatttattttggagtccaggagagatgagacagtgttggggtgattagacccaacactaggccatgggggctacaaagtccagcagagtcaaaggaatgagaaaagacaagttaagggtgcataaaatgggtccagtgggccaacactggtatggaggctgcaaaggccctgagctctgggagcccacactatttattggtgatcaaacaaagaagcaggtggtgaggacgtgggggtaaacaggtgagggcgtgaggatgtgggggtagaaaggtagtggtgcatcaagcatagctgtgatggtttagcattttctttgacacatatagaatatgctctgctgctcaagataatggagagcatgtttacgagcctgggagagcaaccaacaagtctgtgcacattccatccaagccacgagggattttatgccctgggcttagatttgtggtgcagcagggcagccttctaccctttggcacagagcttggtgttccaaaggccacgagcggttttagaccctggaccccggacatctcccaagactcttttatattatgacagacaagccagtcctgcctcagctcttctaccaacagatagtagcttgaaccagacagtcattgctggtgatgatggaaatggagacaaatcagtagattagagaaatgtttatgaagaaaaatgtggaggttctggtgatagattgaacatagattggcaaggaagagggagggaccaacaaatcatttctagagttaattgatagttccatttactgagcgagggtgcactggatgaaggtgaaaccagagagagatgattttactctcagatacagaatcaactacataaattggcaggggaagacagtacaaaataaaaatgtggaaccccctgctcaacagttattgagaatttcaagatggtggtagcagagtaaggggaggacttttttagtcatgggaccctgtgtgactgcagaagtcacttatctacaaacccagccctgcttggatatgttgggttggaggtgccagccatccagtggagactggagcaaactaaagcgcaccagagggacagtcctggagctaaaagaatccatttgtgccccacactcaggagcccactagttatcctaggtagtcatgcagacagagcagaaacaactatggtcctctgggtggccaaggctcaaacacctggtgtcctggtccctgataagccaaatttctcatatgagaagttacagagcacagtgtccatcccctaaggaaaatccaaattgcctgatttggtgccatagttgcacaaaggggaattccacattggctgcccaaagatcagcccttccgctcatctgtggtttgcagtgtctgccggccatgatcctcggaagggcgcttaatccggtttgcataacccttgttccattccacctaagggccagccccagcccgggctcctcttaaacttctggcccaccaggcgtttattctgaagtaccccagacactatcaaagccaatgtcaggaaagcccagaggaatacagtgctcacagactcctgtctccttgcaccccaaactggccacactttgggtgtgtgataggcattggggtctgttgcagcacagcttctgaggaagcctctgtcctaggagctgaggaagcttattcgagggaatactagaaatttcaagctggcaaagctattttacacactaaatgtcctggataagaagaaatgaaactcccgttatcagctttaaaaaataactactaatggcaaataggagtcaagcccggaggggcttcttcatcaggacagttgtcacccatccccaagatgggcacggtctcaccttctctgcctgcatcgtcaacctgcctgctctctgccggctgaccgtgttgcccaacaagctgtctaaacccagagtccagcaagcccggatccctgaaccttccctctgcagctccagagccaccctcacaaggctgctagcctgctccccactcttgggtttgagctgcagaattgcagtaaggcatggggtaactacaccaagaaggctgccattttgcttagcatgagagtagctgggaggcagattctttttttttttttttttttgagacggagtctcgctctgtcgcccaggctggagtgcagtgacgcgatctcggctcactgcaacctccgcctcccaggttcacgccattcttctgcctcagcctcccaagtagctgggactacaggcgccaaccaccacacctagctaaattttttttttttttttttttttttttgagacggagtctcgctctgtcgcccaggctggagtgcagtgacgcgatctcggctcactgcaagctccgcctcccaggttcacgccattctcctgcctcagcctcccgagtagctgggactacaggcacctgccaccacgcccagctaattttttctatttttagtagagacagggtttcaccgtgttagccagggtggtctcaatctcctgacctcgtgatccgtccacctcggcctcccaaagtgttgggattacaggcgtgagccaccgtgcccgacaagggaggcagattcttttttttttttttttttttttttttgtagttgcaagatttaatacagtgaaaacagagctcccatacaaagggaagggacccaaagagggtagccattgccggcttggatgcccgggtttatgtcccgatcattgtccctcccgctgtgctctcaggcgatagatgattggctatttctttacctcccgtttttgcctaattagcattttagtgagctctctttaccacctgattggtcgggtgtgagctaagttgcaagccccgtgtttaaaggtatatgcggtcaccttcccagctaggcttagggattcttagttggtctaggaaatccagctagtcctgtctctcagtccccgctctcaacaggaaaacccaagtgctgttggggaggttggccgatgactgctctaatgggaggcagattctttataagatcttgtaaactgtagaatgcaccctccaaaatctatttgcataagcacacacacacacacacacacacacaccccagcagttcttgcctgcccagattcctctgcagctaaagtgatgaaacttactgggcggagcttcctaaaaagattattagggtctcctgggttggtgtgcctttaaacctttggactttaccacctcctatctctcctatctccttgcaacaaaggttaggagaacaagaatgcagaaaaaacgggtcctggatgacatctgagtgcctgctttgggcttcttgatgagtgagacagaaaataaaatacaaccccctcttttaaaagccatgcttactcaggttttccttcatttgcagctaaatacagaaatgagagaatattttggagcagggatggaagaagagaggtattccccttcccacaaccttctgatttcccagtacatcccccactggaaaaattcatttaaaatcagtataataagcattgattagatgcctactatgcatctgggcttgagggcaaactggactcaggccttttggcctcaagaagctcacagtgtgagagtggcatttgtgtcctcttgaaattcacaggactaaattgtgcccaggctgacattctatccatccataggtgcctgccttctcacttccctctcttcatgggctcttgccttgtaccaaaatccaaacccaaatctcctcacatgtgagtgttggcattcatgtctcagacatgacctatgggcttgggacttttccccgtggaccccagtgacttttcagatgaacaggtatcttcaaaaacttgagaaataggagtcctgtttgttgttcttgttgctttgtcaatataaggacacagggtctttattcaaatgttcatatctatctcttgacagaaatactatgagacatattgatggagaagccgttatctccatatgctaaatgaggacttgcaccagggaacttgcccatggttctctccaaccacttaaattctgaaattttgaaatgagagtggacagtaatttcaaatcaatggggaaagaatcaaatcttcagcaaatggcttgagataattagctacacatttcagaacaaataaagaagtcagatccgggccgggcacagtggctcatgcctgtaatctcagcactctgggaggccaaggcgggcggatcataaggtcaggagatcgagaccatcctggttaacacagtgaaaccccgtctctaataaaaatacaaaaaaaaataaaaaaacttagccgggcgtggtgccaggcgcctgtagtcccagctactcgggacgctgaggcaggagaatggcttgaactcgggaggcagagcttgcagtgagctgagatcatgccactgcactccagcctgggcaacagagcgagactctgtctcaaaaaaaaaaaagaagtcagatcctaacctcaaccctatttaacagattatagatgaaagaaaggtacaaatggcttttacatacctcccttctccctgacattttgtatgtgtgtgtgtgtgtatttacacacacatctcatataaggaaattgaagggaggctgcctgcatccctgagtcactctccctctccttctgaatgcttacctgtgcccagaccacctccttagcctcgcaccctccaggcttacagggcactcttctatgcccatcccaagtatagctgataccttccaagggccagacttggtgctaagtaccaagtacgcaaagattaataaaacaatgtcctgtttcagggagctcaaagctgattcggcagggcatggtgtgtacatgaatgataaccacgtagggttgcaggtttcctagtgaggtaagcacaaggcaagatgggaaacaaaggaaggaggggttcacagcctcacccagagtccagaacccctggcctgcctggtgcccatgctgagtccacttctggaacacccagctcagagagggggttagacctgcaggctaacacagacacagcccagaaaacccaggagccgagggggaaggagaaaggtgcaagaaggggaaacccaggtcctggtccccttctctctgcttcctggcagcagaactcagacagaacccttaagccagtctaagtctggcaggaccagtaagttctgagttagctccatactagtttctagcaggctctttctcacttcctgattcttaggtttctacattgacactccctgaagagttgggaagagacaccacagtcccctgaccctgatccataggtcacacagcagggacatccacagggtgggcgtgggccctctcatccctccctcccactcacttcacgctggctgggccccaaggtgtttgcaccccttgcagtgagtgaccttctctagtgcagcaagctcagaacctgctgccactggagttgtcccattgctgatgcagaaaggtgaagaactagcagaacactggaaatgccctccatctgggtccatggctacttaagctcaatgctccctggcaggcaggaggacaggtgctattgccctgttgggacagatgaaaaacagacacagggaggatgagtgatttgccctgactatagagtggcagggccaaggcagagcccaggcctcctgcacctaggtcagtgttcctcccagttacagtctaaactggaatggcaggcaaagcccctgtggaaggggaaggtgaaggctcaatcaaaggatccccagagactttccagatatctgaagaagtcctgatgtcactgccccggtccttccccaggtagagcaacactcctcgccgcaacccaactggctccccttaccttctacacacacacacacacacacacacacacacacacacacacacacaaatccaagacaacactactaaggcttctttgggaaggggaagtagggataggtaagaggaaagtaagggacctcctatccagcctccatggaatcctgacttcttttccttgttatttcaacttcttccaccccatcttttaaactttagactccagccacagaagcttacaactaaaagaaactctaaggccaatttaatccaaggtttcattctatgtgctggagatggtgtacagtagggtgaggaaaccaaattctcagttggcactggtgtacccttgtacaggtgatgtaatatctctgtgcctcagtttgctcactataaaatagagacggtaggggtcatggtgagcactacctgactagcatataagaagctttcagcaagtgcagactactcttacccacttcccccaagcacagttggggtgggggacagctgaagaggtggaaacatgtgcctgagaatcctaatgaaatcggggtaaaggagcctggaacacatcctgtgaccccgcctgtactgtaggaagccagtctctggaaagtaaaatggaagggctgcttgggaactttgaggatatttagcccaccccctcatttttacttggggaaactaaggcccagagacctaaggtgactgcctaagttagcaaggagaagtcttgggtattcatcccaggttggggggacccaattatttctcaatcccattgtattctggaatgggcaatttgtccacgtcactgtgacctaggaacacgcgaatgagaacccacagctgagggcctctgcgcacagaacagctgttctccccaggaaatcaactttttttaattgagaagctaaaaaattattctaagagaggtagcccatcctaaaaatagctgtaatgcagaagttcatgttcaaccaatcatttttgcttacgatgcaaaaattgaaaactaagtttattagagaggttagagaaggaggagctctaagcagaaaaaatcctgtgccgggaaaccttgattgtggctttttaatgaatgaagaggcctccctgagcttacaatataaaagggggacagagaggtgaaggtctacacatcaggggcttgctcttgcaaaaccaaaccacaagacagacttgcaaaagaaggcatgcacagctcagcactgctctgttgcctggtcctcctgactggggtgagggccagcccaggccagggcacccagtctgagaacagctgcacccacttcccaggcaacctgcctaacatgcttcgagatctccgagatgccttcagcagagtgaagactttctttgtgagtatgattccttcctgtcctttctctcttcctgggactgcctgaactagacattctcctggaactataagaaccctcctcctgcgcctccacctccatccccaacacctattcccccaaacttaaattcttaagagaatcctagatcaagccatgggtttggtgagttaagctaagccagatgatacagtaaatgtgcaggaaacctgccttataaagtaaatgcgttctctctcgtgctgagaaacttataagatcctgctggcgctctatactttattggctaggagaagtaaagaaatgtctgattcgaggtgaagatgctccccatgccttgcagcagggaaatttaaattgcctctgcttagagcgtttccagacctgaaagaccagtggtttagggaagcactctacatgagggaaacctgcattagaaggagcttcttaatccctgggatctttccaagctaaactggatgtctacagtggggagaaagaaaagcagagaacaggacatgaggggggctcaaggccccgaagggttgacataggtgtcccttaaagccgaatgtagctccgcagaaagaagaccaggactgagtcaagcttctgctttcccttcaaaatcggccagattttttaaataacttgactctgaggaggaggacctgatttaagtgatggtcccatcactgttgaatcctctgtttttaaaactccccttttgatttttttgggccagagccaattttatttaaaaaaaaaaatctctaaatgaaagggcatcaaaaagaccgcatttcagttatttccccaaacctcaagttcattctccttttgttcttcctgcagcaaatgaaggatcagctggacaacttgttgttaaaggagtccttgctggaggactttaaggtgagagcaggggcggggtgctgggggagtgtgcagcatgattaagggaagggagactctgcttcctgattgcagggaattgggtttgtttccttcgctttgaaaaggagaagtgggaagatgttaactcagcacatccagcagccagagggtttacaaagggctcagtcccttcggggaggcttctggtgaaggaggatcgctagaaccaagctgtcctcttaagctagttgcagcagcccctcctcccagccacctccgccaatctctcactcacctttggctcctgcccttagggttacctgggttgccaagccttgtctgagatgatccagttttacctggaggaggtgatgccccaagctgagaaccaagacccagacatcaaggcgcatgtgaactccctgggggagaacctgaagaccctcaggctgaggctacggcgctgtgtaagtagcagatcagttttttcccttgcagctgcccccaaaataccatctcctacagaccagcagggacactcacatccacagacacagcaaagacacagactggcagagctagctgtaaatgaggaaagactcctggagtcagatctcttgctcatttctctttgagcaggcgttgggggtggctgctaggcatttacatgtgaaatttgcaaacagctttcctgttatttgtgagtcatttgtgggttattaactactcccctctctcttcataaaaggagcccagagcttcagtcaggcctccactgcctctttgtaactagaccctgggcggggagctaaggttcccaagcagaggaaacatcattcacctcttttaatctcaatgttttgaaagcaaagctctaagaagggcccaattgactgacaggatttcccctggcattttagaagggacaagggggctattcatccccaggctagtgtctatgagtaattcctccaggtaatttatttctccaactgaaatgatgccctcactactaatggtttcccctgttctgtcaccaatattggaaaatcagttggtgtctatttgtaggacaaggctatgtgaagggtttggtcccagtagcttccctcctcagatgcttagaagtgttcctcggtggctgtgactgacggggaggaacaggagagagaggcagaaaaggacaggctgaagaatgcctcgctcagcactgcaggagatactgtagagttctgggggaggaaggaatcccaagacctgggttgtcatccaagccttgcaaacatcttggagtgagtcctggagaaatacatttaactcccagggccatggaagcagggctcagttctctctgggagctgtgaggcaaggcatttggataaatctggcctcctcatgatgccaccagcttgtcccctaagtgtgatggacatggagctggaagccaggatcaccaacactttctcttttcttccacagcatcgatttcttccctgtgaaaacaagagcaaggccgtggagcaggtgaagaatgcctttaataaggtgagcttggatggtggcagagagggtctgcagagcacaacccatgcccactccccaaccccaaagcatggaaggtggtggggactcaataggccccattcttcattggagagagtgtgggaacctgacagatggtatgacctgctcagccagtgaggagctgctgccttgattgtatttgttttctgttaagtgtctttgggggtttctaaatgactgctcgctgcctttgcaggcttgcgggttaggctggccggccagcctgtgaacacagtgagctgcatgctggggagagtgacaaaggaaacagaaagtacagaaagtagcttgttgggaatctaggctgaacccacacgtgcaggaagctggcacataaatgtgcacatacaaatacacctgggggttcagcccagactccccagaactcagaatgagcaggaagctggattctcacttaacctggagttggttcaagcccgctttccatctgcccttcgcacctgcggaggtgcctgagaatgtcagttcccaaacgaaatggggtttcacacttccaactgtgcgtgaactttttcagtctgatttcccagaaaccgtgcggcctatgtcctcctcgtgggctggggacagacactgcacagagtgccaacatcagggggtgtgaatttctcatagtaggtcagggcggcagggcagggcctgctcagtgtgttggtgggagaacacagacatttaaaaggctccctcctctcctctcaccgtcttgctttcgaagcgcttcctctaatgtcttttcatcaaactctgcataatcatcatgtgaatacgtgacctttaaaattgttgaaaaggcatcattttgaagacagtgctttgcaaaatgaatgctccccttgctagggggaggcctggaggagatgaaggtcaatgcacagcctttcccaaggcagctaggcctatcctctggtttacttcccagcgtgagggagaacaagcaacctctgcactcaaggtcatgcccatccatgagcatgagggaggggagcctatttagtccccagaaaggattttaactgtatgtttcttatctctctgcacagctccaagagaaaggcatctacaaagccatgagtgagtttgacatcttcatcaactacatagaagcctacatgacaatgaagatacgaaactgagacatcagggtggcgactctatagactctaggacataaattagaggtctccaaaatcggatctggggctctgggatagctgacccagccccttgagaaaccttattgtacctctcttatagaatatttattacctctgatacctcaacccccatttctatttatttactgagcttctctgtgaacgatttagaaagaagcccaatattataatttttttcaatatttattattttcacctgtttttaagctgtttccatagggtgacacactatggtatttgagtgttttaagataaattataagttacataagggaggaaaaaaaatgttctttggggagccaacagaagcttccattccaagcctgaccacgctttctagctgttgagctgttttccctgacctccctctaatttatcttgtctctgggcttggggcttcctaactgctacaaatactcttaggaagagaaaccagggagcccctttgatgattaattcaccttccagtgtctcggagggattcccctaacctcattccccaaccacttcattcttgaaagctgtggccagcttgttatttataacaacctaaatttggttctaggccgggcgcggtggctcacgcctgtaatcccagcactttgggaggctgaggcgggtggatcacttgaggtcaggagttcctaaccagcctggtcaacatggtgaaaccccgtctctactaaaaatacaaaaattagccgggcatggtggcgcgcacctgtaatcccagctacttgggaggctgaggcaagagaattgcttgaacccaggagatggaagttgcagtgagctgatatcatgcccctgtactccagcctgggtgacagagcaagactctgtctcaaaaaataaaaataaaaataaatttggttctaatagaactcagttttaactagaatttattcaattcctctgggaatgttacattgtttgtctgtcttcatagcagattttaattttgaataaataaatgtatcttattcacatcatgttctggtgtcagttgactcttgtctgactaaaattgttctctcaaagctcccaagacaaaagagagtgggtgaatgaattctgcatttcagagaaaggaagccagctaccccctacccccaggagagagggaaggctccaaacctgatcagagaaaaagctattctcactgcaaaagccagtagcaaagacatcatggtcttcccacaactcaatcctttaaagatttgctcctaaatccttaaagatcatgctgattttcaaggctaacggggagattctgtaggtaccaaaattagaaaggtaaacaggggaaggttttttggaggttgtttttgtttttgttgttgcttttcgagacggagtctcgccctgtctccaggctggagtgcaatggcatgatctcagctcactgcaacctccgcctcccaggttcaagtgattctcctgcctcagcctcccaagtagctgggactacaggcatgtgccaccacgcccggctaattttttgcatttttagtacagatggggtttcaccatgttggccaggctggttaggaactcctggcctcaagtgatccgcctgcctcagtctcccaaattgctgggattacaggcgtgagccaccacacccggccaggggaagtttttagggtgaatacaaattgcctgggttatcctgaggattaagataatgagctaacagggcttctggcactaggagatgttcgcagtgcgtatagttggttgttattggttatcacaaccaaaaactcccgccaaatcctctttgagctgagatcagaggcaacagggctggacccaacagagttgaaaataagcaaattagcccacttgagaggatagccaaggacataagctgctgctctttctgtcccctctctgagccaccagacaaatgtgagattggcttctgactgcggtctgctgggaggggcacggtggctggggaagccctactcaaagccccgtgacttagaggagagaggaggaaaaaaatgagctgagtaaacactagtccccctcacgctctgcctgggcagccctggtctggggaaggctgggagcggacaggctgtggtcagtttttcagtaagacctgactcacttcggttaaagtaaccataggaaggaagtgggaaacatcaaagcgaaaattctgagatgaaagggtaggagtaagaatggaggttagcagaagataaggagagggggcctgaagctctctactctgaggctgtccatcctgaactgaagaagacatcctgagtctgtgaaaggaaaatcttggggcctcaaaatcaccaagctaaagggaaaagtcaagctgggaactactcagggcaaacctgcctcccattctattcaaagtcatccctctgttcactgagatagatgcatatctgatagcctcctttggaaaagaatcagaaactcaaaagaatgcaaccatttgtctcttacctacctgtgacctggaagccccttccctgctttgagttgtccccatctttctggatggaaccaatgtacttcttacatatattgattgatgtctcatgtctccctaaaatgtataaaaccaaactgtgccccaaccaccttgggcacatgtcatcagaacttcctgaggctgtgtgacaaagctgtgtcacgggcacatgtcctcaaccttggcaaaataaactttctaaattaactgagacctgtcttaaattttcagggttcacaagtcccctggcctggaaggcttaggccattagccttccaggcaatgcatactgactttagtttgagcctggcatttcatctgagcgaagtgggcatctgaaacaaacagaaactcacctgaaaaaaagctgtacagctgaaaagatgttaatgatagctacaatttattaagcaactacagtttattaagctagtcacttattttaagccatttggtatgtattatgtagcaataagatggcattattgctgttttctccaagaggaagctgatagtcatttttttctgttacatttgctttattgggatttaataatctaacattctgtagatcatatttgacagtcagggtttctaaacaaccatattaacccagctttttaaatcatgagttgatcacaggttaacctgggagaaaacataggctctgcacttccaatttatcatctgtttgtgtgtataattgttccagtatacctgatatttatgttaatggcaatatgaacattgactaaagtcatttgctggctactttgctaagtacttgatatatattagctcattaattatcaggtaaaactattaggcactattaatatctccattttttcatgtagtgaaaatgagacccagagaagctatataatttacctttggtcatccagctattaaaagacagtccgtggtcttaatgattatcctacactcctaaagtcattttcacaggtaaattactgcatcattcttctttcctaatataattctgtttgtatcatgaaaaattaagatacaggttttatagtatgttgtgtatccacttttgtttgtctcaagatgtttttaaatttctcttttaatttcttctttgacccactggctgtctgggagcatgagaaatgtcaatctggcttggccacatgggtaacatggagaatggagaactgagtatagaataaaatacttttctctttgtattaattatctattgctgtcttcaaaatttagctgcttaaaacaacagtcatttgttatctcacagcttctgtaagtcaggagtctgggagtgacaactaggaattccatctcaggatttctaatgaggctttgtcagaagtacagccagggctgcagtcacctggtggcctgactgggctaacggattcatgagtaacatggcacactcacagggctgttggcaggtggccttggttcttcttcacagggcttcttgagtgtcctcgcaacatggcagctgtcctccccagagccaatgatgcaagagagaataaggagaaagttgcagtatattttacgacctaattccagaaatctcacaccatcacttctgctatattccgtttgttagaagtgaaccagtaagtctagcccacattcaagggaaaaggaattagattctgccttttgaagggaggagtgtccaagaatttgtgcacctattttaaaacaatcacaaccttttaagaatctagaagaaatagttttgcgctcttgagctggcagggcaaaggggaggagttgggtgggcctcagtgtgcctggataggccatcatcatgcacactcccaccagtcctctctcataggctcactctaatagatttatttctctaaggcttagtttctcatctggaatactagcaaaacgtctccccaggtgctatggcctgaatgtttgtgtctcaccaaaattcatattttaaagccctttcccccagtgtgatggtacttgaagtggggaactttttgaggtgagtagggttagatgaggtcataagggtgggaccctcaggatgagattagtgcccttatgaggaagacactagagagcttgctgtcttccccccactacccccaagtgtgctcaaagaagaggtcatgtgagcacacagtgagatgacggccacctccaagccaagagaagaggactcagaatgaaacctgccttgccagcaccttgattttggacttcctagcctccagaacattgagaaaacacgtttttgttgtttaagccacccagtctgtggtattttgctatggcagcctgagctgactaatataccaggtttgctataactgccaaatgaaatctcaggtatgaaggtacatatgtgttttgaacagggagcacagagatgaggttttgatgggatttttttttcaacaagcctttattctctaagaaaagcatccatttcctctcttccatgtctactctgtgcccttacacttgagtttggaaaacagtggagaatgaaaatctgtttgtctgtgatgctggctttggaggtaaggaaggtggaactggtgagaagcccctgcaatctgtgatgacaatgtggttacctatgcagccactgacagaaattagagaagaagcaaatgggttcttccaccctgggagtgaagcacaaggcagaaggaaggggaagagatcagagatgaaaagaaagaagagagcaggtgccgtggctcccacctgtaatcccagcactttgagaggccgaggcgggtggatcacctgagttcaggagttcaagaccagtctggccaacgtgatgaaaccctatctctactaaaaatacaaaaaaaatagtcaggcgcgagcctgtagtcccagctacttatgaggctgaaacaggagaatcgctagaacctgggaggcaggggttgcagtgagccaagatcgtgccattgcactccagcctgggcaacaaaagcgaaacttaaaaaaaaaaaagaaagaaagaaagaaaagaaaaaagaaaaagaacgaaagaacgaaagaaaaaaagaaagaaagaaggaaggaagaaagaaagaaagagagaagaaaggaaggaagaaagagaaaaagaaaaagaaagaagaaagaaagaaagaaaaagaaaaagaaagaaagaaaggaaggaaggaagaaagagagagagagagaaaggaaaggaaaggaaaggaaaggaaaggaaaggaaaggagaaaggcaagttagttcagtgacaaaacttcccattctgtgacatgtgtccccctcaaaacacttatatgagtagttttaactgtggaatacgggaaccagctttagtcctggggtgatttagggaaaaccagacctaacactccaaggaaatgggagctgaattgtaagaacataaacccagaattttaaataatgggaagatctttcaactttcataagcgacagaactggctacagaatgaaccagtcaattgcatatcttcaggggctagtgggtcccaggtgacacatgggttccattattcaataccccttctaggcactaactcacttggtgacttcaaagattttacttaacttgtctgggactcagtttcctcaacaataaataagaaaataggtctgaatcaatggtttcccttggggaaaaccattcacctctgtggccactacagtggagccagtcgctcctggggacaagagtgacagcgcttatagcaggtgatgggggtagtctgagcaatttccaaaatttgaaaaagcctcatggaaattgtgcatttagcaacacctcctctcataagtctgcacaagctcattaaaaagcacttctccctgtttggatggagtcatccactttgtgtgggaagacagtttgtcccatgccaatcagagttctatttggccgttatctattacatctttttcttttcttttttttttttttttttgccaaggagtctcgctctgtcgctcaggctggagtgtgcagtggcacgatctcagctcactgtaacctctgcctcccaggttcaagcgattcttacgcctcagcctcccatgtagctgagattacaggtgcccgccaccacgcccagctaatttttgtatttttagtagagacggggtttcaccatgttggccaggctggtcttgaactcctggcctccagagatccacctgcctcagcctcccaaaatgctaggattacaggtatgagctaccatgcccagcccatctattacatctttgattaaggcaatcagaaaatggaattatttctttaaaaagtttttaagcagccaaaacattttaaaacagagagtctctggagaaatttaatagcagcagtccttcaattaaaagcttaaaagtcgctaaactagatgacctctaaattctgttcgagcctgtagttcctcattccagccactgactcctccagtccaccaggcctattcccactggaatcctcctccaggactcattcctgtgtctacagcatctgcactcctaatttgccaggcagttcccatttatctgtgtattatcaacagctccctcccccagcagaattgagctgccattgagcctttagcttccagaggcctccttggcaccctggctggagaggacaagggggacataaaagacctaaggaaagtgacacagcgtacctctgactctacagcacagggtgacatgcacagcctctggagtctgagcccaggcttccacttacttctcagctacatgaccttgagacattccctagcttggtattctcctctgtaacatggagagaataattactctttcaaggtgtcgtcagaaaaaataaaggcttgaatacataaaagtctcccggcacagagtaaatacttaataaaagcagctctatcgcagacatttgggaaaatgctcccatccaaccagatggaacaataggtgccaacaccatggaaaatagctggacatgccttgcgcttgtaccaatcatagacctgggcttttccttacagtgccttctgcctccctaccaccatttctgggcggaaagagtaaatggtttgtccctgcacttggaagggaaagaaaggaagcaaccatttttgagtgcccactttcaatttcctgaaggtgacctcagaaatgcttggcttggtgaagtaaaaaaatacacattatgaattatagcccctagagttctataaatccagtgaacagcttaatatacatgcctaactgccatttagagcaataatagctacacatactattaagtatagattagatcaaccatgtagaaagcttattcgattacagcactggactttgctcaaatatgctttctccatcattgctgctgatctgctagcaatatgaaatatgagaattcagccaactattctattctcccttactattattcaagaaaaaaatattttccaaggtcatgaagccattgcataacagagctcattgtgtgtccagtatacaacccggaatcttatgcttatttaaagaagtcttcctgcattacttagggaagtgggatgttatttccgcaaactgaccctattatatactcttcaccaaggctgaattagtaactttggtcagtatgtggcattaagtaactaattgaatctccctacataataatctccacattcatgtctgatgatcatgacacccaaatcgaaagagaagcagattgcttctccataatctgcaaagatggagtcatccactttgtgtggaaagacaggttgcctcatgtcaatcagagttctatttggcagtcatctattacatctttttctttttcttttttttttttttttttttttggaaaggagtctccaaacctctggcttggaggcaagccaagccagaggttttacaagatacacacttattcactcagaacttattatgctccaggtactatgctgggtgtcgaagaaaaagcagtgaataagacagacataatccttgccctcgtggatttcttttaattttttaaatagagatgggggtctcactatgttgcccaggctggatttgaactcctaggtgcaagtgatcctccttcctcagcctcccaccaatcctggctccagctacacggatttaatagctagttgaggaaacagatattataaagttaactatataatgttattataatcatgattatttctattaattagaagtgtgagatttcagaaagcaactaacctagactcagggctaggggatgctttcatgagatggtaacattcaactggacatgaaggatgagcaggagctggcccaatgaagagagaggtggtaagaagcagagcattttgcagatttaaagaccactaagaacagcaaagaacgggggagaaggggtttatctctggagcaaaggtaaatttgtaccaattcacgacccagctggaccctgggctctcttcacagctctctgacttctccatcccatctcatgttctgaggccctgaggcaagaagaaacttaaactctttgagaaactaaaagatgaatcacagagagtaagggacattatatgtgatggggagagatttaagacgagcttgaagaagtgggcatgggtctgatcactcagggatggtaggctatggtcaaaaatttagactctaagagcaaagggaagccattgaaggctattaaacagagaggataatatataccttctgtatgagaccatttaggagccatttgcttccagtccagacaggaagaaattgtgttctggactaaggtggtaataaacaggaattgagagaagtgcaaggtttcaaatagtctgcaattatttaggtcagaatggtgagagtgggcgacggccaaggtgaaccctcatctcttgtctgagcagctgggtggagaagcagcaagtttgaaggggaaggtgatctggtctacactggtcctgctgagttggaggtgcctctgagtctttaagtgaaaatatacacgtggtcagatggacatcaagattgagtctggagatcactatgtgggggtcattgatacaaagatggtgagtaaaatcgtgggagtgggtaagattaccaagggaaaacagtgcagaatggaagagaagagagcccagaaccaagctccgaagaacccagatattcataagccagagcaggagaagctgtcaaagagactcattaaagagtggcctgagcgataaaaagaaacaccagaagagagtggcatccctgaggacaaggaaagaaactatttcgagaaagagaatggtcagctagatcaaatgctatcaaaacgtcaagtaaaatcaaggcaaaagagcccctagtgcatggaacacatgaaaggcactgttgattttatcaagaagagctgtaaggatgtagagctgtagggatgtagagcggtagggatggaagacggatggttgcacatgaaataggaggtgaaaaaatggggtggctcatgcctgctataccagcgtggtggcttacgccttcaatcccagcactttgggaggccaaggcaggcagatcatctgaagtcagaagttcaagaccagccagcctggccaacatggtgaaaccccatctctactaaaaatacaaaatttagtcgggtgtggtggtgcacgcctgtaatcccagctactcgggaggctgaggtgggagaatcgcttgaaccagggaggtggaagttgcagtgagccaagatcatgccattgcactccagcctgggtgacagagcaagactccatctcaaataataataataggatgacaagcgtggacaactgtttcaagacattgggccaggagaggagaagaagaagttgaagacagaagagtgagatgggagaactgatgaagtcaggttactcagaaagcaggacggggtgggatgcaggcagagcaaagaactacctttgaaatgaagagggcacctcctctgaataataacaggaagaaagtagagacggtgggtacagaagcaggttggtttgaagaatcgttggcaggaagttgaggttaatttcatcagatgacttatatttactcttaagagaatgaataaggagagaatgcagggcggtttaaggagagaaacaaaggtttgaaatgatgtttgcagagacacggaagacaaacgactctagagaaatgtagtagattcccaggcagtgttgagctcagttgaggtaggtgatcatgaattgaaatggtctgccagactatatcatttttctcaggattcttttggcagccgggggagcaatacatagaaggcagaattgttttgccccgtgagtataacaaaaagacgaggaggaggagttgagagtacaagtgtacctcattttattacacttcactttattgtgctttgtagataatgcagggttttttcataaattgaaggttcgtggcaatccatgacgagcaagtctatcgacactatttttccaacagcatgtgctcactttgtgtctctgtgtcacattttggtaattctcagaatattccaaagttttcatgattattcagtctgttgtgatgtcctgtgaccagtgatctttgatgctaatactgtagttgttttggggcaccacaaactgtgtccatataagacagagaacttaactgatcaatgtcatgtgtattctattttcttgcacaaaatataaaatgctttaatttcatcctataaattgctatcacttatattgtaatttttatctcttaaagcaatatctagaaccatatgctacatcttaaattatttcaaagttaccaatttgttcaaatctctctactgttgagattatggcttgttctataatgagcagaaaataggttctattgaaattagtttgaggattatttgtgcatgaatttttgccttcaaagtcagaaaaatattttccttgctctgattttcttatgttgtattgaactgtcacttttgttcatatgtcgcatgcagtttcactcaatttaaatagacaattttctctaaaattaaaacaacattttaaaaagtaaatctatttttgtttttgtaagcttttgataacattattgatataagtgatacacaaaaactttatggtagcaaatataaaattaatcttgtttttcaccaacaactacaattcactcttcatttaaggatcttctaatgtttcacttatacatcttctgtcttgtctagactaagtctaattgctttagtagcattattttaggggaaaagggaattgttcatttccctccatggggtttagaaagtaatttcacatttcatttatgttgtatgtgctctgacttctccaccaactgcctgctcttccagctctctccttctcctaggacctctctattatttgagatgtaacaatattgaaattaggccaaataataatcctacaatggtctctaagtgttcaaggagaaggaagactcacacatctcttacttcaaattaaaacctagagatgattaagcttagtgaggaaggcatgttgaaagctgagacaggccaaaagctagggcttttgtaccaaacagccagtaaatgtgaaggaaaagtttctgaaggaaattaaaagtgatactccactgaatacacagatggtaagtcagtgaaacagccttattgctgatacagagaaagtttgagggatctggatagatcaaatccaccacaacactcccttaagtcaaagcataatccagagtaaggccctcactctcttcaattcaaggtccttgctctggattagaagaagctgcagaagagaagttggaagctatgagtagttggttcatgaggtttaaggaaaaagaaccatcttcttaacgtaaaagtacaaggtgaaacagcaagtgctaacgtagaagctgcagcaaattaaacagaagatctagctaagatcatggataaaagtggctacattaaagaatggattttcaatgtagataaaacattcttatattggaagaaaatgtcatctagggctttcatagctagaaagaagtcaatgcctaacttcaaagcttccaaggacaggcttactgtcttgttaggggctgatgcagctggtgactctaagttgaggccaaggtccttttttatttttatttttattttttttttgagacggagtctcgctctgtcaccaggctggagtgcagtggcgaaaacttggctcactgcaacctctgcctcccaggttcaagtgattctcctgcctcagcctctcgagtagctgggactgcaggcatgcgcaaccatgcccagctaatttttgtatttttagtagagatggggtttcaccatgttggccaggatggtcttgatctcttgaccttgtgatccgcccaccttgagggcatttaccattctaaaaatcctaggacccttaataattatac

SEQ ID NO: 54 - DNA, 28892 bp, Homo sapiens
gtataattattaagggtcctaggatttttagaatggtaaatgccctcaaggtgggcggatcacaaggtcaagagatcaagaccatcctggccaacatggtgaaaccccatctctactaaaaatacaaaaattagctgggcatggttgcgcatgcctgcagtcccagctactcgagaggctgaggcaggagaatcacttgaacctgggaggcagaggttgcagtgagccaagttttcgccactgcactccagcctggtgacagagcgagactccgtctcaaaaaaaaaataaaaataaaaataaaaaaggaccttggcctcaacttagagtcaccagctgcatcagcccctaacaagacagtaagcctgtccttggaagctttgaagttaggcattgacttctttctagctatgaaagccctagatgacattttcttccaatataagaatgttttatctacattgaaaatccattctttaatgtagccacttttatccatgatcttagctagatcttctgtttaatttgctgcagcttctacgttagcacttgctgtttcaccttgtacttttacgttaagaagatggttctttttccttaaacctcatgaaccaactactcatagcttccaacttctcttctgcagcttcttctaatccagagcaaggaccttgaattgaagagagtgagggccttactctggattatgctttgacttaagggagtgttgtggtggatttgatctatccagatccctcaaactttctctgtatcagcaataaggctgtttcactgacttaccatctgtgtattcagtggagtatcacttttaatttccttcagaaacttttccttcacatttactggctgtttggtacaaaagccctagcttttggcctgtctcagctttcaacatgccttcctcactaagcttaatcatctctaggttttaatttgaagtaagagatgtgtgagtcttccttctccttgaacacttagagaccattgtaggattattatttggcctaatttcaatattgttacatctcaaataatagagaggtcctaggagaaggagagagctggaagagcaggcagttggtggagaagtcagagcacatacaacataaatgaaatgtgaaattactttctaaaccccatggagggaaatgaacaattcccttttcccctaaaataatgctactaaagcaattagacttagtctagacaagacagaagatgtataagtgaaacattagaagatccttaaatgaagagtgaattgtagttgttggtgaaaaacaagattaattttatatttgctaccataaagtttttgtgtatcacttatatcaataatgttatcaaaagcttacaaaaacaaaaatagatttactttttaaaatgttgttttaattttagagaaaattgtctatttaaattgagtgaaactgcatgcgacatatgaacaaaagtgacagttcaatacaacataagaaaatcagagcaaggaaaatatttttctgactttgaaggcaaaaattcatgcacaaataatcctcaaactaatttcaatagaacctattttctgctcattatagaacaagccataatctcaacagtagagagatttgaacaaattggtaactttgaaataatttaagatgtagcatatggttctagatattgctttaagagataaaaattacaatataagtgatagcaatttataggatgaaattaaagcattttatattttgtgcaagaaaatagaatacacatgacattgatcagttaagttctctgtcttatatggacacagtttgtggtgccccaaaacaactacagtattagcatcaaagatcactggtcacaggacatcacaacagactgaataatcatgaaaactttggaatattctgagaattaccaaaatgtgacacagagacacaaagtgagcacatgctgttggaaaaatagtgtcgatagacttgctcgtcatggattgccacgaaccttcaatttatgaaaaaaccctgcattatctacaaagcacaataaagtgaagtgtaataaaatgaggtacacttgtactctcaactcctcctcctcgtctttttgttatactcacggggcaaaacaattctgccttctatgtattgctcccccggctgccaaaagaatcctgagaaaaatgatatagtctggcagaccatttcaattcatgatcacctacctcaactgagctcaacactgcctgggaatctactacatttctctagagtcgtttgtcttccgtgtctctgcaaacatcatttcaaacctttgtttctctccttaaaccgccctgcattctctccttattcattctcttaagagtaaatataagtcatctgatgaaattaacctcaacttcctgccaacgattcttcaaaccaacctgcttctgtacccaccgtctctactttcttcctgttattattcagaggaggtgccctcttcatttcaaaggtagttctttgctctgcctgcatcccaccccgtcctgctttctgagtaacctgacttcatcagttctcccatctcactcttctgtcttcaacttcttcttctcctctcctggcccaatgtcttgaaacagttgtccacgcttgtcatcctattattattatttgagatggagtcttgctctgtcacccaggctggagtgcaatggcatgatcttggctcactgcaacttccacctccctggttcaagcgattctcccacctcagcctcccgagtagctgggattacaggcgtgcaccaccacacccgactaaattttgtatttttagtagagatggggtttcaccatgttggccaggctggctggtcttgaacttctgacttcagatgatctgcctgccttggcctcccaaagtgctgggattgaaggcgtaagccaccacgctggtatagcaggcatgagccaccccattttttcacctcctatttcatgtgcaaccatccgtcttccatccctaccgctctacatccctacagctctacatccttacagctcttcttgataaaatcaacagtgcctttcatgtgttccatgcactaggggctcttttgccttgattttacttgacgttttgatagcatttgatctagctgaccattctctttctcgaaatagtttctttccttgtcctcagggatgccactctcttctggtgtttctttttatcgctcaggccactctttaatgagtctctttgacagcttctcctgctctggcttatgaatatctgggttcttcggagcttggttctgggctctcttctcttccattctgcactgttttcccttggtaatcttacccactcccacgattttactcaccatctttgtatcaatgacccccacatagtgatctccagactcaatcttgatgtccatctgaccacgtgtatattttcacttaaagactcagaggcacctccaactcagcaggaccagtgtagaccagatcaccttccccttcaaacttgctgcttctccacccagctgctcagacaagagatgagggttcaccttggccgtcgcccactctcaccattctgacctaaataattgcagactatttgaaaccttgcacttctctcaattcctgtttattaccaccttagtccagaacacaatttcttcctgtctggactggaagcaaatggctcctaaatggtctcatacagaaggtatatattatcctctctgtttaatagccttcaatggcttccctttgctcttagagtctaaatttttgaccatagcctaccatccctgagtgatcagacccatgcccacttcttcaagctcgtcttaaatctctccccatcacatataatgtcccttactctctgtgattcatcttttagtttctcaaagagtttaagtttcttcttgcctcagggcctcagaacatgagatgggatggagaagtcagagagctgtgaagagagcccagggtccagctgggtcgtgaattggtacaaatttacctttgctccagagataaaccccttctcccccgttctttgctgttcttagtggtctttaaatctgcaaaatgctctgcttcttaccacctctctcttcattgggccagctcctgctcatccttcatgtccagttgaatgttaccatctcatgaaagcatcccctagccctgagtctaggttagttgctttctgaaatctcacacttctaattaatagaaataatcatgattataataacattatatagttaactttataatatctgtttcctcaactagctattaaatccgtgtagctggagccaggattggtgggaggctgaggaaggaggatcacttgcacctaggagttcaaatccagcctgggcaacatagtgagacccccatctctatttaaaaaattaaaagaaatccacgagggcaaggattatgtctgtcttattcactgctttttcttcgacacccagcatagtacctggagcataataagttctgagtgaataagtgtgtatcttgtaaaacctctggcttggcttgcctccaagccagaggtttggagactcctttccaaaaaaaaaaaaaaaaaaaaaagaaaaagaaaaagatgtaatagatgactgccaaatagaactctgattgacatgaggcaacctgtctttccacacaaagtggatgactccatctttgcagattatggagaagcaatctgcttctctttcgatttgggtgtcatgatcatcagacatgaatgtggagattattatgtagggagattcaattagttacttaatgccacatactgaccaaagttactaattcagccttggtgaagagtatataatagggtcagtttgcggaaataacatcccacttccctaagtaatgcaggaagacttctttaaataagcataagattccgggttgtatactggacacacaatgagctctgttatgcaatggcttcatgaccttggaaaatatttttttcttgaataatagtaagggagaatagaatagttggctgaattctcatatttcatattgctagcagatcagcagcaatgatggagaaagcatatttgagcaaagtccagtgctgtaatcgaataagctttctacatggttgatctaatctatacttaatagtatgtgtagctattattgctctaaatggcagttaggcatgtatattaagctgttcactggatttatagaactctaggggctataattcataatgtgtatttttttacttcaccaagccaagcatttctgaggtcaccttcaggaaattgaaagtgggcactcaaaaatggttgcttcctttctttcccttccaagtgcagggacaaaccatttactctttccgcccagaaatggtggtagggaggcagaaggcactgtaaggaaaagcccaggtctatgattggtacaagcgcaaggcatgtccagctattttccatggtgttggcacctattgttccatctggttggatgggagcattttcccaaatgtctgcgatagagctgcttttattaagtatttactctgtgccgggagacttttatgtattcaagcctttattttttctgacgacaccttgaaagagtaattattctctccatgttacagaggagaataccaagctagggaatgtctcaaggtcatgtagctgagaagtaagtggaagcctgggctcagactccagaggctgtgcatgtcaccctgtgctgtagagtcagaggtacgctgtgtcactttccttaggtcttttatgtcccccttgtcctctccagccagggtgccaaggaggcctctggaagctaaaggctcaatggcagctcaattctgctgggggagggagctgttgataatacacagataaatgggaactgcctggcaaattaggagtgcagatgctgtagacacaggaatgagtcctggaggaggattccagtgggaataggcctggtggactggaggagtcagtggctggaatgaggaactacaggctcgaacagaatttagaggtcatctagtttagcgacttttaagcttttaattgaaggactgctgctattaaatttctccagagactctctgttttaaaatgttttggctgcttaaaaactttttaaagaaataattccattttctgattgccttaatcaaagatgtaatagatgggctgggcatggtagctcatacctgtaatcctagcattttgggaggctgaggcaggtggatctctggaggccaggagttcaagaccagcctggccaacatggtgaaaccccgtctctactaaaaatacaaaaattagctgggcgtggtggcgggcacctgtaatctcagctacatgggaggctgaggcgtaagaatcgcttgaacctgggaggcagaggttacagtgagctgagatcgtgccactgcacactccagcctgagcgacagagcgagactccttggcaaaaaaaaaaaaaaaaaagaaaagaaaaagatgtaatagataacggccaaatagaactctgattggcatgggacaaactgtcttcccacacaaagtggatgactccatccaaacagggagaagtgctttttaatgagcttgtgcagacttatgagaggaggtgttgctaaatgcacaatttccatgaggctttttcaaattttggaaattgctcagactacccccatcacctgctataagcgctgtcactcttgtccccaggagcgactggctccactgtagtggccacagaggtgaatggttttccccaagggaaaccattgattcagacctattttcttatttattgttgaggaaactgagtcccagacaagttaagtaaaatctttgaagtcaccaagtgagttagtgcctagaaggggtattgaataatggaacccatgtgtcacctgggacccactagcccctgaagatatgcaattgactggttcattctgtagccagttctgtcgcttatgaaagttgaaagatcttcccattatttaaaattctgggtttatgttcttacaattcagctcccatttccttggagtgttaggtctggttttccctaaatcaccccaggactaaagctggttcccgtattccacagttaaaactactcatataagtgttttgagggggacacatgtcacagaatgggaagttttgtcactgaactaacttgcctttctcctttcctttcctttcctttcctttcctttcctttcctttctctctctctctctttcttccttccttcctttctttctttctttttctttttctttctttctttcttctttctttttctttttctctttcttccttcctttcttctctctttctttctttcttccttccttctttctttctttttttctttcgttctttcgttctttttcttttttcttttctttctttctttcttttttttttttaagtttcgcttttgttgcccaggctggagtgcaatggcacgatcttggctcactgcaacccctgcctcccaggttctagcgattctcctgtttcagcctcataagtagctgggactacaggctcgcgcctgactattttttttgtatttttagtagagatagggtttcatcacgttggccagactggtcttgaactcctgaactcaggtgatccacccgcctcggcctctcaaagtgctgggattacaggtgggagccacggcacctgctctcttctttcttttcatctctgatctcttccccttccttctgccttgtgcttcactcccagggtggaagaacccatttgcttcttctctaatttctgtcagtggctgcataggtaaccacattgtcatcacagattgcaggggcttctcaccagttccaccttccttacctccaaagccagcatcacagacaaacagattttcattctccactgttttccaaactcaagtgtaagggcacagagtagacatggaagagaggaaatggatgcttttcttagagaataaaggcttgttgaaaaaaaaatcccatcaaaacctcatctctgtgctccctgttcaaaacacatatgtaccttcatacctgagatttcatttggcagttatagcaaacctggtatattagtcagctcaggctgccatagcaaaataccacagactgggtggcttaaacaacaaaaacgtgttttctcaatgttctggaggctaggaagtccaaaatcaaggtgctggcaaggcaggtttcattctgagtcctcttctcttggcttggaggtggccgtcatctcactgtgtgctcacatgacctcttctttgagcacacttgggggtagtggggggaagacagcaagctctctagtgtcttcctcataagggcactaatctcatcctgagggtcccacccttatgacctcatctaaccctactcacctcaaaaagttccccacttcaagtaccatcacactgggggaaagggctttaaaatatgaattttggtgagacacaaacattcaggccatagcacctggggagacgttttgctagtattccagatgagaaactaagccttagagaaataaatctattagagtgagcctatgagagaggactggtgggagtgtgcatgatgatggcctatccaggcacactgaggcccacccaactcctcccctttgccctgccagctcaagagcgcaaaactatttcttctagattcttaaaaggttgtgattgttttaaaataggtgcacaaattcttggacactcctcccttcaaaaggcagaatctaattccttttcccttgaatgtgggctagacttactggttcacttctaacaaacggaatatagcagaagtgatggtgtgagatttctggaattaggtcgtaaaatatactgcaactttctccttattctctcttgcatcattggctctggggaggacagctgccatgttgcgaggacactcaagaagccctgtgaagaagaaccaaggccacctgccaacagccctgtgagtgtgccatgttactcatgaatccgttagcccagtcaggccaccaggtgactgcagccctggctgtacttctgacaaagcctcattagaaatcctgagatggaattcctagttgtcactcccagactcctgacttacagaagctgtgagataacaaatgactgttgttttaagcagctaaattttgaagacagcaatagataattaatacaaagagaaaagtattttattctatactcagttctccattctccatgttacccatgtggccaagccagattgacatttctcatgctcccagacagccagtgggtcaaagaagaaattaaaagagaaatttaaaaacatcttgagacaaacaaaagtggatacacaacatactataaaacctgtatcttaatttttcatgatacaaacagaattatattaggaaagaagaatgatgcagtaatttacctgtgaaaatgactttaggagtgtaggataatcattaagaccacggactgtcttttaatagctggatgaccaaaggtaaattatatagcttctctgggtctcattttcactacatgaaaaaatggagatattaatagtgcctaatagttttacctgataattaatgagctaatatatatcaagtacttagcaaagtagccagcaaatgactttagtcaatgttcatattgccattaacataaatatcaggtatactggaacaattatacacacaaacagatgataaattggaagtgcagagcctatgttttctcccaggttaacctgtgatcaactcatgatttaaaaagctgggttaatatggttgtttagaaaccctgactgtcaaatatgatctacagaatgttagattattaaatcccaataaagcaaatgtaacagaaaaaaatgactatcagcttcctcttggagaaaacagcaataatgccatcttattgctacataatacataccaaatggcttaaaataagtgactagcttaataaactgtagttgcttaataaattgtagctatcattaacatcttttcagctgtacagctttttttcaggtgagtttctgtttgtttcagatgcccacttcgctcagatgaaatgccaggctcaaactaaagtcagtatgcattgcctggaaggctaatggcctaagccttccaggccaggggacttgtgaaccctgaaaatttaagacaggtctcagttaatttagaaagtttattttgccaaggttgaggacatgtgcccgtgacacagctttgtcacacagcctcaggaagttctgatgacatgtgcccaaggtggttggggcacagtttggttttatacattttagggagacatgagacatcaatcaatatatgtaagaagtacattggttccatccagaaagatggggacaactcaaagcagggaaggggcttccaggtcacaggtaggtaagagacaaatggttgcattcttttgagtttctgattcttttccaaaggaggctatcagatatgcatctatctcagtgaacagagggatgactttgaatagaatgggaggcaggtttgccctgagtagttcccagcttgacttttccctttagcttggtgattttgaggccccaagattttcctttcacagactcaggatgtcttcttcagttcaggatggacagcctcagagtagagagcttcaggccccctctccttatcttctgctaacctccattcttactcctaccctttcatctcagaattttcgctttgatgtttcccacttccttcctatggttactttaaccgaagtgagtcaggtcttactgaaaaactgaccacagcctgtccgctcccagccttccccagaccagggctgcccaggcagagcgtgagggggactagtgtttactcagctcatttttttcctcctctctcctctaagtcacggggctttgagtagggcttccccagccaccgtgcccctcccagcagaccgcagtcagaagccaatctcacatttgtctggtggctcagagaggggacagaaagagcagcagcttatgtccttggctatcctctcaagtgggctaatttgcttattttcaactctgttgggtccagccctgttgcctctgatctcagctcaaagaggatttggcgggagtttttggttgtgataaccaataacaaccaactatacgcactgcgaacatctcctagtgccagaagccctgttagctcattatcttaatcctcaggataacccaggcaatttgtattcaccctaaaaacttcccctggccgggtgtggtggctcacgcctgtaatcccagcaatttgggagactgaggcaggcggatcacttgaggccaggagttcctaaccagcctggccaacatggtgaaaccccatctgtactaaaaatgcaaaaaattagccgggcgtggtggcacatgcctgtagtcccagctacttgggaggctgaggcaggagaatcacttgaacctgggaggcggaggttgcagtgagctgagatcatgccattgcactccagcctggagacagggcgagactccgtctcgaaaagcaacaacaaaaacaaaaacaacctccaaaaaaccttcccctgtttacctttctaattttggtacctacagaatctccccgttagccttgaaaatcagcatgatctttaaggatttaggagcaaatctttaaaggattgagttgtgggaagaccatgatgtctttgctactggcttttgcagtgagaatagctttttctctgatcaggtttggagccttccctctctcctgggggtagggggtagctggcttcctttctctgaaatgcagaattcattcacccactctcttttgtcttgggagctttgagagaacaattttagtcagacaagagtcaactgacaccagaacatgatgtgaataagatacatttatttattcaaaattaaaatctgctatgaagacagacaaacaatgtaacattcccagaggaattgaataaattctagttaaaactgagttctattagaaccaaatttatttttatttttattttttgagacagagtcttgctctgtcacccaggctggagtacaggggcatgatatcagctcactgcaacttccatctcctgggttcaagcaattctcttgcctcagcctcccaagtagctgggattacaggtgcgcgccaccatgcccggctaatttttgtatttttagtagagacggggtttcaccatgttgaccaggctggttaggaactcctgacctcaagtgatccacccgcctcagcctcccaaagtgctgggattacaggcgtgagccaccgcgcccggcctagaaccaaatttaggttgttataaataacaagctggccacagctttcaagaatgaagtggttggggaatgaggttaggggaatccctccgagacactggaaggtgaattaatcatcaaaggggctccctggtttctcttcctaagagtatttgtagcagttaggaagccccaagcccagagacaagataaattagagggaggtcagggaaaacagctcaacagctagaaagcgtggtcaggcttggaatggaagcttctgttggctccccaaagaacattttttttcctcccttatgtaacttataatttatcttaaaacactcaaataccatagtgtgtcaccctatggaaacagcttaaaaacaggtgaaaataataaatattgaaaaaaattataatattgggcttctttctaaatcgttcacagagaagctcagtaaataaatagaaatgggggttgaggtatcagaggtaataaatattctataagagaggtacaataaggtttctcaaggggctgggtcagctatcccagagccccagatccgattttggagacctctaatttatgtcctagagtctatagagtcgccaccctgatgtctcagtttcgtatcttcattgtcatgtaggcttctatgtagttgatgaagatgtcaaactcactcatggctttgtagatgcctttctcttggagctgtgcagagagataagaaacatacagttaaaatcctttctggggactaaataggctcccctccctcatgctcatggatgggcatgaccttgagtgcagaggttgcttgttctccctcacgctgggaagtaaaccagaggataggcctagctgccttgggaaaggctgtgcattgaccttcatctcctccaggcctccccctagcaaggggagcattcattttgcaaagcactgtcttcaaaatgatgccttttcaacaattttaaaggtcacgtattcacatgatgattatgcagagtttgatgaaaagacattagaggaagcgcttcgaaagcaagacggtgagaggagaggagggagccttttaaatgtctgtgttctcccaccaacacactgagcaggccctgccctgccgccctgacctactatgagaaattcacaccccctgatgttggcactctgtgcagtgtctgtccccagcccacgaggaggacataggccgcacggtttctgggaaatcagactgaaaaagttcacgcacagttggaagtgtgaaaccccatttcgtttgggaactgacattctcaggcacctccgcaggtgcgaagggcagatggaaagcgggcttgaaccaactccaggttaagtgagaatccagcttcctgctcattctgagttctggggagtctgggctgaacccccaggtgtatttgtatgtgcacatttatgtgccagcttcctgcacgtgtgggttcagcctagattcccaacaagctactttctgtactttctgtttcctttgtcactctccccagcatgcagctcactgtgttcacaggctggccggccagcctaacccgcaagcctgcaaaggcagcgagcagtcatttagaaacccccaaagacacttaacagaaaacaaatacaatcaaggcagcagctcctcactggctgagcaggtcataccatctgtcaggttcccacactctctccaatgaagaatggggcctattgagtccccaccaccttccatgctttggggttggggagtgggcatgggttgtgctctgcagaccctctctgccaccatccaagctcaccttattaaaggcattcttcacctgctccacggccttgctcttgttttcacagggaagaaatcgatgctgtggaagaaaagagaaagtgttggtgatcctggcttccagctccatgtccatcacacttaggggacaagctggtggcatcatgaggaggccagatttatccaaatgccttgcctcacagctcccagagagaactgagccctgcttccatggccctgggagttaaatgtatttctccaggactcactccaagatgtttgcaaggcttggatgacaacccaggtcttgggattccttcctcccccagaactctacagtatctcctgcagtgctgagcgaggcattcttcagcctgtccttttctgcctctctctcctgttcctccccgtcagtcacagccaccgaggaacacttctaagcatctgaggagggaagctactgggaccaaacccttcacatagccttgtcctacaaatagacaccaactgattttccaatattggtgacagaacaggggaaaccattagtagtgagggcatcatttcagttggagaaataaattacctggaggaattactcatagacactagcctggggatgaatagcccccttgtcccttctaaaatgccaggggaaatcctgtcagtcaattgggcccttcttagagctttgctttcaaaacattgagattaaaagaggtgaatgatgtttcctctgcttgggaaccttagctccccgcccagggtctagttacaaagaggcagtggaggcctgactgaagctctgggctccttttatgaagagagaggggagtagttaataacccacaaatgactcacaaataacaggaaagctgtttgcaaatttcacatgtaaatgcctagcagccacccccaacgcctgctcaaagagaaatgagcaagagatctgactccaggagtctttcctcatttacagctagctctgccagtctgtgtctttgctgtgtctgtggatgtgagtgtccctgctggtctgtaggagatggtattttgggggcagctgcaagggaaaaaactgatctgctacttacacagcgccgtagcctcagcctgagggtcttcaggttctcccccagggagttcacatgcgccttgatgtctgggtcttggttctcagcttggggcatcacctcctccaggtaaaactggatcatctcagacaaggcttggcaacccaggtaaccctaagggcaggagccaaaggtgagtgagagattggcggaggtggctgggaggaggggctgctgcaactagcttaagaggacagcttggttctagcgatcctccttcaccagaagcctccccgaagggactgagccctttgtaaaccctctggctgctggatgtgctgagttaacatcttcccacttctccttttcaaagcgaaggaaacaaacccaattccctgcaatcaggaagcagagtctcccttcccttaatcatgctgcacactcccccagcaccccgcccctgctctcaccttaaagtcctccagcaaggactcctttaacaacaagttgtccagctgatccttcatttgctgcaggaagaacaaaaggagaatgaacttgaggtttggggaaataactgaaatgcggtctttttgatgccctttcatttagagatttttttttttaaataaaattggctctggcccaaaaaaatcaaaaggggagttttaaaaacagaggattcaacagtgatgggaccatcacttaaatcaggtcctcctcctcagagtcaagttatttaaaaaatctggccgattttgaagggaaagcagaagcttgactcagtcctggtcttctttctgcggagctacattcggctttaagggacacctatgtcaacccttcggggccttgagcccccctcatgtcctgttctctgcttttctttctccccactgtagacatccagtttagcttggaaagatcccagggattaagaagctccttctaatgcaggtttccctcatgtagagtgcttccctaaaccactggtctttcaggtctggaaacgctctaagcagaggcaatttaaatttccctgctgcaaggcatggggagcatcttcacctcgaatcagacatttctttacttctcctagccaataaagtatagagcgccagcaggatcttataagtttctcagcacgagagagaacgcatttactttataaggcaggtttcctgcacatttactgtatcatctggcttagcttaactcaccaaacccatggcttgatctaggattctcttaagaatttaagtttgggggaataggtgttggggatggaggtggaggcgcaggaggagggttcttatagttccaggagaatgtctagttcaggcagtcccaggaagagagaaaggacaggaaggaatcatactcacaaagaaagtcttcactctgctgaaggcatctcggagatctcgaagcatgttaggcaggttgcctgggaagtgggtgcagctgttctcagactgggtgccctggcctgggctggccctcaccccagtcaggaggaccaggcaacagagcagtgctgagctgtgcatgccttcttttgcaagtctgtcttgtggtttggttttgcaagagcaagcccctgatgtgtagaccttcacctctctgtcccccttttatattgtaagctcagggaggcctcttcattcattaaaaagccacaatcaaggtttcccggcacaggattttttctgcttagagctcctccttctctaacctctctaataaacttagttttcaatttttgcatcgtaagcaaaaatgattggttgaacatgaacttctgcattacagctatttttaggatgggctacctctcttagaataattttttagcttctcaattaaaaaaagttgatttcctggggagaacagctgttctgtgcgcagaggccctcagctgtgggttctcattcgcgtgttcctaggtcacagtgacgtggacaaattgcccattccagaatacaatgggattgagaaataattgggtccccccaacctgggatgaatacccaagacttctccttgctaacttaggcagtcaccttaggtctctgggccttagtttccccaagtaaaaatgagggggtgggctaaatatcctcaaagttcccaagcagcccttccattttactttccagagactggcttcctacagtacaggcggggtcacaggatgtgttccaggctcctttaccccgatttcattaggattctcaggcacatgtttccacctcttcagctgtcccccaccccaactgtgcttgggggaagtgggtaagagtagtctgcacttgctgaaagcttcttatatgctagtcaggtagtgctcaccatgacccctaccgtctctattttatagtgagcaaactgaggcacagagatattacatcacctgtacaagggtacaccagtgccaactgagaatttggtttcctcaccctactgtacaccatctccagcacatagaatgaaaccttggattaaattggccttagagtttcttttagttgtaagcttctgtggctggagtctaaagtttaaaagatggggtggaagaagttgaaataacaaggaaaagaagtcaggattccatggaggctggataggaggtcccttactttcctcttacctatccctacttccccttcccaaagaagccttagtagtgttgtcttggatttgtgtgtgtgtgtgtgtgtgtgtgtgtgtgtgtgtgtgtgtgtgtagaaggtaaggggagccagttgggttgcggcgaggagtgttgctctacctggggaaggaccggggcagtgacatcaggacttcttcagatatctggaaagtctctggggatcctttgattgagccttcaccttccccttccacaggggctttgcctgccattccagtttagactgtaactgggaggaacactgacctaggtgcaggaggcctgggctctgccttggccctgccactctatagtcagggcaaatcactcatcctccctgtgtctgtttttcatctgtcccaacagggcaatagcacctgtcctcctgcctgccagggagcattgagcttaagtagccatggacccagatggagggcatttccagtgttctgctagttcttcacctttctgcatcagcaatgggacaactccagtggcagcaggttctgagcttgctgcactagagaaggtcactcactgcaaggggtgcaaacaccttggggcccagccagcgtgaagtgagtgggagggagggatgagagggcccacgcccaccctgtggatgtccctgctgtgtgacctatggatcagggtcaggggactgtggtgtctcttcccaactcttcagggagtgtcaatgtagaaacctaagaatcaggaagtgagaaagagcctgctagaaactagtatggagctaactcagaacttactggtcctgccagacttagactggcttaagggttctgtctgagttctgctgccaggaagcagagagaaggggaccaggacctgggtttccccttcttgcacctttctccttccccctcggctcctgggttttctgggctgtgtctgtgttagcctgcaggtctaaccccctctctgagctgggtgttccagaagtggactcagcatgggcaccaggcaggccaggggttctggactctgggtgaggctgtgaacccctccttcctttgtttcccatcttgccttgtgcttacctcactaggaaacctgcaaccctacgtggttatcattcatgtacacaccatgccctgccgaatcagctttgagctccctgaaacaggacattgttttattaatctttgcgtacttggtacttagcaccaagtctggcccttggaaggtatcagctatacttgggatgggcatagaagagtgccctgtaagcctggagggtgcgaggctaaggaggtggtctgggcacaggtaagcattcagaaggagagggagagtgactcagggatgcaggcagcctcccttcaatttccttatatgagatgtgtgtgtaaatacacacacacacacatacaaaatgtcagggagaagggaggtatgtaaaagccatttgtacctttctttcatctataatctgttaaatagggttgaggttaggatctgacttcttttttttttttgagacagagtctcgctctgttgcccaggctggagtgcagtggcatgatctcagctcactgcaagctctgcctcccgagttcaagccattctcctgcctcagcgtcccgagtagctgggactacaggcgcctggcaccacgcccggctaagtttttttatttttttttgtatttttattagagacggggtttcactgtgttaaccaggatggtctcgatctcctgaccttatgatccgcccgccttggcctcccagagtgctgagattacaggcatgagccactgtgcccggcccggatctgacttctttatttgttctgaaatgtgtagctaattatctcaagccatttgctgaagatttgattctttccccattgatttgaaattactgtccactctcatttcaaaatttcagaatttaagtggttggagagaaccatgggcaagttccctggtgcaagtcctcatttagcatatggagataacggcttctccatcaatatgtctcatagtatttctgtcaagagatagatatgaacatttgaataaagaccctgtgtccttatattgacaaagcaacaagaacaacaaacaggactcctatttctcaagtttttgaagatacctgttcatctgaaaagtcactggggtccacggggaaaagtcccaagcccataggtcatgtctgagacatgaatgccaacactcacatgtgaggagatttgggtttggattttggtacaaggcaagagcccatgaagagagggaagtgagaaggcaggcacctatggatggatagaatgtcagcctgggcacaatttagtcctgtgaatttcaagaggacacaaatgccactctcacactgtgagcttcttgaggccaaaaggcctgagtccagtttgccctcaagcccagatgcatagtaggcatctaatcaatgcttattatactgattttaaatgaatttttccagtgggggatgtactgggaaatcagaaggttgtgggaaggggaatacctctcttcttccatccctgctccaaaatattctctcatttctgtatttagctgcaaatgaaggaaaacctgagtaagcatggcttttaaaagagggggttgtattttattttctgtctcactcatcaagaagcccaaagcaggcactcagatgtcatccaggacccgttttttctgcattcttgttctcctaacctttgttgcaaggagataggagagataggaggtggtaaagtccaaaggtttaaaggcacaccaacccaggagaccctaataatctttttaggaagctccgcccagtaagtttcatcactttagctgcagaggaatctgggcaggcaagaactgctggggtgtgtgtgtgtgtgtgtgtgtgtgtgcttatgcaaatagattttggagggtgcattctacagtttacaagatcttataaagaatctgcctcccattagagcagtcatcggccaacctccccaacagcacttgggttttcctgttgagagcggggactgagagacaggactagctggatttcctagaccaactaagaatccctaagcctagctgggaaggtgaccgcatatacctttaaacacggggcttgcaacttagctcacacccgaccaatcaggtggtaaagagagctcactaaaatgctaattaggcaaaaacgggaggtaaagaaatagccaatcatctatcgcctgagagcacagcgggagggacaatgatcgggacataaacccgggcatccaagccggcaatggctaccctctttgggtcccttccctttgtatgggagctctgttttcactgtattaaatcttgcaactacaaaaaaaaaaaaaaaaaaaaaaaaaagaatctgcctcccttgtcgggcacggtggctcacgcctgtaatcccaacactttgggaggccgaggtggacggatcacgaggtcaggagattgagaccaccctggctaacacggtgaaaccctgtctctactaaaaatagaaaaaattagctgggcgtggtggcaggtgcctgtagtcccagctactcgggaggctgaggcaggagaatggcgtgaacctgggaggcggagcttgcagtgagccgagatcgcgtcactgcactccagcctgggcgacagagcgagactccgtctcaaaaaaaaaaaaaaaaaaaaaaaaaatttagctaggtgtggtggttggcgcctgtagtcccagctacttgggaggctgaggcagaagaatggcgtgaacctgggaggcggaggttgcagtgagccgagatcgcgtcactgcactccagcctgggcgacagagcgagactccgtctcaaaaaaaaaaaaaaaaaaagaatctgcctcccagctactctcatgctaagcaaaatggcagccttcttggtgtagttaccccatgccttactgcaattctgcagctcaaacccaagagtggggagcaggctagcagccttgtgagggtggctctggagctgcagagggaaggttcagggatccgggcttgctggactctgggtttagacagcttgttgggcaacacggtcagccggcagagagcaggcaggttgacgatgcaggcagagaaggtgagaccgtgcccatcttggggatgggtgacaactgtcctgatgaagaagcccctccgggcttgactcctatttgccattagtagttattttttaaagctgataacgggagtttcatttcttcttatccaggacatttagtgtgtaaaatagctttgccagcttgaaatttctagtattccctcgaataagcttcctcagctcctaggacagaggcttcctcagaagctgtgctgcaacagaccccaatgcctatcacacacccaaagtgtggccagtttggggtgcaaggagacaggagtctgtgagcactgtattcctctgggctttcctgacattggctttgatagtgtctggggtacttcagaataaacgcctggtgggccagaagtttaagaggagcccgggctggggctggcccttaggtggaatggaacaagggttatgcaaaccggattaagcgcccttccgaggatcatggccggcagacactgcaaaccacagatgagcggaagggctgatctttgggcagccaatgtggaattcccctttgtgcaactatggcaccaaatcaggcaatttggattttccttaggggatggacactgtgctctgtaacttctcatatgagaaatttggcttatcagggaccaggacaccaggtgtttgagccttggccacccagaggaccatagttgtttctgctctgtctgcatgactacctaggataactagtgggctcctgagtgtggggcacaaatggattcttttagctccaggactgtccctctggtgcgctttagtttgctccagtctccactggatggctggcacctccaacccaacatatccaagcagggctgggtttgtagataagtgacttctgcagtcacacagggtcccatgactaaaaaagtcctccccttactctgctaccaccatcttgaaattctcaataactgttgagcagggggttccacatttttattttgtactgtcttcccctgccaatttatgtagttgattctgtatctgagagtaaaatcatctctctctggtttcaccttcatccagtgcaccctcgctcagtaaatggaactatcaattaactctagaaatgatttgttggtccctccctcttccttgccaatctatgttcaatctatcaccagaacctccacatttttcttcataaacatttctctaatctactgatttgtctccatttccatcatcaccagcaatgactgtctggttcaagctactatctgttggtagaagagctgaggcaggactggcttgtctgtcataatataaaagagtcttgggagatgtccggggtccagggtctaaaaccgctcgtggcctttggaacaccaagctctgtgccaaagggtagaaggctgccctgctgcaccacaaatctaagcccagggcataaaatccctcgtggcttggatggaatgtgcacagacttgttggttgctctcccaggctcgtaaacatgctctccattatcttgagcagcagagcatattctatatgtgtcaaagaaaatgctaaaccatcacagctatgcttgatgcaccactacctttctacccccacatcctcacgccctcacctgtttacccccacgtcctcaccacctgcttctttgtttgatcaccaataaatagtgtgggctcccagagctcagggcctttgcagcctccataccagtgttggcccactggacccattttatgcacccttaacttgtcttttctcattcctttgactctgctggactttgtagcccccatggcctagtgttgggtctaatcaccccaacactgtctcatctctcctggactccaaaataaatgccaaattgttattctaatatccattctctagaccgttctccacgttgtagcaagagtaattatttccaagcaccaatctgatcatgactctgttgctacttgaacccttccatggcttcccactttccctctcttggtcaaataaggactcatattctaatgttttctataacttcctttatcatctgacactgcctatctcttctgcttcaacttgcggcactcttcactttctacttccctctgcactccagcctcattgactttcttcttcttttttttcaaatgatccgcatgctctctctctctctttttttttttttaaagagacagggtcttgctatgttgcccaggctgtttttgaactcctaggctcaagtaatcctcttgcctcagcctccaagtggctgggcttacattgcaccagccactatgcccagtgatttatcccctctctctcctatcacagggcctttgcacatttagttctcccttcctgctctcctcctgtcttcatccttcagctctcagctcagatgttccttccttaaatgagttcatcattccccagtctaggtcaggccccctgggtgtatcttctcagaacaccttgctcccacccctctgtagtatttatgtcagtttgtaattagacatgtggctatgtgatcatttgattgacctctgtctctcctgtgagactgtgaccacttcgagggcagggcctgtatctgtttttgatgagtgttgtttgctcagtactcagcatggttctgggcacatccaaggttctcactaaatatttgttggctgactgggcggctgagcatgtgcttcctaaactttttgtagtgctacatggctatatgtctgttcttccatctcttataaagtagaagtagagaatggattcatctgaagaaaccactgtccttacaaactatatgcctatacctattatagcttttccagtttttaaaagaattgatctgattactaattagtgctcttccaggcggatgttaactcctccatggctgctggaatgttaaaattctatatggacgtcagaagaagagggggtcttatcaaattcacgtgtcttcttttataaatgggcaaacagaggcctagagaagaagactttcccaggtcctagaggtagttaatggcaaaggtagaatctgaatgcaattctttttcagatcagtacctaattcctttactcatgtaagtatcaaatcactctgggttctctgggcctgcagcaacaattaggggcagctgtctaagatgtgttcggtgtgtgaggttgtggtggtaagaagttgaaagtctgtgacaataagtttccatccattaaacagttatgaatctattttgtactccttgggtaccttaagtttaggaattgggaatgatagtgagggtggcttagatatttttgtcttaggggaagatttctgccttggagtgttttcagacagaatggtgtttctattttgtctctgatccatgagtgtcacagtgttataaagcatagtttggcctgccttcccactgcagtacccctacaggagcaacaccttccagaaaccttataaaagagaggagaggggccaggcgcggtggctcacgcctgtaatcccagcactttgggaggccgagatgggcggatcactaggtcagtagttcaagaccagcctggccaacatggtgaaaccctgtctctactaaaaatacaaaaattagctgggcgtggtgaggctgaggcaggagaatcacttgaatctgggaggctgaggctgcagtgagcagagatcgcgccactgtgctccagcctgggcgacagagcaagactctgtctcaaaaaaaaaaaaaaaaaaaaaaaagaaaaaaaaagaaaaaaaagagagagaggaggaagttgagcactttgctcagaaggacatcatcctgcccattctggtccttacctctaaaacgtgccactgactctcaatcctccccatactccgtgtgttttgtgcattttggatgcacagctgcatcacacatgaagatgcagttgcttcctcccaccctggattcatgctacttccactatgactgtcatttacatgtgcccctcttagctcatagactaagggagaagggaaagggagtgggtgcgagcaactgcgtccagccttgcccccggttccctaagtcagctgttggcgaactatgtggatccaggactcttttacatcttcaaagttatagaggacccccaaagagctttcacttatgtgggttatatatacatatatatgtatatagttatatatacatatatatgtatatagttatatatacatatatatgtatatagttatatatacatatatatgtatatagttatatatacatatatatgtatatgttatatatacatatatatgtatatgttatatatacatatatatgtatatagttatatatacatatatatgtatatagttatatatacatatatgtgtaaacatttatcatattagaaagtaaaactgataaatttttaaaaatacctcctatgacatctttttaaagtcataaacaataataaacccttacatgttaacatggcatttttaaatgagatgtaactattttccaaaccaaaacacatttagtgagaagagtggcagtgttctgcatttttttccaagcatttttaactctctggcttgatagaagcaggatcctcacaactgctcttacatgcggtctgttgtaatatgccgttttagttggagcataagaattttcccctggaaaagggaagacctctcagggtttctcagaccacccttagagaatgaatgctgtaagtgtttcacagaaatctctgggtgaggacaagtaggaggagaatgatcaaagtgtggcctcagaggcaggtgcagaggatgtacccaaagggcacctggcttgggtagacaagggagaagcctactgctgtattctttattcagagtttccaaatagccagggtggtctttcagtttagcagctcctgtgagcctctcacatgtcacggaagctacagtgcctcacaagcggtgtttgtggtttcaagtcaaaacccatgggagttctggggttgatttgccagtgacctgtcattactgtaaaccccttctccaaggggccccaggcctaggactaggttctagaggctgggtgtggtcaaggggcacagagctgttggacaggctctactgcaggcttattttgggctctgctttcttcttctgccttttattctcctctctccctcctctttaattctaaggggcattaaaaaccctgcttagtctttggtaactcttgtgctttctcagtttttagaacaacattgaaaataaaaacagacatttcctagccccactggccagaatttgtccaattaaatcaatatcattggcttgccattctcgtctcatcccatgcagatttgcctggcacacacagtaggtgagctctaagtgctctggtgaacttagaaatcattttataaggagggcacccttttaggaactgggtcagacattgtgtggtcatattaaagctcaatccctggttgcccacctgattgtgggagaccatctatagaaggaggggaaaaagaaactccttttcccagggtgctggactaagaactccagaggccctaagttgtctcgaccttcagatgtagttcaaaatagtttaaggaggcccaacaaggttctgatactcttttgatgattttaaaagtattctttttaagattaaaatacttaaaatacaaggaatactttctaaacagtattattctttcaagtaattaaggagaatctgtttgtaccttggcttttgggtgatctgagactgttcccagcaagaaccttgaattcaggtgcctcaagcagtgggttggatataaattggtatcaggtagtcaactggtttcacgaaagcggctaagggttgtgcacttgagcctctcttatgtggcagaccttatatacctctgacagcaaaggctggaagtgccttccccactttgctcaacccccagccctaccctgggtccaagtgttctgttattggaaaccccaagatgtgctctgtctttgggcttgtctttgcagcagagcatggtggttaagtgtgcgggccctggagtcggactgggtttgcaacccagctctgccctttcccatctgtgtgaccttgggcaagtttctgagcctccctgtgcggcagtatctatatacaattggagatgataattggtgctgtcgtagtgttgcaagggcggaatgagtgactgtacacaatgcttggatgaatacttgacatacagcaagtagccagcccacctgaagtgtagtggttgatgtttttccttgggaatactcagctgctaaaagctaagtatgtctcttcgtggatctgaagacttggaacagaccaatttcaactccaatattctgaggatgttacagggagacagagaagtcagtctcatagtagaaagactgactggctcaggcatttaggaggcctagtttccagccctggaccttctactatgagatcccaaacaagttccttttcatcccttggccttgctttccgcatcaataatccaagggcttgccagagttgtttttctaagaagatttccaaagctaatgcccttaaattttgtgattcccctatctctcctcccagcctgccccttctgttcccctcggcaggagcgagcgaacatgagtggttctgatacatattttccttcctttccaaatccaccaggtcagcacaagaccaggccctgtcagcctcttctagctcatagcttctgcccagccctggaagtgccattctgtaagagaaacaaaaccttttcctccgg

SEQ ID NO: 55 - DNA, 29126 bp, Mus musculus
tcctactttcaaaggtgtctatccacagtcagaatcaggtgactctgttgcttgtgcctgagaagtgttagcatatcatggcaggatatcatggcagtagaagcatgatgaagcaaaacttcccccctcatggtgaacaggaacagagccaaggagtttttcaatgaaatcccagtgggaacaagctattgaagaaaacctcatggaagattaggtagtcgggagatggaagcgcagaagtgagtggcgacgaaggccagtactgaccaataaacccatgcttggagacccacaagtaggagcaactcctacagcaacaaggaccttttgaaattggccagatccctgagcagagagagctgtaagaatgaagactatacagcattttgtgtgggatgccaagctaaatggctgacctgaaggcgctgagcatggaagcaagtgaaaatggaaatttggtgatgaaatgagcagcctgagaagatgagcctggcttgtgatacccagaagtctaaaatgacttaagagcatattttgttctcttgtggcccaggagctggaagggactggtgtacgcagagtttgctggttaacctcagaatgtgaacagtagtgaggaccagctgcagttaaacttgtatatggcctttggctcagctgaggtggaaagtgcaggggaccacagtggggtcagtgtgaagttcccagcatccctcacaccctttctctgactcagatcacggttgccctagccctctaccctgaaactccattttcccaccactgcggcaatgagagcaaattctggctctgtctgatctgagaggcaccgacctctttccccacccatccccaaccccttaccaagctttctctaaagttttctgacttgacctgaaatgaaacagaaatttcagccattgttatgaagatcagaagtcccactgtctgtcatgttcctctaccaaagatcctacctagttagtctccatcagcatctgcctccacaggcaggactcaactgtcagaatcttagctcttccccagcctttgagcgttcagagccatttcaggagactgaaaatgggaaccacaactgagacggtaccagccaacatagctgttctgatgatcaatatgtagttccaatgggcagagaagaggccatataggccatcgcagctagccacagagtgccaaaggaagggtttattttctcaccttgcagatataataaggtttccttggaagtacactggggttcttgattccaagagaagagatgcaaggaggtcagcttgtccatgacacccttctaaagatatcatctttactcttccaactccccatcccaaggcccccattaacgcacagtttaacacatggagacccttctggcgagacacactcttatatgctacagggagagtcatttggggctcttacacaaatgtttgaaagttactcttttaggacctagaacagcatcgtcctaaaaactctttataaaagctgatttggcttagtttgcagtgcacatggattacagcccagccccagttacagtctcaggatctgggttctatagggtttgcataggagacattcttttcctgatggtcttaggtggcatttgaataaacaatattgtcacttcctataattcttcccccctgataactcacttgggaagcctcccacaccttccccctctctaaggggctctcagcccttcaatgaaccccctctatcttccactctgtgtaaccaggggtatcccagaggatctgcacaccatcccagcttcccatccggccctgagcactctgaagccgctgccgtttccaaactccgaatccactgttggttctttttgacgcttctttcccggatctgcatttgaccctggctctctagaagctactaatcactttagaaatagtgcctcacagcaagaataaggaaggaccagaaaggttgctgctcaagtctataaaacaatgtgtttctacattgcaggtggtgagcatcttcctttgtgtcatctacacgtttctagtttgtggacttccagcccacctgctccttggtgtttctttcatagacccatgaaaaggctggcatgggggaatgcatggtgggagagtcagtcacatggtcaaacagtgctggcccctcagtattgttctgttttcttttctgggtcagatacaatggaagggttgggggaccttaattccgctaagcctacagcttctggcaacctcaccaacactgagccagcactcagattagcctcactgtgctctgtcaggagaatccggtatgatccccaaatcacctttgctaagaaaatctgtcatttgagtcctctgtcaggaaccagtcacaccaaaaggccttgatctacaccagacctgcctctcagcaggtattaaactgccaagggtgtgtgttctaccatagtgtgggccgtttctgactttgtttggttggctgctcgtttttttctgtttggaggcttttagttaagacaggtcctcattctgtagtccagataggccttatctagaaatcctcctgcctcaaattcctgagtgcaaagatcacaggaaggctccaccaagtcctaccgtgtatagattattttctttcttaagaaagtgccagctcttccgaatagatgtggtgctctcgagggttttccagtaatttctccctgacacagtcaatccgagaaacccaccacctccctcccacacctgggtcgccaccctggtcatgctcttgaggaaaagccagcatcatgtcctgccactcaatgaaggcctctctggtttccgatgctctcagcaggcctgactcacaacgaaactgcaacctcaaagcaccgggggccaggacggcgagaaggaaacacaggtgaacacgcaaaagctgcccccaggaaaaaggtttgtttctcttacagaatggcacttccagagctgggcaggagcacagactagtagagactgaaggggcctgcctggtcttgtacctggggttttggtatggaaaaaacacaccggaactaatacatcggagtgccaactaatttctgccacagggagtagatcgagcggaggtgcagtgacaaaaaaaaattctagaactgaaaagtagcttgggaaaaaaaaatggctctgacaactcttcagctctcagaagaagaaagaagattctgggataacttgtcttgaagctcctgatccaggaactagggcaggaagtggggttcccagtgcatgagccaaactcctcccatcacaggattatcttctctgtccccctataatgccttcagaaaactgagatcaaaacttgttctgctgttccaaagaccttaggtctatgagcagattcatccagctgcggtctctgagcattgtaaagaagaaacatcaacaccatccctagggtgtgccagcttgtacagggcagatgctcactgaatcatttacacaggatcatagtttcatttggtctttgcccaatagggcagttcccgtcctcttatccaattgtgtatagagaacggaaacacagaccagcttggtaatcttcccaataccacacagatgctaaaaggcaggccaagtctgactccaggacttgcccgcataactgccacaccatgctacaaagacaagcctcgaggaaggtatctatggcttccaacaacagagctgatcccggggacacagaactggtggcgggaagcagaaggatgatagcgggtccatccttagctgtctgacataaatgaggtgggacacaagacatgcagccttcttccagagaccaataactgttagtgtgaaaacagtttataaccagcctcccacttgagggtcctgtcctcaaggtgtctacttagggcagataaggacctcagaatacaaggcacagccctgtgggtacacaccctgccccttcctcccctacctcatttgaccatccctcctctctctggatcactctgatattatccattctcaaagggtatcctgataatctaagaaacccccacccccactcccattatttagttgcatttgggttttcttcaaaggctccagccaaaacaataaatcacagaagtctaaatttcagaatatgtataaggattttttttaactttgtatgtgtgtgtcgctaacacacatatgttccacagcacataattaaaggtcagagaacaacttttaggagccagttctctccttctgttcctgtatgttctggggatcaaactcagatcattgagtttggcagcaagcacctttatgcactggactgtattacagcaccccacccccaaaacctaccttcttctatcagaccaggtcattgtaaagattttaaaggatttatgcatgttagtatcactgttgcctatgcctttacagtgttatatggagacacttgatgtggttttgtttctaacgtagtgatatcaattgatataactcatataaataaaagctccatgtgacattttttaagagtgcaaaaggatcttgatttcaaagggtttaaagatggctgacttaaaggccacacactttccaacatggccacatacagccccttcccttttccagggtgtgaggcaaagactgtgaacaacacagccacagtagaagtagcctgagcacctggatccttgtcatagagatgtgcacagagagcacacactgagaatgtgttcagagtcaaggtcaaaaaccaagtagactgtctgatgacttaagagtttctggaagagatgctgtattgattgctatagtgagagagacctcaccacagatttaacgctctgcggtcaaggcctggacatttccctgagacaaaattaactcagcagccctcacctcaacgccggttcgtaaacacaaggctgggtgcggcaagtgcagaatagtcatactgtttgatagaagaaaacgtaatttcagacttttagtttctcctcattaccacaaaacccacgcactgcacaaatcccagaataatgcccccattgtgttggtgggcctcaagaatttgatgtcttaatgcctaaaaagcaacttgctgctagtacacaaagtagtactgggcttagaccctacctttgaagttaacctatgtagcggctggaggagccatttccttctccatacctttaagtatggattagataatgccgaagcctccttctctcctcacctcttccatacaaggcattgttttcattcccaaaatcagggaagatgcagttaacacctgcctgcaaggggctgattagtaaacagatattttttttttaactggaaggttattatgggattaagcatgtcatttgtgatagctgtttctcccaatgaatccatcctctactttatatgagacagaataacaagatacagagcctcttggagctatgaacctttaggaagtaatgccagatgtagagagatacacccataattctagcagctcgagagtttgagggtaacctgagaacattttcaagaaatcatcaactaccaaatattgttttaaaatcttatactaattctttaagaagtttcctgtaatatacatagtcatattcatctctccaactcctcccagacccaccgctacctctgtatccattcaacttcatgctctttctctttttataaacccgttgagtccaatttgtgctacccaaatattcttgggtacggatatgtcatagagactggatgatgtaccaagcattgtaactttaaagaaaactatcactcattcagcaactatcgattgccaagaactccttaactaggggtggggttcaccccaccatcacccccatcttcatgttggggttttgtctgccttgagtttgcgcaggtcttgggtgtgctattacaattgctataggtttgtatatgcaactgttctgttgtccaccactataagctttccatagatccagagcgatacgatgggcaaataatgatgatccaacaggagccctggcctgtggtgcttacagtaacaaggtagagagcacgtaatcttatcatgtgtacaacgactgacttgagtcacatacagcaaaagtaacatacacccaggggaacctaccagtcctggactgagaaagaaaagaaaaatcatataaagaagtggtgtctaagctgaaagaactcagaaagagaaggggggagaagagctaaatatgcaaaggcctgtggtaggaaaaaatggatcatttgaaaggaaaaaaattaaacaaaaactaaagagacggggttatagagggaaacaaaaaaactgaagcaaaaggatggagaggtaaaatggtaaaaaaaaaaaaaaaaaaaaaaaagtttctacacggtattaaagtgagtcctggggctggatggctcagtggttaagaacaaataacgctttagcaaaagacccaagtttggcactatgcacccccatcaggagggtcaccgccacttgtagctctagttctaaaggatccagcaccctcctctggactccatgggcacttgtatccatgtgtgcatattctcacacacatatacacataattaaaaaaaataaatctttaaaaaatatatacgagctctgagagacaaaggccgtgccaatggactttacactgtgaacttcaggccaggattgttttacctaaagaagaaaacttgggagttacttgaggggtttgatgaggaaattaacagtcttgctggtgtctgtaaatgttcactctaaactagaggtcaagagatgtgaacagatgagagaaatgtttacggagaaaaccccagaggatgtagtgatcaactgaacgtagatgggcagaggggagcccagaaatgacccttgaggtggtcagtggctctgtttattgtgccagacaaagatggcatcacagaaagaacacttcagttaagatacctcatcagcacttctcaacctggaggtcaaactacccactcacaggagtctcctaagaccatcggaaaacacagagacttatattacacttcataaaagcagcaaaatcacagttataacttggcaatgaaaataattggggggagtgtcgctacaacatgaggaactgtattaaagggctgctgcattaggaaggttgagaaccactacacataaactgcaggttccatgcaaaaagaagaaacaggattcactgctgaacagtcactaaaaattccaagacagtgagaacccagtcttctaagtcatggtcccccgtgtgactgctaaagtcacaaatccaaaaggccatcttccctgaggcctgtctgtaagctttgaagtgacaaccataaagagaagctatacatagactaaattccatccagggacaagttctgcagctcagagatgccactggtgtccaggctcaggtacctatggttatctggggtagtcatggatacagtcaaaacggttatctctgagtagcccgaaatatcacctattgcctctgacaaaacaaacttctcatgtgagaagttagagtaaggtgttggtccttgagtaaaagtcaaattgctttatgtggcaccacagttacacaaaggggaattccacattggctgtccagcgatcagcccttccgttgtgctttgcaacatctgcttggccacgattctcaggacattcaatccggtttgcataatcctggcttgatttgcccctaggctagccttaacttgggttccttctaaacctatgaccccagtcacactgtgtataagtggtgcaagtggggttggatacagagaagccaccaaggaagcctctgcccaggtcactaaagcaggttattcaggaaacattagaaatttacaaatctttaaaatagtttcacttaaaattaaagtggaactaattttccgtgctagataagaagaaatgaaactcccattatcagctttttaaagagatgtttaagttttattttactattgattcaactgtgtgtgtgtgtgtgtgcgtgctcgcgagtgtgtgtgtgtatgttatatgtgcatgaatgctaattaccatgtacaaatagatacccatatagaccagaaaagcctatcagatcccctggggctggagttgtatggagttgtggttgggacctggaaacgaaactctagtccgcagaaggagcacaacactcttcaggggtgagccatctcttcagtctcccaaaataactactaacaaccccaccttctctatccataccacactcttgccgtgatgactctattgccagacaatctggctgatccctttgcctttccctggcagctccggtgtgccactcagagctcccagactgtcccctagaatggcagaaagtcatggagcaagtacatcaagaaagatgtcattttgttgggcgtgagtagattcctcataagatcttgtacactgtctataaaactctaaaatttactcatatgcacagaagcacacacacacacagagagagacacagacatatgtagacacacatacttttctacccagagtcttctgcagctaaaatggtgaagtttaccaagcattagggtgtcctattccaacgtgccactcaacttggacatcttgcaatgaagattggagaagaagagagagataatgtagggcttgataacgtgtgagtgcaataacagccatggactgctgacccctcaagctgggtgtgaagttcacctgtggtcctaggtactccagaggctaagacaggaagagagtaagttcaaggttatcctcagctacagggggaacttcttccgaatgaactaacaacaaatactgccttttttgtgtgtgtgtgtgatttgacagtatatatttattttttttccatttttattaggtatttagctcatttacatttccaatgctataccaaaagtcccccatacccacccacccccactcccctacccacccactccccctttttggccctggcgttcccctgtactggggcatataaagtttgcatgtccaatgggcctctctttccagtgatggccgactaggccatcttttgatacatatgcagctagagtcaaatactgctttttaaagccatgcttaataaaacttcctttcattggcagctgactagaaataggaaatattttgaaacgtgagtaatagaggagacattgccctccagatccccctccccctgcccacgacctccatctgatacatacctccctgatcctagggaaaatgtatttaaacacgacttctggactgactcaggccatttgtccccaaggaatgcacagactgatgtgtaacagtcatgtcctcttgaatccgcagctccgacagcacccaggctgttgcccatcttttccccagacatacgctctcacttccctgtcatgggcacttcccttgtcctgaaacccagctcaaatctcctgccatgagactcttgacatttatgtcaagatatagctgtggctttggggcttttcccagtgtgcgccaaacacttctcacagacttgagctctctgcatggtccttacttggctaaatatggacttgtatcaaggacctcacataaggttcttgagggccatttagagtctgaaatgttgaggagagagtgagcaacaacttgaagccaatgggggaaagaaaagggcaactagctgacaaatggctgaggataactggctatgcgtttcagaacaaataaaaaattcagatcataatcataaacccacttagttgaatatatattaacaagaaatataaatagttttcacatatctctcttctttctgtcattgtgggagtgtggagtatatacatttataacattaatacagtaatacatgacatagtatattcatgaaactaattatatttatattagtatatgctcagacactattaaaatattaatataaatatgatgtatcattatattgatataaattatgtgctataattaagtacatgctaatatattaatgttttatgttaacatattatgaaatagttttatgtacatgtgtaaaaggatattctagacaaaaaaaaataattacgggaagatataagaggtgctgcttctcctgctgagttctgtgctcacccctctgcttctcctggtgtttcatctcctacctctggatcaagctcatagaactgtccagtgccagtcccaaggacagctggtaccttctataggccagattcagttctgggggggggggggtcagacacacaaagctaaacacaatatgttcagggaccttgtagctgctcagaaataaaaaaaaaaacatgcaggaaggcagcaaaggggattgtggctatcaccgtgcagtaagtacaggtcacagtcaggagagagggcagtgagggtccatgctagctgggtcttgagcctcttctggggttcagatctctgatctacagcagtgtgtccacacctaaaacatcagctcagagaggcagttgcttctgctgttggaaacggacatcccaaaaaaaaacaaaaaacagaaatcaaaagggaaggagaaagtgaaagggatggaggcagcttgtccccttccctgtgcttgctgctggtagaaaactcagcctggaactgaccggagcagcagttcttgagtcaattccattccaacttctagaagattcttttcccgtcgaagagtgtcaggaggagaggccagacccccttgatcctgatctgccagccactgcatcagataagacgagataaccccgagttcctgttctaccagccctggtgtggtaaccctctccaatggggcaggcttggaaccctgtgccaacgaagatcctcccccgtactgatgcaggaaggacagcccgggagtgtaccctctacatgggtctacttttatttaagcaaacattccctggtcaacaggacgtgtagcattgccccccccccttgggtcacacagaaaacaggtaccaggaggacaagtagttgcttgcccagggtacagaatgaaaggcaataggggactctaggcgaatgttcttcccacccaaactgaggtagtaggagaagtccctactgaagggaaggtccagacataatcaaaggactaccagagatctcccaggtatctgtagaagtactaacatctccatccttcaacagctacaggttacacgtctccaaggctgggacattgtaaaacagggccatggtaaggtctacccgacagcacagagcaagcctcccagaagtctgagttccttctcctaacttctcatgctgggatctgagcttcttcgtgaaacacggggcagaggaggcaccagaactctcctctgaccaactgccccacagcacacatatcctcaaaggatagtcttgaatacgtgatggaagaattaaagagagtgaggtctgaagaaaatcagccctctcggggtttcctttgggtaactgagtgctaaggtgacttccgagtcagcaagaaatatcggacgttcaacccaggttgagtggaggaaacaattatttctcaatcctaatatgttctggaatagcccatttatccacgtcattatgacctgggagtgcgtgaatggaatccacagatgagggcctctgtacatagaacagctgtctgcctcaggaaatacaacttttagtattgagaagctaaaaagaaaaaaaaattaaaagagaggtagcccatactaaaaatagctgtaatgcagaagttcattccgaccagttctttagcgcttacaatgcaaaaaaaagggaaaggaaaaaaaaaaagaaagaaattaaactcaaaaattgcatggtttagaagagggaggaggagcctgaataacaaaaacctttgccaggaaggccccactgagccttcagtataaaagggggaccaagaacaggaggtctacatttagagacttgctcttgcactaccaaagccacaaggcagccttgcagaaaagagagctccatcatgcctggctcagcactgctatgctgcctgctcttactgactggcatgaggatcagcaggggccagtacagccgggaagacaataactgcacccacttcccagtcggccagagccacatgctcctagagctgcggactgccttcagccaggtgaagactttctttgtaagtatgagctcgcctagcctttcttcctgccatcacctgaaatatgcattctgatggaactgcaaaaatagctctccttctcctcctccttctcctccttctctttctcctcctctgctttctcctccttctcttcctcctccttctcttcttcctcctctccctcttcctcctccagctcttacctcatgctgctcctcccctatttccagcacctattacccttaaacttaaatctagagagtcctagggaaagccatgagttaaactaaacccaggcacatccgaaaagctaactaggaggtgaatgcattgtctctcccatgctcaagaactttctgttaagtttccaataaggctccatgttttgctggctaggacaaaagtctgtggtctctgcgtagtctctagatctgggggacagaggtttgggggtttgaagcagcaccagcatagagagcttgcattacaaaagtattcccctttcagagctcctggaactggtatggaggtccaaagaaggcagagagctatgcaaaacaggctttctataagggactccagaaaggaagggttgacacaggtgctcttgaaacctgatctgactcatctgaaagaagaccgggcctgggtctaacttctcccagtcagttaaattcagtcagaagtttttaaaaacaactggatcccaagaggaaggactttgatttaactccgggctctagcactgtcaaatcctgttcttaaaactctcctttccacagttgccagggcatttgaattgattacaaattcaaaactctacaaatggaaaagtattcaaatgacatgcacattgggtattttccccagtccttgcattcacgttctttatgttcttccagcaaacaaaggaccagctggacaacatactgctaaccgactccttaatgcaggactttaaggtaagagtccggtgggtgctggggagcgaccaagcgattagggacgggacgggaggtgctgcttgtgacagcagagctgggtctgatgccttgactttcaaaaagagaagtgagaagaccttgactcagcatatcgccagcagtcaagggttgtgaagagctcattctgtggtaaagggagaaaatgtaactagaaggggcggggatggggggggggtccctaggaacaggacagtccatcaaggttagcagcaacagatcaccattccagtaagtcacacccaacctctgatccctgcctctagggttacttgggttgccaagccttatcggaaatgatccagttttacctggtagaagtgatgccccaggcagagaagcatggcccagaaatcaaggagcatttgaattccctgggtgagaagctgaagaccctcaggatgcggctgaggcgctgtgtgagtagcagatgcgttcttccccacccccaatccccttagagccacccaacaaatactgtctcctacagcccagtcaggccacatgcatccagagacacacacagactagacaggagactaggtaaatctagagagacgcctgtccggtgtcgggtctcttgctcatctgtctctgagcgagtgtgggagtgactttgaggcactcacacgtgaagatttgcgcatagccttcctgttatttgtgagtcattgtgggttattagctactcccctctctctccatgggaaggctggggcttcagtcatggctccctcacctctgggctgccagctgaggctcccaagcacaggaaaacattcatctctttatctcatcttttgggaagcaaattcagtggcacagagctgggctgacaggacgctggtgtttcagaagggccagaagactgctatccctaagccagtatctatgaataatacagtcggggcatctatgtctctgaagcgatgccttggctgctcttgtttttcttacttctctcactgatactgggacatcagctggagtctacttgtgcaacggttctggcctgacgatttggccccagtagctgagactttcgctcctctctcagacacctagaaatagttcatggtggttgagattggagatagacaagaagagacactaaaaacagaacaggtgccttggagctctgagagacaaaacccgagacctgagttcacacccacacttagcaagccatcttagtgattgcaaagacatacattgcatctttctaggctgtcctctgctgtccccctcagtccctaccgaaatagataaggaccaatcacggctcagttctccctgggagctaagaagtgggcattgaagatgagcaagggtgtctccttcctcacacaacaagatagtttcccccaagtaccatggatgcagaattcaagcaagaattaccaatgctctcttttttcttcttcagcatcgatttctcccctgtgaaaataagagcaaggcagtggagcaggtgaagagtgattttaataaggtaagtggcaaagggggcgagtgtaacaagacctctgtctactcaccaaagcgcagaaggagggcgggagctattctgcacctggagtgtgggaacccagcaaatggtgtgacctcctctgccagttagaaagccaccacctcagttacatttgttttctgcaaagcgtctctggcagtttctaaatgactgctccacttttgcaggcttttggcttagactgaccagacagcctatgagcacagggcactaggtgttgaggagagtgacataggaaacagaaagtacagaaagtaccttgttgggaaacaggctgaacccacaagtacagaaagcagacatgaattaatttactcaggtacatcattggggctcagcctggatgcccctcccccaaatcagaacgagcagaaagcagaattcttacttgtcccggggcactttccacctggcaaacaaaatgaggtttcacacttccaactgcctgtgaacctattcaaccctagttcccagaagccatgtggcctacatcatcatctttgtgggctaggcagagacacctggcagggctctaacattagtgggcatgaattccatgacagcaggtcagagctgcagggtgaggactgcctacacactcaaaacataaaaaaaaaaaaaaaaaaacaccaaccatttccctgctatctctatcactgccctgcttacaaactgctccctctggcatctttgcataacattctgcataagcattatatgagcactggcctcttaaaaaaaattagttgaaaaggtgccaccctgaagacagtgctttggggactgaatgcttcccttgctgactcctggcagtgcttaaagctgggagaaggttggtcccaccacatcctgactactacagtatagttgtctctcttctttcatttccctgtccccatttctttattgtacataaagtaactggtgtatgtgcacacacatagtgctctctctttcttttccttttttaaactaaatggccgatgttctgttctggttggcatcagatggagatggtctgggggaaagtactgggtttgtgaaaatacccccttctccattagtggcatgctctttcagctcttatctttatattccagtaagttattttgctctcattgttttaacaaaagaacccaacaacaccaaatctttgcataccttgttcgattggagaattttaatgtttttcatttatcattgtaaaaccgaggacaattttataacttttttgtacgtggctgttacatgtagggcaatctgtctttaagtagggataaattactcttgaataaaatgatcctagatagttttcccttcaagtcaagcgtcttgttgtttaaataaacttcttgtttaaaatgaaaaaaaaaaaaacaaacaaacaaaaaaaagctgggagaaggtataggagaaacaggggaaggcacggccccttcccaaagcagacggacaaatctttgggtccttcagctcccaacacaagaaagcagagatctttctatgctcagcatccttcccagggcagggagcccctcagcccaccaatgggtactaaccagatgcttctctccccacacagctccaagaccaaggtgtctacaaggccatgaatgaatttgacatcttcatcaactgcatagaagcatacatgatgatcaaaatgaaaagctaaaacacctgcagtgtgtattgagtctgctggactccaggacctagacagagctctctaaatctgatccagggatcttagctaacggaaacaactccttggaaaacctcgtttgtacctctctccgaaatatttattacctctgatacctcagttcccattctatttattcactgagcttctctgtgaactatttagaaagaagcccaatattataattttacagtatttattatttttaacctgtgtttaagctgtttccattggggacactttatagtatttaaagggagattatattatatgatgggaggggttcttccttgggaagcaattgaagcttctattctaaggctggccacacttgagagctgcagggccctttgctatggtgtcctttcaattgctctcatccctgagttcagagctcctaagagagttgtgaagaaactcatgggtcttgggaagagaaaccagggagatcctttgatgatcattcctgcagcagctcagagggttcccctactgtcatcccccagccgcttcatccctgaaaactgtggccagtttgttatttataaccacctaaaattagttctaatagaactcatttttaactagaagtaatgcaattcctctgggaatggtgtattgtttgtctgcctttgtagcagactctaattttgaataaatggatcttattcgaattacagtgtggtgtctattgagttctgtctgatttaaaagaaaaatcccttaaaattccagagggcagaagcagtgaatcttagactccacaaaaagaatgccagcaacctctccaggaaggggttgagctcggatcagatcagaggaaagtcttgcctggctttcaaagcatcagcataaactactgatatcttcaagctcagtcctttaaaatgtgtcctgaaaccttaaaaggcattctaccttccaaagctagggaaggtgattctaagtaaccatcggaaggaagtgggaagcatcaaagctgaaactctgagacgaaatgttggggttaaaaatggaagctaggggcaggagggtggggagatggctcagcagttagagtgtgtgccggcaccagtgagacaggagttcatatccttggaatccaaccaacacacaaccaacactaggcaagagatgcctaatgtgtcagtggttgcttcaagctccagaggtcctggggtgaacttagatctgtcttgggggcgctctctggggattaacacaaattcatcactagtttctagaactgggaaatcgtctggatactactggcaatcacaattaaaaactcctgccaagcctgccaaaccctttcacatgctaagcaaacatctgctgctcaactaggtctccagcctcttgacactttgagataaggcctcaaggcagttcagtatggccttgaactcagctcttcctgcctccgctgcccaagtactgggactcttcttcaaactgaggtcacaggcagcagagttgagccattagggttggatagaggtaaacaaacctactcagctcccaaaggatgcaaccactcttcctgccccctccctgagccaccagatagatattagactgacttctgcctggggtagggggagtggctggggaagccctactaaatgtctcgtgactttgaggataaggggaaataatgagctgagtaaccctaacaccacatacacacacacacacacacacacacacacacacacacacacgtgctggccaggcagcccgggacagggtgggtgggagctgacaagctgtggtcattttttcagtaagacctgactcacttcagttaaagtaaccatcggaaggaagtgggaagcaccaaagctgaaactgtgagatgaaaggttagggttaagaatggaagctggggggggggggggggggcgggggcagagagtgggatggctcagtagtttgagtgcttgcgggcaccagtgagacaggagttcatatccttgaaatccaagcaaatgctagtgtgcatggtggcctgagaaggcacagacaggggattccaagagcaaagtggctatctattaagttccaaaccctggctaagcagctgaggtgtctatttaacatatcaaagcagaaccggcctccaggttctcccagcatccctcagtccctacctgttaaggtttatggctggcataccctgccctctatcctgaactctctagcccagaggttcttccttatataattcagacattttggttaactgcccttggccattttggagagctctggattcgagtctacctcagtgagaagatggaagaggaattgagggtgattccgcacgtcaatgtcaggcttgcatgtggacatgtgtaaccacccatgtatgcacccatacacatacaaagagtgcatgcacacatccatgatgaagaaatgaagaagaacaagaagaaaaagaacaagaagaggaggaagaaggaggaggaggcgccggctggtgactaagctctcagcctgatccagagaagctctaagccctgatctagaaaaatcccaacagctcgggctcagtggcagccagcacatgataactagtcagaaatggtctctcactcaagagactgggcattggaaatgatagaagcaggtctagaaaggccgcataactgatctcaacagtagctacaatttgactggaacatcttctgggtgtgtcagcaccacacttattgctctatgaagcacactatattgcttttaggcttgctatttcctgtagattcagaagtgtgagctttttcactattcagtttgctgcactatacagttcagtaattcaacattctgcaaattgtgtcagaaattcaatttttaaattactttattaattctcaaccatgtgttgatcataaattaatcttcaaaaatacctaggctctctgtttgctggttaaactctgtgtgtatctatctctggacttttatacctaatatttacattaataataatgtgaacactaattaaagccatttgctgactactttactatgcactacatatatactaacttatgatcatgtaacattatgaggcactattaaattgatatttcaaaattttttgagacagagttttactgtatatccctaactagcttgtaactcactatgaagactaggtggccttgaactcacaaagagccacctgcctctgcctcccaaatgctgggattaaaggtgtgtgccatcacatctagccaacatctcaatttcttacacatgaagatgagattcagttaaaacatctaccttaggtcaaccaactactaatggcagagttcatgatcttaatgattatatcaaacccttatatatcattttcaaacctaaattactgaaaatttctctttttcctgtattgttctgcctccttaagagttacagatatttttccagctggtagtgtgcacctataatgctaggattgaaaagctgaaacacagaaattaagaatatgaagactgcctgggctacactgccagaccctgcctcagaaacaatcataaaatactatacactcactcccatatgctcaagaggctgaagaaggaaggtcactgaatccaggagttcgaggccagcctctgaaccctgtaacaaaaataataatatacactttagtattatgtgtctccattcctatttgtctcaaaatatttttatttctcttctaattactctttgactatctggttcttcaagagcaggagaactgttcacatgcctaatatagctcatcacacagctctttgaagatgtctgcatgagtgtccacagcacaggatatatacagcttgccatgagtcactgatctgggagagaagtaagaggaaggtaggtacagcatgatttctggcctattccaggaactctcacaaccactggtcctaccacattctacctgttagaaggggtaaagtacagaccacgtacaagtgaggagcagttgggcttcaccttttgaaggaagaaatcaaaagaatctgtgtacctgtttgtcttagttaaggctttactgctgtgaacagacaccatgaccaaggcaactcttataaaggacagcatttaattgaggctggcttacaggttcagaggttcagtccattatcatcaaggcaggaacatggcagcatccaggcagccatggtacaagaggagtagagagttctacatcttcatctgaaggctgctagcagagtactgacttccaggcatcgaggatgagggtcttaaagcccacacccacaatgacacacctactccaacaaggccacacctcctaatagtaccactccctgggtcaagcatatacaaaccatgacactattttaacatttctctgccctttaagctctgtgttcttggcaagtggatggaaggaagagctggctgagaacagtccgaaaggctgggccatcaacacagacattgtcatttacgtccccctcttgtagacttagcctccatttctcctttggaaatttgaaaaatcttggcctgcatgctaggtattgaatgtttgtgtcccacttctcccaaccccaaccaaattcatactgactcccaaagcaatgacatttgaagatagggtctttgggagatgaccaaggttagatgggacaacaagaatagaaccttcatggtggacttagcactaggagagaccctgaagagtttgttctatttccctatcatcttttaggaatactcaaagaaaagattttacaagcactcaatgagataggacctccattgaagcaagagcagaggtctcaggatgcaaactgccttgctggcaccttgaatgtctcagcctccagagctgtaagaagataagttcctgcagggcaagctaagctgcctgcagtgtcttctgactacaggtcaagctctcacggacacatgaagtctggcatgaaggcatcacgtgtgtgaaaatatggaggtgttttgaagaggtgtgttacaattgaggtttgagtgagggtttggaaagagagttaagactttccgctctaagaccagctatctcatctccccagttgtaccaggtctagggtgacaggagatagtgagaatttgcattcatctgtggtcctggctactaagatgtggagggtgagcagcagtgagagaacttcctggaatctagataacaaagtgattgctttacatagatcttggcagaaattaggtaaaaatgaaaagcaaacagccccccctcccattctaggaggaaggtgccagtgccagatgagaaggaggacataggcaggcactggctcgatggcagaagccgtccattctgcaccatgtttctccttcaaacatacttttgcatttaattgtggtaatatttagggaacgtataaatgaaaactgagtcatgaaaacataaaactagattttaaaatgagaggaagatccttgccttccctctgtgagccacagaacctcctcaggaatgaaccagttgactccactctctaagggcaaaatgggtcccctgggcatatatataggtttcattattcattgttcttttcttggtgacaacacatgtggtgactctggagacttacttagcccagtctggaactagaattccgcaatactaaaacacagaagtaggtctaaattaatgattttttttttatcctggggccatggatagaggtatgtcagggctaaaatggagtgactaggcaagttcccaaacttgacaacaccagcagcttctccatcagcctgcacaggaacattcggaagtatcccttcctctggggcaggagttccagcctgaatagagaaggaactgcttgcttcatgctcatcaaaagtccacttactagtcctctgtcatatcattgattagcagttagaaaatggcattaattcttcaaaagttgttaaacagacaacatagtttgttaagtccctgggggaaagtatgagctgtgaccctctgcagcaccaagtctcacgaccactgaaggagctgacctcgggggttctcctcggagcctcagtctggactggcacatctgagcatttcccacagccaagcccctcccttcccactccgtcctcctcccgtacccattcttgcacttgccctggccgtcttccagagagcttccagtcatctgtgtatcattcgtagctcctctctcccagcagtgctgggcaaacacatgggtgggcttaaatttccagaagcttccttggcccacagctggggaagataggaatgaaggttgggggggttaatggaggggacagggcaggttgagggggtctgggggggtgagcaggtgggcgcagctctgagcccacagctgtcacttacccaccagtggcgtggcactgagatgccacctactgcagtgttctcctaacacagaaaaaaatcattgttttttaaggtggtattttaagaaataaatgtaggggaggatgtatagctcctggcacagagcaagtacttaataaaatgaaataataataaaaacaaaagtatcagcatggcagtggtggcccatgcttttaatctcagcattcagtagtcagaggcaggcagatctaattgaatttgaggccggcttggtctacagggttagttccaggacagccaggtaaatgcagagaaaccctttacatatataaatctcctttatacatttgggaaaatggttgtggggaatcagatagaaagatggctgttgacatcctgaaagaatacagctgggtgcatcttacatttgtgccaaaaaattagccctctgcctccctacccaccattcatgggcagaaagcaaaacaggctcatccttgcacctggaatgggaaaaaagaaactgaatttttaagtctctgcttttcagcttcctgaaatcaatcccagagctggtattggcttgatgaagggaaagagtggtgtgtgtattacagcttgagaggttcataaatccaggaaactgcttaacatatgtgcctagctgtttctaagagcaacaaaagccaccaggcaattaaaagcaggttagtctagccatgagtttaatttgtttacagttctgggctttgtccctgctccatccccgatgatagcccacagaactctagaactctgcccacaactatggttttccctttccactctaggagattattgcaaggtcataaagtcacaccatgacagagttcacagcttgttcagttcacctcccagaatctcgtgcctggttacaatttccctgggttacttaagacggaaagatgtcacttccccagtactaccctacctaatcccctccagcaaggcagaattagtaactctgactggcactcagcattaacggctaagctaatcatctctcataatagtctctaccttcatagctaccactcatggaacccaatccagaagagaagcaagctagtcgtgtcctaacatttccttcaagtcaatttttttattcttttagaacttatggtgctgtaggaactctgttggtgattgggtaaaagctgcaaataaggcggggctagcacctgtcctcaagcactcaacaatggttacaaggctgagttgattacaattatttttttcatagatatgtgtacatgcacacatatacacacatgcatttgagacagactcattgttgcatttaaactgctaggctcaagtactcctcctacttcaaccacgatgtccagataattgtggtgattcctatttatttggttttggccactgagacgggatctcactacagagcccaagctgaccttgacctgtttgctcccacttcccaaatccctaaagtacaggtttgcaccaccatgtctagtaagataatgcatagtgatgggggactggaagaggctcctgtgagaaggtgacatttagctagattaaggatgaggaataattggccaaatgaggatgttcagcagagaaacaagcatcaagactccttagcacaaagagaagacggaatgcgttctctctgaagtgacaaatttgtattgattcccaacctagttggaccctctggcttctccacctgaatgccgctgagaccctcaatcagaaagggacactgtcggtttcgataactaaaagacaagccacaagcaattaagcatttgagggagatttgtaatgatcttgggctaatccatcagggatggcaggccgtttctaaaaatgttcaacttcactgagaaagaaaagccaacaaaggctgttaagtagagaaaagaaaatagttctcttctatatgagaccatcctgggtcattcatttcccagcctcagtaagaaggttttgtagtcgaagactaagatgttaatagggattgccaggcttcacgtattcagcaatgtttgggtaaaagtggacgatagacaaggtaagccacagagttctagcatgggcaactgggtggagatgaggcaggttgatgagtgtgatgtacatgtttacactggaccttctgtgataaaggtgtcacttaagacagagacaattcagcatgatcagagggatgaaagagatgggtggacatgacatgggagggagaggatgacaagtagtgacagctgctgtggggccaggtcacaagtgtcaatgaaaggtcatgagggagatggagaacctgatgacgtcagaatgcctggaaagtaggagtagatgggttgcagggagaaggaaggattgccttagaaacagggggtcttcactgagcaacaaccagaagataggggagatgaggacagaagtgggttggttcgaagaactgttggcagaagttggagtgttttctgtcacattcattctatccccctcaaacagagattagggaggagatcacgcaaggaagtttgaggagagattaaaagttggaagtgggacttgtagagacgtggaaagcaagaaatgtcagagaaatagggtagatggacaatggtgtgtctgtgtgccggagagtgttctaacttgactcaagctaaagtcatctgagaggttcatgccagtaagcagcatgcctccatcacttctgcttcagctcctgcctccaggttcttgccttgagtccttgccctggcttccctctctgttacctgagtgctgtagcatggcctttgctcctcaagtcacagtgttttcccacagcaataaaaccctaagtcagggaggtagaagtaggcattgtgggttaaagtagtctggtagactgtattgtatcggctttcttgagattcttgtcatggcccttgtatgaacatataaaaggcaggttcattgtgtccatgaatataaaaggacaacagaggaaaggttgagagtatataaactgaatacaaaggcaagcaaagacagaagcaaactgatccaatgggacagtgtggctgagctcacacagaagtcctttaaccctgaggtcacgacgtggttctgaggcaggatctgaaccactgagaagaggctgtggccagagcgtggaatacatgaatggggaggctttggaggtttgagaaaatccaggcaccgtcattgcaatgagtagctgagtagaggcagggggaaaggtccctggaaatatggaagtcacggaattgaaagccacagtttgaatgagtcatctgccagtcaaccaggctcagagctgaagacagtcagtgggattcgggagaaggaagaagatgcttaagtagcttctgaataagagcaaggggaagaagagagttgagcatcctggaatgtctgtagatttcggtttccacacacagcaagttctcagagttgcatacaatcagcaagcgggcatttcagatccctaaacctcagggaacaaatttaaatggctccctaatggagacagatagatagatggatagatagatagatagatagatagatagatagatagatagatagatgatagatagatagatagatagatagatagatgatagatagatagatagatagatagatgatagatagatagatagatagatagatagatagatagatagatagatagatagatgataggtaggtagatatagatatatattcaagtcactcttaaacataaaagttacaaatttccaagcattaaccctagagtcactcaattcaagacacttatctttgggcctagatgaatcacccaccatccaatgggcacatccaattgagagcctggagtaaaactccaaacacagacctttcttcgccaccaccccccatcccaatcctcttccagctgatatatcaccattaagctcaatgcctttcccacagtggagagatgaacaatcaccatcaagaaatgtatgtcctcaagtccaatataaatctcctgatggatatagaagtctgtttgaaaatagaggcaaaacaaaaacaaaacaaacaacaacaacaacaaaaaaaaacaaaaaccctaagttcttgctctgatgtctggagcaacatgacaacctgtaattttcccacagtcatcccagccaaggcattcaaacactgagcaccccgagattcagcctagagaggataacagaggtccgtagctgtctaaatcagtgctgcccgatgcaggctaaggaccaacgctgatccacaaagagttcattgctagtttgtggcagggtgttagcatttcactgctttacagaaaacccgaggaaattgacttatagaaatgaaggcttatttggcgtcacaatttcataagttttcttccattgtcacttgctccgttgcttccaggcctgtgacaaggcagagaatagcgtgtcagggagtgagccctggagcagagctgctcacttactgattccaggaaagagaactcaatcatacatcagtccctcctcccaaacctgttagtctaggaatccatagtgaattaatttgcgcttgaggttagagttctcataatccaaccaggccctgaagaccaactctcatcacacaaggtctgaggggaccataacacaaggaaggtataataacagtttataagcctctaggcatttttgtatgtgtgcttttaaataatgatttgaaagtgggacttatactttatatatctcattgatattttcattccattctcctaataattctttttatttcattttaggaaaatgttggtccctagtagatggaaaattttaaaatcgagttcttagccaaagacagcttgagaaacacaggattagatcacactctttgctctgcttcccaatgcatggaaactctttaaatggacagaagaaataataagacacaagtttacaaaatacatatccacaaaccaattccatttcaattcctcactgttaggtttcaaaactgggacaaatagctgagctgcctactcagcatatcaaagtggacactggcagccagtttctaccacttacagggccctcctggctggcatactccgcccccaggctgctctcctccatacaatccttccctttctttgtaccttctggcctcctggctgctgcacctggttctccttcaccagtgacactgttggtacagtacagctgccatagcctctctgtagatgagccctagatgtccctgctagcaaagtgctaagaagagtgccatcagtagattactaccatgcaagaatccaagcaatgaccaataccagggctccactataccaccacagccaggcacaaccttccattcccacagacaggccagcacccaactcagccaccccacaggtcagcatcagtgtggcacaagaatgtaaagtgaggccatggaacccacacatggccactgccaagtggagctacaagggaagggagcacagcagacctacacacaggggtcttcacatgcctgcagggtagaattcacaggaagcctgtcggtggacaattaaacccctaattcataggaacctagaggctagcaggcatgtgcgacttttgccattacgaagcagtattgtcctgtacaaagttcatatctgagaaacacatcattgagttgcaaaatgaaaatctagggatgtaagttagtttaccattctgttggctgtgttcgtggctctcctggggcacaggtggctgcaggtcacaggttggacactctaccttgctagggaagatggaggaacccaggccagggagctctttcagaaagtaacccatgctcacagaagccctttccatccagaagggagcacatacttagctcatctgaactgttaagcaacaactcttccctgacctatagagatgggtgaaacacactcccagggaaggagccatcacttcatgcccacgagggaaaaaatggaactaaaagcctaattagtatcttctattttgtgttactgccttttaaaatttttttgtattttgttaaattatagatttttctaatttttctttttaattaataattttcatttctttacaaatttattattattattatttacaatttatatcattgtgtttttccctcccatctcaccagtgaaggactttgtgattgttcttttctatgcctacaaaaaccttctttgtacatttcttcatctcattacctaaatattaata

SEQ ID NO: 56 - DNA, 29126 bp, Mus musculus
tattaatatttaggtaatgagatgaagaaatgtacaaagaaggtttttgtaggcatagaaaagaacaatcacaaagtccttcactggtgagatgggagggaaaaacacaatgatataaattgtaaataataataataataaatttgtaaagaaatgaaaattattaattaaaaagaaaaattagaaaaatctataatttaacaaaatacaaaaaaattttaaaaggcagtaacacaaaatagaagatactaattaggcttttagttccattttttccctcgtgggcatgaagtgatggctccttccctgggagtgtgtttcacccatctctataggtcagggaagagttgttgcttaacagttcagatgagctaagtatgtgctcccttctggatggaaagggcttctgtgagcatgggttactttctgaaagagctccctggcctgggttcctccatcttccctagcaaggtagagtgtccaacctgtgacctgcagccacctgtgccccaggagagccacgaacacagccaacagaatggtaaactaacttacatccctagattttcattttgcaactcaatgatgtgtttctcagatatgaactttgtacaggacaatactgcttcgtaatggcaaaagtcgcacatgcctgctagcctctaggttcctatgaattaggggtttaattgtccaccgacaggcttcctgtgaattctaccctgcaggcatgtgaagacccctgtgtgtaggtctgctgtgctcccttcccttgtagctccacttggcagtggccatgtgtgggttccatggcctcactttacattcttgtgccacactgatgctgacctgtggggtggctgagttgggtgctggcctgtctgtgggaatggaaggttgtgcctggctgtggtggtatagtggagccctggtattggtcattgcttggattcttgcatggtagtaatctactgatggcactcttcttagcactttgctagcagggacatctagggctcatctacagagaggctatggcagctgtactgtaccaacagtgtcactggtgaaggagaaccaggtgcagcagccaggaggccagaaggtacaaagaaagggaaggattgtatggaggagagcagcctgggggcggagtatgccagccaggagggccctgtaagtggtagaaactggctgccagtgtccactttgatatgctgagtaggcagctcagctatttgtcccagttttgaaacctaacagtgaggaattgaaatggaattggtttgtggatatgtattttgtaaacttgtgtcttattatttcttctgtccatttaaagagtttccatgcattgggaagcagagcaaagagtgtgatctaatcctgtgtttctcaagctgtctttggctaagaactcgattttaaaattttccatctactagggaccaacattttcctaaaatgaaataaaaagaattattaggagaatggaatgaaaatatcaatgagatatataaagtataagtcccactttcaaatcattatttaaaagcacacatacaaaaatgcctagaggcttataaactgttattataccttccttgtgttatggtcccctcagaccttgtgtgatgagagttggtcttcagggcctggttggattatgagaactctaacctcaagcgcaaattaattcactatggattcctagactaacaggtttgggaggagggactgatgtatgattgagttctctttcctggaatcagtaagtgagcagctctgctccagggctcactccctgacacgctattctctgccttgtcacaggcctggaagcaacggagcaagtgacaatggaagaaaacttatgaaattgtgacgccaaataagccttcatttctataagtcaatttcctcgggttttctgtaaagcagtgaaatgctaacaccctgccacaaactagcaatgaactctttgtggatcagcgttggtccttagcctgcatcgggcagcactgatttagacagctacggacctctgttatcctctctaggctgaatctcggggtgctcagtgtttgaatgccttggctgggatgactgtgggaaaattacaggttgtcatgttgctccagacatcagagcaagaacttagggtttttgtttttttttgttgttgttgttgtttgttttgtttttgttttgcctctattttcaaacagacttctatatccatcaggagatttatattggacttgaggacatacatttcttgatggtgattgttcatctctccactgtgggaaaggcattgagcttaatggtgatatatcagctggaagaggattgggatggggggtggtggcgaagaaaggtctgtgtttggagttttactccaggctctcaattggatgtgcccattggatggtgggtgattcatctaggcccaaagataagtgtcttgaattgagtgactctagggttaatgcttggaaatttgtaacttttatgtttaagagtgacttgaatatatatctatatctacctacctatcatctatctatctatctatctatctatctatctatctatctatctatctatctatcatctatctatctatctatctatctatcatctatctatctatctatctatctatctatcatctatctatctatctatctatctatctatctatctatctatctatccatctatctatctgtctccattagggagccatttaaatttgttccctgaggtttagggatctgaaatgcccgcttgctgattgtatgcaactctgagaacttgctgtgtgtggaaaccgaaatctacagacattccaggatgctcaactctcttcttccccttgctcttattcagaagctacttaagcatcttcttccttctcccgaatcccactgactgtcttcagctctgagcctggttgactggcagatgactcattcaaactgtggctttcaattccgtgacttccatatttccagggacctttccccctgcctctactcagctactcattgcaatgacggtgcctggattttctcaaacctccaaagcctccccattcatgtattccacgctctggccacagcctcttctcagtggttcagatcctgcctcagaaccacgtcgtgacctcagggttaaaggacttctgtgtgagctcagccacactgtcccattggatcagtttgcttctgtctttgcttgcctttgtattcagtttatatactctcaacctttcctctgttgtccttttatattcatggacacaatgaacctgccttttatatgttcatacaagggccatgacaagaatctcaagaaagccgatacaatacagtctaccagactactttaacccacaatgcctacttctacctccctgacttagggttttattgctgtgggaaaacactgtgacttgaggagcaaaggccatgctacagcactcaggtaacagagagggaagccagggcaaggactcaaggcaagaacctggaggcaggagctgaagcagaagtgatggaggcatgctgcttactggcatgaacctctcagatgactttagcttgagtcaagttagaacactctccggcacacagacacaccattgtccatctaccctatttctctgacatttcttgctttccacgtctctacaagtcccacttccaacttttaatctctcctcaaacttccttgcgtgatctcctccctaatctctgtttgagggggatagaatgaatgtgacagaaaacactccaacttctgccaacagttcttcgaaccaacccacttctgtcctcatctcccctatcttctggttgttgctcagtgaagaccccctgtttctaaggcaatccttccttctccctgcaacccatctactcctactttccaggcattctgacgtcatcaggttctccatctccctcatgacctttcattgacacttgtgacctggccccacagcagctgtcactacttgtcatcctctccctcccatgtcatgtccacccatctctttcatccctctgatcatgctgaattgtctctgtcttaagtgacacctttatcacagaaggtccagtgtaaacatgtacatcacactcatcaacctgcctcatctccacccagttgcccatgctagaactctgtggcttaccttgtctatcgtccacttttacccaaacattgctgaatacgtgaagcctggcaatccctattaacatcttagtcttcgactacaaaaccttcttactgaggctgggaaatgaatgacccaggatggtctcatatagaagagaactattttcttttctctacttaacagcctttgttggcttttctttctcagtgaagttgaacatttttagaaacggcctgccatccctgatggattagcccaagatcattacaaatctccctcaaatgcttaattgcttgtggcttgtcttttagttatcgaaaccgacagtgtccctttctgattgagggtctcagcggcattcaggtggagaagccagagggtccaactaggttgggaatcaatacaaatttgtcacttcagagagaacgcattccgtcttctctttgtgctaaggagtcttgatgcttgtttctctgctgaacatcctcatttggccaattattcctcatccttaatctagctaaatgtcaccttctcacaggagcctcttccagtcccccatcactatgcattatcttactagacatggtggtgcaaacctgtactttagggatttgggaagtgggagcaaacaggtcaaggtcagcttgggctctgtagtgagatcccgtctcagtggccaaaaccaaataaataggaatcaccacaattatctggacatcgtggttgaagtaggaggagtacttgagcctagcagtttaaatgcaacaatgagtctgtctcaaatgcatgtgtgtatatgtgtgcatgtacacatatctatgaaaaaaataattgtaatcaactcagccttgtaaccattgttgagtgcttgaggacaggtgctagccccgccttatttgcagcttttacccaatcaccaacagagttcctacagcaccataagttctaaaagaataaaaaaattgacttgaaggaaatgttaggacacgactagcttgcttctcttctggattgggttccatgagtggtagctatgaaggtagagactattatgagagatgattagcttagccgttaatgctgagtgccagtcagagttactaattctgccttgctggaggggattaggtagggtagtactggggaagtgacatctttccgtcttaagtaacccagggaaattgtaaccaggcacgagattctgggaggtgaactgaacaagctgtgaactctgtcatggtgtgactttatgaccttgcaataatctcctagagtggaaagggaaaaccatagttgtgggcagagttctagagttctgtgggctatcatcggggatggagcagggacaaagcccagaactgtaaacaaattaaactcatggctagactaacctgcttttaattgcctggtggcttttgttgctcttagaaacagctaggcacatatgttaagcagtttcctggatttatgaacctctcaagctgtaatacacacaccactctttcccttcatcaagccaataccagctctgggattgatttcaggaagctgaaaagcagagacttaaaaattcagtttcttttttcccattccaggtgcaaggatgagcctgttttgctttctgcccatgaatggtgggtagggaggcagagggctaattttttggcacaaatgtaagatgcacccagctgtattctttcaggatgtcaacagccatctttctatctgattccccacaaccattttcccaaatgtataaaggagatttatatatgtaaagggtttctctgcatttacctggctgtcctggaactaaccctgtagaccaagccggcctcaaattcaattagatctgcctgcctctgactactgaatgctgagattaaaagcatgggccaccactgccatgctgatacttttgtttttattattatttcattttattaagtacttgctctgtgccaggagctatacatcctcccctacatttatttcttaaaataccaccttaaaaaacaatgatttttttctgtgttaggagaacactgcagtaggtggcatctcagtgccacgccactggtgggtaagtgacagctgtgggctcagagctgcgcccacctgctcacccccccagaccccctcaacctgccctgtcccctccattaacccccccaaccttcattcctatcttccccagctgtgggccaaggaagcttctggaaatttaagcccacccatgtgtttgcccagcactgctgggagagaggagctacgaatgatacacagatgactggaagctctctggaagacggccagggcaagtgcaagaatgggtacgggaggaggacggagtgggaagggaggggcttggctgtgggaaatgctcagatgtgccagtccagactgaggctccgaggagaacccccgaggtcagctccttcagtggtcgtgagacttggtgctgcagagggtcacagctcatactttcccccagggacttaacaaactatgttgtctgtttaacaacttttgaagaattaatgccattttctaactgctaatcaatgatatgacagaggactagtaagtggacttttgatgagcatgaagcaagcagttccttctctattcaggctggaactcctgccccagaggaagggatacttccgaatgttcctgtgcaggctgatggagaagctgctggtgttgtcaagtttgggaacttgcctagtcactccattttagccctgacatacctctatccatggccccaggataaaaaaaaaatcattaatttagacctacttctgtgttttagtattgcggaattctagttccagactgggctaagtaagtctccagagtcaccacatgtgttgtcaccaagaaaagaacaatgaataatgaaacctatatatatgcccaggggacccattttgcccttagagagtggagtcaactggttcattcctgaggaggttctgtggctcacagagggaaggcaaggatcttcctctcattttaaaatctagttttatgttttcatgactcagttttcatttatacgttccctaaatattaccacaattaaatgcaaaagtatgtttgaaggagaaacatggtgcagaatggacggcttctgccatcgagccagtgcctgcctatgtcctccttctcatctggcactggcaccttcctcctagaatgggagggggggctgtttgcttttcatttttacctaatttctgccaagatctatgtaaagcaatcactttgttatctagattccaggaagttctctcactgctgctcaccctccacatcttagtagccaggaccacagatgaatgcaaattctcactatctcctgtcaccctagacctggtacaactggggagatgagatagctggtcttagagcggaaagtcttaactctctttccaaaccctcactcaaacctcaattgtaacacacctcttcaaaacacctccatattttcacacacgtgatgccttcatgccagacttcatgtgtccgtgagagcttgacctgtagtcagaagacactgcaggcagcttagcttgccctgcaggaacttatcttcttacagctctggaggctgagacattcaaggtgccagcaaggcagtttgcatcctgagacctctgctcttgcttcaatggaggtcctatctcattgagtgcttgtaaaatcttttctttgagtattcctaaaagatgatagggaaatagaacaaactcttcagggtctctcctagtgctaagtccaccatgaaggttctattcttgttgtcccatctaaccttggtcatctcccaaagaccctatcttcaaatgtcattgctttgggagtcagtatgaatttggttggggttgggagaagtgggacacaaacattcaatacctagcatgcaggccaagatttttcaaatttccaaaggagaaatggaggctaagtctacaagagggggacgtaaatgacaatgtctgtgttgatggcccagcctttcggactgttctcagccagctcttccttccatccacttgccaagaacacagagcttaaagggcagagaaatgttaaaatagtgtcatggtttgtatatgcttgacccagggagtggtactattaggaggtgtggccttgttggagtaggtgtgtcattgtgggtgtgggctttaagaccctcatcctcgatgcctggaagtcagtactctgctagcagccttcagatgaagatgtagaactctctactcctcttgtaccatggctgcctggatgctgccatgttcctgccttgatgataatggactgaacctctgaacctgtaagccagcctcaattaaatgctgtcctttataagagttgccttggtcatggtgtctgttcacagcagtaaagccttaactaagacaaacaggtacacagattcttttgatttcttccttcaaaaggtgaagcccaactgctcctcacttgtacgtggtctgtactttaccccttctaacaggtagaatgtggtaggaccagtggttgtgagagttcctggaataggccagaaatcatgctgtacctaccttcctcttacttctctcccagatcagtgactcatggcaagctgtatatatcctgtgctgtggacactcatgcagacatcttcaaagagctgtgtgatgagctatattaggcatgtgaacagttctcctgctcttgaagaaccagatagtcaaagagtaattagaagagaaataaaaatattttgagacaaataggaatggagacacataatactaaagtgtatattattatttttgttacagggttcagaggctggcctcgaactcctggattcagtgaccttccttcttcagcctcttgagcatatgggagtgagtgtatagtattttatgattgtttctgaggcagggtctggcagtgtagcccaggcagtcttcatattcttaatttctgtgtttcagcttttcaatcctagcattataggtgcacactaccagctggaaaaatatctgtaactcttaaggaggcagaacaatacaggaaaaagagaaattttcagtaatttaggtttgaaaatgatatataagggtttgatataatcattaagatcatgaactctgccattagtagttggttgacctaaggtagatgttttaactgaatctcatcttcatgtgtaagaaattgagatgttggctagatgtgatggcacacacctttaatcccagcatttgggaggcagaggcaggtggctctttgtgagttcaaggccacctagtcttcatagtgagttacaagctagttagggatatacagtaaaactctgtctcaaaaaattttgaaatatcaatttaatagtgcctcataatgttacatgatcataagttagtatatatgtagtgcatagtaaagtagtcagcaaatggctttaattagtgttcacattattattaatgtaaatattaggtataaaagtccagagatagatacacacagagtttaaccagcaaacagagagcctaggtatttttgaagattaatttatgatcaacacatggttgagaattaataaagtaatttaaaaattgaatttctgacacaatttgcagaatgttgaattactgaactgtatagtgcagcaaactgaatagtgaaaaagctcacacttctgaatctacaggaaatagcaagcctaaaagcaatatagtgtgcttcatagagcaataagtgtggtgctgacacacccagaagatgttccagtcaaattgtagctactgttgagatcagttatgcggcctttctagacctgcttctatcatttccaatgcccagtctcttgagtgagagaccatttctgactagttatcatgtgctggctgccactgagcccgagctgttgggatttttctagatcagggcttagagcttctctggatcaggctgagagcttagtcaccagccggcgcctcctcctccttcttcctcctcttcttgttctttttcttcttgttcttcttcatttcttcatcatggatgtgtgcatgcactctttgtatgtgtatgggtgcatacatgggtggttacacatgtccacatgcaagcctgacattgacgtgcggaatcaccctcaattcctcttccatcttctcactgaggtagactcgaatccagagctctccaaaatggccaagggcagttaaccaaaatgtctgaattatataaggaagaacctctgggctagagagttcaggatagagggcagggtatgccagccataaaccttaacaggtagggactgagggatgctgggagaacctggaggccggttctgctttgatatgttaaatagacacctcagctgcttagccagggtttggaacttaatagatagccactttgctcttggaatcccctgtctgtgccttctcaggccaccatgcacactagcatttgcttggatttcaaggatatgaactcctgtctcactggtgcccgcaagcactcaaactactgagccatcccactctctgcccccgccccccccccccccccccagcttccattcttaaccctaacctttcatctcacagtttcagctttggtgcttcccacttccttccgatggttactttaactgaagtgagtcaggtcttactgaaaaaatgaccacagcttgtcagctcccacccaccctgtcccgggctgcctggccagcacgtgtgtgtgtgtgtgtgtgtgtgtgtgtgtgtgtgtgtgtatgtggtgttagggttactcagctcattatttccccttatcctcaaagtcacgagacatttagtagggcttccccagccactccccctaccccaggcagaagtcagtctaatatctatctggtggctcagggagggggcaggaagagtggttgcatcctttgggagctgagtaggtttgtttacctctatccaaccctaatggctcaactctgctgcctgtgacctcagtttgaagaagagtcccagtacttgggcagcggaggcaggaagagctgagttcaaggccatactgaactgccttgaggccttatctcaaagtgtcaagaggctggagacctagttgagcagcagatgtttgcttagcatgtgaaagggtttggcaggcttggcaggagtttttaattgtgattgccagtagtatccagacgatttcccagttctagaaactagtgatgaatttgtgttaatccccagagagcgcccccaagacagatctaagttcaccccaggacctctggagcttgaagcaaccactgacacattaggcatctcttgcctagtgttggttgtgtgttggttggattccaaggatatgaactcctgtctcactggtgccggcacacactctaactgctgagccatctccccaccctcctgcccctagcttccatttttaaccccaacatttcgtctcagagtttcagctttgatgcttcccacttccttccgatggttacttagaatcaccttccctagctttggaaggtagaatgccttttaaggtttcaggacacattttaaaggactgagcttgaagatatcagtagtttatgctgatgctttgaaagccaggcaagactttcctctgatctgatccgagctcaaccccttcctggagaggttgctggcattctttttgtggagtctaagattcactgcttctgccctctggaattttaagggatttttcttttaaatcagacagaactcaatagacaccacactgtaattcgaataagatccatttattcaaaattagagtctgctacaaaggcagacaaacaatacaccattcccagaggaattgcattacttctagttaaaaatgagttctattagaactaattttaggtggttataaataacaaactggccacagttttcagggatgaagcggctgggggatgacagtaggggaaccctctgagctgctgcaggaatgatcatcaaaggatctccctggtttctcttcccaagacccatgagtttcttcacaactctcttaggagctctgaactcagggatgagagcaattgaaaggacaccatagcaaagggccctgcagctctcaagtgtggccagccttagaatagaagcttcaattgcttcccaaggaagaacccctcccatcatataatataatctccctttaaatactataaagtgtccccaatggaaacagcttaaacacaggttaaaaataataaatactgtaaaattataatattgggcttctttctaaatagttcacagagaagctcagtgaataaatagaatgggaactgaggtatcagaggtaataaatatttcggagagaggtacaaacgaggttttccaaggagttgtttccgttagctaagatccctggatcagatttagagagctctgtctaggtcctggagtccagcagactcaatacacactgcaggtgttttagcttttcattttgatcatcatgtatgcttctatgcagttgatgaagatgtcaaattcattcatggccttgtagacaccttggtcttggagctgtgtggggagagaagcatctggttagtacccattggtgggctgaggggctccctgccctgggaaggatgctgagcatagaaagatctctgctttcttgtgttgggagctgaaggacccaaagatttgtccgtctgctttgggaaggggccgtgccttcccctgtttctcctataccttctcccagcttttttttgtttgtttgtttttttttttttcattttaaacaagaagtttatttaaacaacaagacgcttgacttgaagggaaaactatctaggatcattttattcaagagtaatttatccctacttaaagacagattgccctacatgtaacagccacgtacaaaaaagttataaaattgtcctcggttttacaatgataaatgaaaaacattaaaattctccaatcgaacaaggtatgcaaagatttggtgttgttgggttcttttgttaaaacaatgagagcaaaataacttactggaatataaagataagagctgaaagagcatgccactaatggagaagggggtattttcacaaacccagtactttcccccagaccatctccatctgatgccaaccagaacagaacatcggccatttagtttaaaaaaggaaaagaaagagagagcactatgtgtgtgcacatacaccagttactttatgtacaataaagaaatggggacagggaaatgaaagaagagagacaactatactgtagtagtcaggatgtggtgggaccaaccttctcccagctttaagcactgccaggagtcagcaagggaagcattcagtccccaaagcactgtcttcagggtggcaccttttcaactaattttttttaagaggccagtgctcatataatgcttatgcagaatgttatgcaaagatgccagagggagcagtttgtaagcagggcagtgatagagatagcagggaaatggttggtgtttttttttttttttttttatgttttgagtgtgtaggcagtcctcaccctgcagctctgacctgctgtcatggaattcatgcccactaatgttagagccctgccaggtgtctctgcctagcccacaaagatgatgatgtaggccacatggcttctgggaactagggttgaataggttcacaggcagttggaagtgtgaaacctcattttgtttgccaggtggaaagtgccccgggacaagtaagaattctgctttctgctcgttctgatttgggggaggggcatccaggctgagccccaatgatgtacctgagtaaattaattcatgtctgctttctgtacttgtgggttcagcctgtttcccaacaaggtactttctgtactttctgtttcctatgtcactctcctcaacacctagtgccctgtgctcataggctgtctggtcagtctaagccaaaagcctgcaaaagtggagcagtcatttagaaactgccagagacgctttgcagaaaacaaatgtaactgaggtggtggctttctaactggcagaggaggtcacaccatttgctgggttcccacactccaggtgcagaatagctcccgccctccttctgcgctttggtgagtagacagaggtcttgttacactcgccccctttgccacttaccttattaaaatcactcttcacctgctccactgccttgctcttattttcacaggggagaaatcgatgctgaagaagaaaaaagagagcattggtaattcttgcttgaattctgcatccatggtacttgggggaaactatcttgttgtgtgaggaaggagacacccttgctcatcttcaatgcccacttcttagctcccagggagaactgagccgtgattggtccttatctatttcggtagggactgagggggacagcagaggacagcctagaaagatgcaatgtatgtctttgcaatcactaagatggcttgctaagtgtgggtgtgaactcaggtctcgggttttgtctctcagagctccaaggcacctgttctgtttttagtgtctcttcttgtctatctccaatctcaaccaccatgaactatttctaggtgtctgagagaggagcgaaagtctcagctactggggccaaatcgtcaggccagaaccgttgcacaagtagactccagctgatgtcccagtatcagtgagagaagtaagaaaaacaagagcagccaaggcatcgcttcagagacatagatgccccgactgtattattcatagatactggcttagggatagcagtcttctggcccttctgaaacaccagcgtcctgtcagcccagctctgtgccactgaatttgcttcccaaaagatgagataaagagatgaatgttttcctgtgcttgggagcctcagctggcagcccagaggtgagggagccatgactgaagccccagccttcccatggagagagaggggagtagctaataacccacaatgactcacaaataacaggaaggctatgcgcaaatcttcacgtgtgagtgcctcaaagtcactcccacactcgctcagagacagatgagcaagagacccgacaccggacaggcgtctctctagatttacctagtctcctgtctagtctgtgtgtgtctctggatgcatgtggcctgactgggctgtaggagacagtatttgttgggtggctctaaggggattgggggtggggaagaacgcatctgctactcacacagcgcctcagccgcatcctgagggtcttcagcttctcacccagggaattcaaatgctccttgatttctgggccatgcttctctgcctggggcatcacttctaccaggtaaaactggatcatttccgataaggcttggcaacccaagtaaccctagaggcagggatcagaggttgggtgtgacttactggaatggtgatctgttgctgctaaccttgatggactgtcctgttcctagggaccccccccccatccccgccccttctagttacattttctccctttaccacagaatgagctcttcacaacccttgactgctggcgatatgctgagtcaaggtcttctcacttctctttttgaaagtcaaggcatcagacccagctctgctgtcacaagcagcacctcccgtcccgtccctaatcgcttggtcgctccccagcacccaccggactcttaccttaaagtcctgcattaaggagtcggttagcagtatgttgtccagctggtcctttgtttgctggaagaacataaagaacgtgaatgcaaggactggggaaaatacccaatgtgcatgtcatttgaatacttttccatttgtagagttttgaatttgtaatcaattcaaatgccctggcaactgtggaaaggagagttttaagaacaggatttgacagtgctagagcccggagttaaatcaaagtccttcctcttgggatccagttgtttttaaaaacttctgactgaatttaactgactgggagaagttagacccaggcccggtcttctttcagatgagtcagatcaggtttcaagagcacctgtgtcaacccttcctttctggagtcccttatagaaagcctgttttgcatagctctctgccttctttggacctccataccagttccaggagctctgaaaggggaatacttttgtaatgcaagctctctatgctggtgctgcttcaaacccccaaacctctgtcccccagatctagagactacgcagagaccacagacttttgtcctagccagcaaaacatggagccttattggaaacttaacagaaagttcttgagcatgggagagacaatgcattcacctcctagttagcttttcggatgtgcctgggtttagtttaactcatggctttccctaggactctctagatttaagtttaagggtaataggtgctggaaataggggaggagcagcatgaggtaagagctggaggaggaagagggagaggaggaagaagagaaggaggaggaagagaaggaggagaaagcagaggaggagaaagagaaggaggagaaggaggaggagaaggagagctatttttgcagttccatcagaatgcatatttcaggtgatggcaggaagaaaggctaggcgagctcatacttacaaagaaagtcttcacctggctgaaggcagtccgcagctctaggagcatgtggctctggccgactgggaagtgggtgcagttattgtcttcccggctgtactggcccctgctgatcctcatgccagtcagtaagagcaggcagcatagcagtgctgagccaggcatgatggagctctcttttctgcaaggctgccttgtggctttggtagtgcaagagcaagtctctaaatgtagacctcctgttcttggtcccccttttatactgaaggctcagtggggccttcctggcaaaggtttttgttattcaggctcctcctccctcttctaaaccatgcaatttttgagtttaatttctttctttttttttttcctttcccttttttttgcattgtaagcgctaaagaactggtcggaatgaacttctgcattacagctatttttagtatgggctacctctcttttaatttttttttctttttagcttctcaatactaaaagttgtatttcctgaggcagacagctgttctatgtacagaggccctcatctgtggattccattcacgcactcccaggtcataatgacgtggataaatgggctattccagaacatattaggattgagaaataattgtttcctccactcaacctgggttgaacgtccgatatttcttgctgactcggaagtcaccttagcactcagttacccaaaggaaaccccgagagggctgattttcttcagacctcactctctttaattcttccatcacgtattcaagactatcctttgaggatatgtgtgctgtggggcagttggtcagaggagagttctggtgcctcctctgccccgtgtttcacgaagaagctcagatcccagcatgagaagttaggagaaggaactcagacttctgggaggcttgctctgtgctgtcgggtagaccttaccatggccctgttttacaatgtcccagccttggagacgtgtaacctgtagctgttgaaggatggagatgttagtacttctacagatacctgggagatctctggtagtcctttgattatgtctggaccttcccttcagtagggacttctcctactacctcagtttgggtgggaagaacattcgcctagagtcccctattgcctttcattctgtaccctgggcaagcaactacttgtcctcctggtacctgttttctgtgtgacccaaggggggggggcaatgctacacgtcctgttgaccagggaatgtttgcttaaataaaagtagacccatgtagagggtacactcccgggctgtccttcctgcatcagtacgggggaggatcttcgttggcacagggttccaagcctgccccattggagagggttaccacaccagggctggtagaacaggaactcggggttatctcgtcttatctgatgcagtggctggcagatcaggatcaagggggtctggcctctcctcctgacactcttcgacgggaaaagaatcttctagaagttggaatggaattgactcaagaactgctgctccggtcagttccaggctgagttttctaccagcagcaagcacagggaaggggacaagctgcctccatccctttcactttctccttcccttttgatttctgttttttgtttttttttgggatgtccgtttccaacagcagaagcaactgcctctctgagctgatgttttaggtgtggacacactgctgtagatcagagatctgaaccccagaagaggctcaagacccagctagcatggaccctcactgccctctctcctgactgtgacctgtacttactgcacggtgatagccacaatcccctttgctgccttcctgcatgtttttttttttatttctgagcagctacaaggtccctgaacatattgtgtttagctttgtgtgtctgacccccccccccccagaactgaatctggcctatagaaggtaccagctgtccttgggactggcactggacagttctatgagcttgatccagaggtaggagatgaaacaccaggagaagcagaggggtgagcacagaactcagcaggagaagcagcacctcttatatcttcccgtaattatttttttttgtctagaatatccttttacacatgtacataaaactatttcataatatgttaacataaaacattaatatattagcatgtacttaattatagcacataatttatatcaatataatgatacatcatatttatattaatattttaatagtgtctgagcatatactaatataaatataattagtttcatgaatatactatgtcatgtattactgtattaatgttataaatgtatatactccacactcccacaatgacagaaagaagagagatatgtgaaaactatttatatttcttgttaatatatattcaactaagtgggtttatgattatgatctgaattttttatttgttctgaaacgcatagccagttatcctcagccatttgtcagctagttgcccttttctttcccccattggcttcaagttgttgctcactctctcctcaacatttcagactctaaatggccctcaagaaccttatgtgaggtccttgatacaagtccatatttagccaagtaaggaccatgcagagagctcaagtctgtgagaagtgtttggcgcacactgggaaaagccccaaagccacagctatatcttgacataaatgtcaagagtctcatggcaggagatttgagctgggtttcaggacaagggaagtgcccatgacagggaagtgagagcgtatgtctggggaaaagatgggcaacagcctgggtgctgtcggagctgcggattcaagaggacatgactgttacacatcagtctgtgcattccttggggacaaatggcctgagtcagtccagaagtcgtgtttaaatacattttccctaggatcagggaggtatgtatcagatggaggtcgtgggcagggggagggggatctggagggcaatgtctcctctattactcacgtttcaaaatatttcctatttctagtcagctgccaatgaaaggaagttttattaagcatggctttaaaaagcagtatttgactctagctgcatatgtatcaaaagatggcctagtcggccatcactggaaagagaggcccattggacatgcaaactttatatgccccagtacaggggaacgccagggccaaaaagggggagtgggtgggtaggggagtgggggtgggtgggtatgggggacttttggtatagcattggaaatgtaaatgagctaaatacctaataaaaatggaaaaaaaataaatatatactgtcaaatcacacacacacacaaaaaaggcagtatttgttgttagttcattcggaagaagttccccctgtagctgaggataaccttgaacttactctcttcctgtcttagcctctggagtacctaggaccacaggtgaacttcacacccagcttgaggggtcagcagtccatggctgttattgcactcacacgttatcaagccctacattatctctctcttcttctccaatcttcattgcaagatgtccaagttgagtggcacgttggaataggacaccctaatgcttggtaaacttcaccattttagctgcagaagactctgggtagaaaagtatgtgtgtctacatatgtctgtgtctctctctgtgtgtgtgtgtgcttctgtgcatatgagtaaattttagagttttatagacagtgtacaagatcttatgaggaatctactcacgcccaacaaaatgacatctttcttgatgtacttgctccatgactttctgccattctaggggacagtctgggagctctgagtggcacaccggagctgccagggaaaggcaaagggatcagccagattgtctggcaatagagtcatcacggcaagagtgtggtatggatagagaaggtggggttgttagtagttattttgggagactgaagagatggctcacccctgaagagtgttgtgctccttctgcggactagagtttcgtttccaggtcccaaccacaactccatacaactccagccccaggggatctgataggcttttctggtctatatgggtatctatttgtacatggtaattagcattcatgcacatataacatacacacacacactcgcgagcacgcacacacacacacacacagttgaatcaatagtaaaataaaacttaaacatctctttaaaaagctgataatgggagtttcatttcttcttatctagcacggaaaattagttccactttaattttaagtgaaactattttaaagatttgtaaatttctaatgtttcctgaataacctgctttagtgacctgggcagaggcttccttggtggcttctctgtatccaaccccacttgcaccacttatacacagtgtgactggggtcataggtttagaaggaacccaagttaaggctagcctaggggcaaatcaagccaggattatgcaaaccggattgaatgtcctgagaatcgtggccaagcagatgttgcaaagcacaacggaagggctgatcgctggacagccaatgtggaattcccctttgtgtaactgtggtgccacataaagcaatttgacttttactcaaggaccaacaccttactctaacttctcacatgagaagtttgttttgtcagaggcaataggtgatatttcgggctactcagagataaccgttttgactgtatccatgactaccccagataaccataggtacctgagcctggacaccagtggcatctctgagctgcagaacttgtccctggatggaatttagtctatgtatagcttctctttatggttgtcacttcaaagcttacagacaggcctcagggaagatggccttttggatttgtgactttagcagtcacacgggggaccatgacttagaagactgggttctcactgtcttggaatttttagtgactgttcagcagtgaatcctgtttcttctttttgcatggaacctgcagtttatgtgtagtggttctcaaccttcctaatgcagcagccctttaatacagttcctcatgttgtagcgacactccccccaattattttcattgccaagttataactgtgattttgctgcttttatgaagtgtaatataagtctctgtgttttccgatggtcttaggagactcctgtgagtgggtagtttgacctccaggttgagaagtgctgatgaggtatcttaactgaagtgttctttctgtgatgccatctttgtctggcacaataaacagagccactgaccacctcaagggtcatttctgggctcccctctgcccatctacgttcagttgatcactacatcctctggggttttctccgtaaacatttctctcatctgttcacatctcttgacctctagtttagagtgaacatttacagacaccagcaagactgttaatttcctcatcaaacccctcaagtaactcccaagttttcttctttaggtaaaacaatcctggcctgaagttcacagtgtaaagtccattggcacggcctttgtctctcagagctcgtatatattttttaaagatttattttttttaattatgtgtatatgtgtgtgagaatatgcacacatggatacaagtgcccatggagtccagaggagggtgctggatcctttagaactagagctacaagtggcggtgaccctcctgatgggggtgcatagtgccaaacttgggtcttttgctaaagcgttatttgttcttaaccactgagccatccagccccaggactcactttaataccgtgtagaaacttttttttttttttttttttttttaccattttacctctccatccttttgcttcagtttttttgtttccctctataaccccgtctctttagtttttgtttaatttttttcctttcaaatgatccattttttcctaccacaggcctttgcatatttagctcttctccccccttctctttctgagttctttcagcttagacaccacttctttatatgatttttcttttctttctcagtccaggactggtaggttcccctgggtgtatgttacttttgctgtatgtgactcaagtcagtcgttgtacacatgataagattacgtgctctctaccttgttactgtaagcaccacaggccagggctcctgttggatcatcattatttgcccatcgtatcgctctggatctatggaaagcttatagtggtggacaacagaacagttgcatatacaaacctatagcaattgtaatagcacacccaagacctgcgcaaactcaaggcagacaaaaccccaacatgaagatgggggtgatggtggggtgaaccccacccctagttaaggagttcttggcaatcgatagttgctgaatgagtgatagttttctttaaagttacaatgcttggtacatcatccagtctctatgacatatccgtacccaagaatatttgggtagcacaaattggactcaacgggtttataaaaagagaaagagcatgaagttgaatggatacagaggtagcggtgggtctgggaggagttggagagatgaatatgactatgtatattacaggaaacttcttaaagaattagtataagattttaaaacaatatttggtagttgatgatttcttgaaaatgttctcaggttaccctcaaactctcgagctgctagaattatgggtgtatctctctacatctggcattacttcctaaaggttcatagctccaagaggctctgtatcttgttattctgtctcatataaagtagaggatggattcattgggagaaacagctatcacaaatgacatgcttaatcccataataaccttccagttaaaaaaaaaatatctgtttactaatcagccccttgcaggcaggtgttaactgcatcttccctgattttgggaatgaaaacaatgccttgtatggaagaggtgaggagagaaggaggcttcggcattatctaatccatacttaaaggtatggagaaggaaatggctcctccagccgctacataggttaacttcaaaggtagggtctaagcccagtactactttgtgtactagcagcaagttgctttttaggcattaagacatcaaattcttgaggcccaccaacacaatgggggcattattctgggatttgtgcagtgcgtgggttttgtggtaatgaggagaaactaaaagtctgaaattacgttttcttctatcaaacagtatgactattctgcacttgccgcacccagccttgtgtttacgaaccggcgttgaggtgagggctgctgagttaattttgtctcagggaaatgtccaggccttgaccgcagagcgttaaatctgtggtgaggtctctctcactatagcaatcaatacagcatctcttccagaaactcttaagtcatcagacagtctacttggtttttgaccttgactctgaacacattctcagtgtgtgctctctgtgcacatctctatgacaaggatccaggtgctcaggctacttctactgtggctgtgttgttcacagtctttgcctcacaccctggaaaagggaaggggctgtatgtggccatgttggaaagtgtgtggcctttaagtcagccatctttaaaccctttgaaatcaagatccttttgcactcttaaaaaatgtcacatggagcttttatttatatgagttatatcaattgatatcactacgttagaaacaaaaccacatcaagtgtctccatataacactgtaaaggcataggcaacagtgatactaacatgcataaatcctttaaaatctttacaatgacctggtctgatagaagaaggtaggttttgggggtggggtgctgtaatacagtccagtgcataaaggtgcttgctgccaaactcaatgatctgagtttgatccccagaacatacaggaacagaaggagagaactggctcctaaaagttgttctctgacctttaattatgtgctgtggaacatatgtgtgttagcgacacacacatacaaagttaaaaaaaatccttatacatattctgaaatttagacttctgtgatttattgttttggctggagcctttgaagaaaacccaaatgcaactaaataatgggagtgggggtgggggtttcttagattatcaggataccctttgagaatggataatatcagagtgatccagagagaggagggatggtcaaatgaggtaggggaggaaggggcagggtgtgtacccacagggctgtgccttgtattctgaggtccttatctgccctaagtagacaccttgaggacaggaccctcaagtgggaggctggttataaactgttttcacactaacagttattggtctctggaagaaggctgcatgtcttgtgtcccacctcatttatgtcagacagctaaggatggacccgctatcatccttctgcttcccgccaccagttctgtgtccccgggatcagctctgttgttggaagccatagataccttcctcgaggcttgtctttgtagcatggtgtggcagttatgcgggcaagtcctggagtcagacttggcctgccttttagcatctgtgtggtattgggaagattaccaagctggtctgtgtttccgttctctatacacaattggataagaggacgggaactgccctattgggcaaagaccaaatgaaactatgatcctgtgtaaatgattcagtgagcatctgccctgtacaagctggcacaccctagggatggtgttgatgtttcttctttacaatgctcagagaccgcagctggatgaatctgctcatagacctaaggtctttggaacagcagaacaagttttgatctcagttttctgaaggcattatagggggacagagaagataatcctgtgatgggaggagtttggctcatgcactgggaaccccacttcctgccctagttcctggatcaggagcttcaagacaagttatcccagaatcttctttcttcttctgagagctgaagagttgtcagagccatttttttttcccaagctacttttcagttctagaatttttttttgtcactgcacctccgctcgatctactccctgtggcagaaattagttggcactccgatgtattagttccggtgtgttttttccataccaaaaccccaggtacaagaccaggcaggccccttcagtctctactagtctgtgctcctgcccagctctggaagtgccattctgtaagagaaacaaacctttttcctgggggcagcttttgcgtgttcacctgtgtttccttctcgccgtcctggcccccggtgctttgaggttgcagtttcgttgtgagtcaggcctgctgagagcatcggaaaccagagaggccttcattgagtggcaggacatgatgctggcttttcctcaagagcatgaccagggtggcgacccaggtgtgggagggaggtggtgggtttctcggattgactgtgtcagggagaaattactggaaaaccctcgagagcaccacatctattcggaagagctggcactttcttaagaaagaaaataatctatacacggtaggacttggtggagccttcctgtgatctttgcactcaggaatttgaggcaggaggatttctagataaggcctatctggactacagaatgaggacctgtcttaactaaaagcctccaaacagaaaaaaacgagcagccaaccaaacaaagtcagaaacggcccacactatggtagaacacacacccttggcagtttaatacctgctgagaggcaggtctggtgtagatcaaggccttttggtgtgactggttcctgacagaggactcaaatgacagattttcttagcaaaggtgatttggggatcataccggattctcctgacagagcacagtgaggctaatctgagtgctggctcagtgttggtgaggttgccagaagctgtaggcttagcggaattaaggtcccccaacccttccattgtatctgacccagaaaagaaaacagaacaatactgaggggccagcactgtttgaccatgtgactgactctcccaccatgcattcccccatgccagccttttcatgggtctatgaaagaaacaccaaggagcaggtgggctggaagtccacaaactagaaacgtgtagatgacacaaaggaagatgctcaccacctgcaatgtagaaacacattgttttatagacttgagcagcaacctttctggtccttccttattcttgctgtgaggcactatttctaaagtgattagtagcttctagagagccagggtcaaatgcagatccgggaaagaagcgtcaaaaagaaccaacagtggattcggagtttggaaacggcagcggcttcagagtgctcagggccggatgggaagctgggatggtgtgcagatcctctgggatacccctggttacacagagtggaagatagagggggttcattgaagggctgagagccccttagagagggggaaggtgtgggaggcttcccaagtgagttatcaggggggaagaattataggaagtgacaatattgtttattcaaatgccacctaagaccatcaggaaaagaatgtctcctatgcaaaccctatagaacccagatcctgagactgtaactggggctgggctgtaatccatgtgcactgcaaactaagccaaatcagcttttataaagagtttttaggacgatgctgttctaggtcctaaaagagtaactttcaaacatttgtgtaagagccccaaatgactctccctgtagcatataagagtgtgtctcgccagaagggtctccatgtgttaaactgtgcgttaatgggggccttgggatggggagttggaagagtaaagatgatatctttagaagggtgtcatggacaagctgacctccttgcatctcttctcttggaatcaagaaccccagtgtacttccaaggaaaccttattatatctgcaaggtgagaaaataaacccttcctttggcactctgtggctagctgcgatggcctatatggcctcttctctgcccattggaactacatattgatcatcagaacagctatgttggctggtaccgtctcagttgtggttcccattttcagtctcctgaaatggctctgaacgctcaaaggctggggaagagctaagattctgacagttgagtcctgcctgtggaggcagatgctgatggagactaactaggtaggatctttggtagaggaacatgacagacagtgggacttctgatcttcataacaatggctgaaatttctgtttcatttcaggtcaagtcagaaaactttagagaaagcttggtaaggggttggggatgggtggggaaagaggtcggtgcctctcagatcagacagagccagaatttgctctcattgccgcagtggtgggaaaatggagtttcagggtagagggctagggcaaccgtgatctgagtcagagaaagggtgtgagggatgctgggaacttcacactgaccccactgtggtcccctgcactttccacctcagctgagccaaaggccatatacaagtttaactgcagctggtcctcactactgttcacattctgaggttaaccagcaaactctgcgtacaccagtcccttccagctcctgggccacaagagaacaaaatatgctcttaagtcattttagacttctgggtatcacaagccaggctcatcttctcaggctgctcatttcatcaccaaatttccattttcacttgcttccatgctcagcgccttcaggtcagccatttagcttggcatcccacacaaaatgctgtatagtcttcattcttacagctctctctgctcagggatctggccaatttcaaaaggtccttgttgctgtaggagttgctcctacttgtgggtctccaagcatgggtttattggtcagtactggccttcgtcgccactcacttctgcgcttccatctcccgactacctaatcttccatgaggttttcttcaatagcttgttcccactgggatttcattgaaaaactccttggctctgttcctgttcaccatgaggggggaagttttgcttcatcatgcttctactgccatgatatcctgccatgatatgctaacacttctcaggcacaagcaacagagtcacctgattctgactgtggatagacacctttgaaagtagga

SEQ ID NO: 57 - DNA, 68468 bp, Homo sapiens
gtgaaacactcactccccattccacctccccagcccctggcaccccccattttattctggtgctaggggaatttcaaaccaggcaagtctcaacacatgctcgagtgtaagaaccagcccacagcctcgttccctaatcacggtcaaaccagaattctactccaggttctactctgtgaatctgctttctgtgaatctgttactctggggaccgcctataagttgaatcctacagtgtctccacttcagtgactggcttatttcacttttctcctctttatttatgagacaaaatttcgctcttgttgctcaggctggaatgcaatggcgtgatctcggctaatttttttgtatttttagtagaggcggggtttcaccatgttggccaggctggtctcgaactcctgacctcagacgatccactttggccttccaaagtgctgggattacaggcgcggcccacctttctcctcttaatcacacaggtaatccatacatacgacattcttttttttttttgacacggagtcttactctgtcacctaggctggagtgcagtggcgcaatcttggctcactgcaacctctgcctcccaggatcaagcaattctcctgcctcagcctcctgagtagctgggattacaggtaaccatcaccacacctggctaaattttgtatttttagtagagacggggtttcaccacgttggccacgctggtattgaactcctggcttcaagtgatcttcctgtctcggtctcccgaagtgctgggattacaggaatgagccactgtgcccggccaatacgacatctgtgcaatgaagtgcaacatataagacacccttcccccacccactgcccccaccaccgcccccacgcccccacccccatctccagatcagaacctggggctgtgcaattttaaacgttgtagccacttgctacttgggtagttgaagttcagtctcagccaggttggagtcctggactctggcccctcttttatttttattttttatttttttttgagacagagtctcgctctgtcgcccagactggagcgcagtggtgcgatctcggctcactgcaagctctgcctcctgagttcacgccattcccccgcctcagcctcccgagcagctgggactacaggcgcccgccaccacacccggctaatttcttgtattttttagtagagatggggtttcaccctgttagccaggatggtctagatttcctgaccttatgatccgcctgcctcgggcctcccaaagtgctgggatgacaggagtgagccaccgcgcccggcctctttttttttttttagacagtctctgtcacccaggctagagtgcgatggtgcgatctcggctcactgcaacctccaccttccgggttcaagcgattctcctgcctcagcctcctgagtatctgggattacaggtgcctgtgaccacgcccggctgatttttgtatttttagtagagacggggtttcaccacattggtcaggctagcctcaaactcctgaccccgtgatccttccgcctcagcctcccaaagtgctgggattacaggactctggcccatcttggctgctgccaatgtccttccttctatcttggtttttccacagttacgcacatgccagataacggcgagtctgttccccagcaactgcaacggatctgcccaccactgggaaatggaagaccttgcagcccaggtctttgtagaccaagattagattgtggtcaacaaacacctgaccttggcctttggaaccatcagccatgtcagctaaaataaaagcagaatctggctgggcgcagtggctcacgcctgtaatcccagcactttggggggctgaggtgggcagaccacctgaggtccggcgttctagaccagcctgaccaatatgatgaaaccccgtctctactaaacatacaaaaattagctgggcatggtggcgggcacctgtaatcccagctactcgggaggctgaggaaggagaattgcttgaaccctggaggcagaggttgcagtgagccgagattgcgccactgcactccaacctggactgcagaacaagactctgtcccaaaagcagataaataaaaataaataaaaataaaaatatggccgggcatggtggctcacacctgtaatcccaacactgggaagatgaggcgggcagatcacgaggtcagggattcgagaccagcctggccaacatggtgaaaccccgtctctactaaaaatacaaaaattagccgggcatgatgctgcatgcctgtaatcccagctactctggaggctgaggcaggagaatcgcttcatcccgggaggtggagcttgcagtgagctgagatcgcgccactgcactctagcctgggcaaaagagtgagactccatcgcaagaaaaaaaaaaaaaaaagctgcaagctctgtctcccgggttcaagtgattctcctgcctcagccttccaagtagctaggattatacgcgcccgccaccatgcctggctaatttttgtatttttagtagagatgcggtttcaccatgttggccaggctggtctcaaactcctgacctcacgtgatccacctgcctcggcctcccagagtgctgggattacaggtgtgaacccctgcgcctggccaagaaaagttgcttgaatgaagagtaaatagaagacccagaaagaaatgattcgtccgaggaaggtcacagaagcaacgtaatcaagatggaaatctgactcttcctaattttggccagacttcccatccctccaaagctttccagactcttccagatcattctagatatttccagaaatcattcgtgaaatctaactaggagtagtctgtaaacaatgtgtttcacacagatacaattcataaacgatgagaagacaaggacacttcatgaatgaaatttttacggccgggtatgttggctcacgcctataatcccaggactttggaagacccaggcaggaggattgcttgagtccaggagttcaagaccagtctgggccacatagtgagaccctgtcgctacaaaaaatttaaaaattaggtagatatggtggtgtatgcctctagttttagcttttttggaggctgaagcaggaggatctcttgagcccaggaggttgagctgcaatgagctacgattgaactactacactccagtctgggtgacagagaaagaggctgcctcaaaaaaataaaaataaaaaaataaggccggacgcggtggctcacgcctgtaatcccagcactttgggaggctggggtgggcagaccacgaggtcaggagatcgaggccatcctggccaacatgatgaaaccctgtctctactgaaaacacaaaaattagctgggcgtggtggcgtatacctgtaatcccagctactcgggaggctgaggcaggagaatcacttgaaccagggagtcagaggttgcagcgagaggagattgtgccactgcattccagcctggcaacagagcaagactccgtctcaaaaaagaaacaacaacagcaacaacaacaaaaaaaacataaaaaagttcgggcacggtggctcacacctgtaatcccagcactttgggaggccaaggtgggtagatctcttgaggtcaggagttcaagaccagcctggccaacaaacatggtgaaaccccgtctctactaaaaatacaaaaagtagccgggtgtagtcccagctactcggaaggctgaggcaggagaatcgcttcaacctgggagatggaagttgcagtgaactgagattgcgccactgggtgacagagtaagactcttgtctcaaaaaaaaaaaaagaaagaaagtttaatttaatgattcaaataatgacctgctcgagagataaatataaagtctaacgtaagaggtgtatactttttcctctgtcctgctgtcctcgccccacctcaccccaagtcccaacctgattgatcagtctcctttccctctggtagccccactcccatgaccgaaccgagaagtcatgcacccgcataagaactctaattttttttttcaaagtcttctcactgccccaaaaatagtttctttcattcccaggggatgtgaaagtgtctctcccaattttatttcaacctcccagcgttccacacatatgccttgcctcagccagctttcactgatctgccatttccacctcggcgctgctcctacctgcggaaatcctgtccatccatagtctgatttctgttgttccagaacattcttttttttttcccctggaacattctttaagatacctcaataaatgaaaccagagggtatagagcagtatgaatgggtactacaatgtacagggggaaatggaggggaatatgatatactctcctccttgtatatgcttagaatgttctagaaggatatgcttaaaaggttagcagtcctggccaggcgtggtggctcacgcctgtaatctcagcactttgggatgccaacgcggacggatcacaaggtcaggagttctagatcagcctgaccaatatagtgaaacctcatctttactaaaaatacaaaaattagccgggtacggtggcatgtgcctgtagtcccagctactttggaacctgaggcaggagaatcgcttgaactcgggaggcagaggttgcagtgagccgagactgtgccattgcactgcagcctgggtgacagaacaggactccgtctcaaaaaaaaacaaaaaaggtcagcagtcttaattgtcagagggcaggggacctgcatgggatggaggtttttccatgtgtccaccttttgagcccttttgctttttttttttaaatctttttattgtagcaaaatagatataaaatttaccctttttttttttgagacagggtctcactctgttgcccaggttggagtgcagtggcatgatcttggctcactgcagcctctgcctcctgggttcaagcgattttcctgcctcagcctcccgagtagctgggattacaggtgcttgccaccatacccggctaattttgtatttttagtagagacggggttacgccaagttggccaagctggtcgcaaactcctgacctcaagtgatccgcccccctcggcctcccaaagtgctgggattacaggcaggagccaccacgctcagccctaaaatttaccatattaaccattttcaagttcagaggcattaaagtatactcacattgttgttcaactgtcaccactactcacctgcagaagtttttcatcttgcaaagtgaaaaccccatacccaatttcccgttcttcctctcagcccctggtaatcactattctactttttgtctactttttgtatgaatttgcctattctaggacctaatagaagtggagtcaaacctgtttgtccttttgtggctggcttatttcacccggccttatatcctcaaggtttatccatgttggaggatgcctgaatttccttgtttttaaggctaaattttattctattatattaatatgtcatattttgtttatcctgatggacacttgggttgattccacctttggccattttgaagaagcttctatgtacatggtatacacatatatctttgggtctctgctttcaatgcttttggggatatttcagatgtggaatttctggattataaggcaatttttttttttgagacagactctcgctcttgtcgcccaggctagaatgtggtggtgtgatctattttttttttttttttgagatggagtctcgctctgtcgcccaggctggagtgcagtgtcacgatctcagctcactgcaagctccgcctcccaggttcgtgccattcttatgcctcagcctcccaagtagctgggaccacagccgcccaccacctcacccggctaatttttgtatttttagtagagacagggtttcactatgttggccaggatggtctcgatctcctgacctcgtgatccgcctgcctcggcctcccaaagtgctgggattacaggcgtgagccactgcacccggctggtgtgatcttggctcgctgcaacctctgcctcccaggttcaagcgattcttgtgcctcagcctctccgcagctgggactacaggtgtgcgccactgtgcccagctactttttaaaaatatatgtgtatttattatacttttaagttctgggatacatgtacagaacgtgcaggtttgttacataggtatacatgtgccatggtggtttgctgcacccatcaaccggtcatctacattaggtatttctcctaatgctatcccttccctagccctccactctcccggttttttgttttgttttgttttgttgttttgtttttagtagagacagggtctcaccatgttgcccaggctagtcttgaactcctgacctcaagtgatccgcccacctcagcctcccaaagtgctgggattacaggtgtgacccactacactcggccttattttcacttatttatgcaattttcactattgctatattctaggaggcactgtggaattgcactgtggaattttagtattgctgtatttcagcaagccatgaggtctgtcagcacacggctttgggcattttgtgaagataactgatgccagctgagccaaggcaggttcctgattccacccactggcaggcaccgaggtctctgctgttactgatggtttctctgtggattgatgggcttaaggccagaccacagctgcaatggctcacctctgccaaaggccaggctcgttggggcagagacctattccggactgagcctcctggtgaattagagaggtagaaaatgggaggacgggggcaggtgggctattacagcgaggaaaatgcccaccctgagttgtattagataactttgggagttcaggaactttccaataaagtgggttccacagcaggattacttactgactccctaatagaaagaaggcaggcacaggccgggcgtgttggctcatgtctgtaatcccagcacgttgggaggctgaggcgggtggatcacaaggtcaggagatccagaccatcctggctaacaaagtgaaaccccgtctctactaaaaatacaaaaaattaggctgggcgtggtggctcgtgcctgtaatcccagcactttgggaggctgaggcgggcggatcacgaggtcaggagatcgagaccgtcctggctaacacggtaaaaccccatctctactaaacatacaaaaaaaaattagccaggtgtggtggcgggcgcctgtagtcccagctactcaggaggctgaggcaggagagtggtgtgaactcgggaggcgcagcttgcagtgagccgagactgcgccactgcactccagcctgggcaacagacagagactccgtctcaaaaaaaaaaaaaaaaaatacaaaaaattagccaggcgtggtggcacgtgcacgtgactgtagtcccagctacttgggaggctgaggcaggagaattgtttgaacccgggagacggaggttgcagtgagccgagatcgcgccactgcactccagcctgggtgacagagctagactccgtcaaaaaacaaaaaacaaaaaacaaaaaaacaaaaaaaaaaaaacagcaggaactggcaggtcttccctgaagagataaaaaaaaaaaaatgcagttgcaacacaaaagcagccacagagaaaagcaaacccatatatggtatttattatgcaccgagtgtggctctaatcacttttttttttttaattgagagacagcctggctctgttgattgggctggagtgcagtggcgcgaccgtagctcattgcagcctcaacctccttggctcaagcaatcctcctacctcagcctcctgagtagctgggaccacaggtgtgagccaccacgcctggctaattgttttttttttttttgtagagacagggtctcactatgtggcccaggctggtttccaactcctgggctcaagtgatcctcccacctctgcctcccaaagtgctggggattacaggcatgagccacctcgcctggcctctagtcgctttatatattttaacttaatccttacaagagccctgtgagctagttacaggagcacaaatggaaaccaagaaacagaaaaatttatcagcatgactcagtcctcagagccatgtatggccgtgtccgtgcatggcaggcaggtcaggggcctggggaacgctgttctggaaaccttggccaggccttggcacccgaggaatgtgcttttcagagtttttgtggctcttttccagacctgccctgacctctagctctgggaactatgtaagccaagtgccttccgggaagggagtccctctcctggtaactctttctgggtaaccagatgtggactcatgacacacactgagcctacgtcttataattttttgtttttgtttttgagacagtttcggtcttcttgcccaggctggagtgcaatggtgcgatctcggctcactgcaacctctgcctcccaggttcaagcgattctcctgcctcagcctccctagtagctggaattgcaggcatgcgccaccacgcctggctaattttttgtatttttttttttttagtagaaacggggtttcaccttgttagccaggctggtcaccaactcctgacctcaggtgatccgcccacctctgcctcccaaagtgctgggattacaggtgtgagacagctgtgagccaccacgcccggcgcattttttttttcttttttttcagagggagtgtccctctgtcacccaggctgaagtgtagtggcgtgatctcggcccactgtaacctctatctcccaggttcaagtgattctcctgactcagcctcccaagtagctgggactacaggcgcctgctaccatgcctggctaatttttgtagttttagtagaaaccgggttttgccatgttggccaggctggtctcaaactcttgacttcaggtgatccacctgccttggccttctgaagtgctgggattatagggcatgagccactgtgactggccatcttaaattttttttttttttttttttttttttgagacagggtttcactctgtcgcccaggctggagtgcaaaggcgcgatcttggttcactgcaagctccgcctcctgggttcatgccattctcctgcctctgcctcatgagtaactgagactacaggcgcccaccaccacgcccggctaatttttttgtatttttttagtagagatggggtttcaccttgttagccaggatggtctcgatctcctgacctcgtgatccacccgtctcggcctcccaaaatgctggcattacaggcgtgagccaccgcacccagccttaaatttttttttaagggaaatcaaacccagtgatattgggccagtacagtggctcacacctgtaattccaccactttgggaggctgaggcaggtgaatcacctgaggtcaggagttcgagaccagcccggcaaacatggcgaaaccccgtctctactaaaaataagaaaattagccgggcgtagtggcatgcacctgtaatctcagctactcgggaagctgaggcatgagaatcgcttgaacctgggagcaggatgttgcagtgaaccgatatcacaccactgcactccagcctgggtgacagagcaagactctgtctcaaaaaaaaaaagaaaaaaaaatccagtgatacttactttttaaatttttatttacttattttttgctttaagttgaatctttaaacttatctttatttttgagacacagtctcactctgtcgcccaggctggagtgcagtggtacaaccacagctcagtgcagcgttgacctcctgggctcaagccatcctcccgcctcagcctcccgagtagctgggactacaggcgcacacaaccatgtccagcttatttttgtattttttgtagagacagggtcccactgtgttgccctggcttgttctgaactcctaggctcaagtgatccccccgcctcaccctcccaaagtgctgggattacaggcatgagccaccacatccagacttcacttttttgtttaatgtcgcaaatggcataaggaatgggattcaatggggacacatttataaacgttgcagcagctcctagaacttgcctatccttgtaaacttctctaggtgattgctaattacttctttttttttttttttttttgagacggagtctcactctgtcgcccaggctggagtacagtggcgcaatctcgtctcactgcaaactccacctcccgggttcacgccattctcctgcctcagcctcccgagtagctgggactacaggcacccgccaccacgcccggctaattttttgtatttttttttagtagaggtggggtttcactgtgttatccaggatggtcttgatctcctgacctcgtgatccacctgcctcagcctcccaaagtgctgggattacaggcgtgagccaccatgcccagcccgctaattatttcaatttgaccttgacactgagcctgccaagtaggttcaagcattttgatggcccctttacaggttgggaaagctaatttatctgtccaaggccgaattctgaaactgagtcttaactgccaaaaattcttatcatcaatttcttcttctgggttgggcacagtggctcatgcctgtaaagccagcaatttgagaggcatcatgatgcaagaggaagaggattgagtgaagctaggagtttgggaccagcctgggcaacatagtgagaccccatctataaaaaaaaattaaaaattagttgggcatggtggtgcactcctgtggtcctagctattcaggaggctgaggtgggaggattccttgagcccagggttgacgctgcagagagctgtgatcacgccactgcagtccagcctgagtgacagctggaaataatgataaataaataataaataattatttaaaaaattataataaaaataattaaaaaattattttccctgattaatctttttttttgtccttctgagagttcaatttgtcccttttctgcctggtctcctaggtttccctaaaatcctgctgagaggttagcactgcctgccaaagtcagtttgcaaaatcccagagaaatccagcttattcctgggggaaccgccaagactgcccagccctgtgtggggttcaggcaagtttctcacatgtgcctttttggcaagaggcctctggcaaccccatgagtccccaaagagactcaattctaaaagttggtctccaccagctctctgtggcttaggggttcaagttcaactgtgaaagccctgttttgttttgattttgctttgagggagaggaaaccgcccttctgtttgttcaactccttctcctaaggggagaaatcaatatttacgtccagactccaggtatccgtacaattgatttttcagatgtttatactcagccaaaggcgggatcccacaaaacaaaaaatatttttttggctgtacttttgtgaagattttatttaaattcctgattgatcagtgtctattaggtgatttggaataacaatgtaaaaacaatatacaacgaaaggaagctaaaaatctatacacaattcctagaaaggaaaaggcaaatatagaaagtggcggaagttcccaacatttttagtgttttccttttgaggcagagaggacaatggcattaggctattggaggatcttgaaaggctgttgttatccttctgtggacaacaacagcaaaatgttaacagttaaacatcgagaaatttcaggaggatctttcagaagatgcgtttccaattttgagggggcgtcagctcttcaccggagacccaaatacaacaaatcaagtcgcctgccctggcgacactttcgaaggactggagtgggaatcagagcttcacgggttaaaaagccgatgtcacatcggccgttcgaaactcctcctcttgcagtgaggtgaagacatttgaaaatcaccccactgcaaactcctccccctgctagaaacctcacattgaaatgctgtaaatgacgtgggccccgagtgcaatcgcgggaagccagggtttccagctaggacacagcaggtcgtgatccgggtcgggacactgcctggcagaggctgcgagcatggggccctggggctggaaattgcgctggaccgtcgccttgctcctcgccgcggcggggactgcaggtaaggcttgctccaggcgccagaataggttgagagggagcccccggggggcccttgggaatttatttttttgggtacaaataatcactccatccctgggagacttgtggggtaatggcacggggtccttcccaaacggctggagggggcgctggaggggggcgctgaggggagcgcgagggtcgggaggagtctgagggatttaagggaaacggggcaccgctgtcccccaagtctccacagggtgagggaccgcatcttctttgagacggagtctagctctgtcgcccaggatggagtgcagtggcacgatctcagctcactgcaacctccgcctcccgggtttaagcgagtctcctctctcagcctcccgaatagctgggattacaggcgcccaaccaccacgcccgcctaatttttgtatttttagtagagacgggttttcaccattttggccaggctggtctcgaaccccgacctcaggtgatctgcccaaaagtgctgggattacaggcgtcagccaccgcgcccggccgggaccctctcttctaactcggagctgggtgtggggacctccagtcctaaaacaagggatcactcccacccccgccttaagtccttctgggggcgagggcgactggagacccggatgtccagcctggaggtcaccgcgggctcaggggtcccgatccgctttgcgcgaccccagggcgccactgccatcctgagttgggtgcagtcccgggattccgccgcgtgctccgggacgggggccaccccctcccgcccctgcccccgcccctttggcccgccccccgaattccattgggtgtagtccaacaggccaccctcgagccactccccttgtccaatgtgaggcggtggaggcggaggcgggcgtcgggaggacggggcttgtgtacgagcggggcggggctggcgcggaagtctgagcctcaccttgtccggggcgaggcggatgcaggggaggcctggcgttcctccgcggttcctgtcacaaaggcgacgacaagtcccgggtccccggagccgcctccgcgacatacacgagtcgccctccgttatcctgggccctcctggcgaagtccccggtttccgctgtgctctgtggcgacacctccgtccccaccttgtcctggggggcgccctcgccccaccagccccgatcaagttcacagaggggcccccggccaccctcaaggcctcggttccttacgaggttgaaacgttgcctcagaatctccccgcccctccttggtctgcagccgagatcttcagccacggtggggcagctatcccccgggaccgaccccctggggtggcctcgcttcttcagaggctgtgaatggcttcggttcagctgtccaagcggcgatttttcctctgggtgaaatggattagattttagatttccacaagaggctggttagtgcatgatcctgagttagagctttttaggtggctttaaattagttgcagagagacagcctcgccctagacaacagctacatggccctttccctcctgagaaccagcctagcctagaaaaggattgggattgcctgatgaacacaaggattgcaggaaactttttttttaattggcaagggggttggctttgactggatggagagctttgaactgccttgaaattcacgctgtaactaacacaccagtttcctctgggaggccagagagggagggagggtgtaatgaaatacggatgattgttcttttatttttatttacttatttattttttaactttttgtagagatgaggtctcgcttggttgctcaggctggtcttgaactcctggcctcaagcgatcctcctacctcagcctcccaaagtgttgggattacaggagtgagccaccgcgccccaccggggatgatgatgattgcaaacattctgccactcagttttacaaaagaaagagaggcactggattaatgtgtatctcactcaccaatcaacctcttccttaagagaaaatgttaaggaagtcttaggcaaggccttgtttgttcatcactttagtttctctctcccgggatggctgagaatgtgatgtttcctctgttgtcaaggagactacacccctgatgttttcctccagacttctgagagctggtgtgtgtttctagcactttctagctgcaccacctcacgctgtagctggcttcaaggcatatccaggggggagtttcttgtccatttcctttacaaagggaagttgttggaatctgaaccgcaagccttcacttagaccaaaatcaggcaacagcggtgagcgcagctccaaacgtgtcaatgactcacccaaatttgagtaagggagttggctgctttaacgagccgcagggtgattcccttgtcatttccggaaatacctatcttccagggaacactgggaaaaaacagggagacctttgttgagacagaaaacctgtaggggaattctgttcctcattcctgctcttatctgtagacttcctccctgataagatccaattctagatgggtcggttgctccttgctttgatgggtgctttgatgggctttattattattattattattattattattattttgatgggctttttgatgtcccttttccttccacactctgtcccaactgtcaagcaaatagccttttgttgctaagagactgcagatgtaaccgaccagcagcaaacagtgagtcaggctctctcttccggaagcaaaatcaattgctgagatcactctggggaaaatacccaccttatttggaaagaagcactgatcaattgatgtctattttttttttttttgagttggagtctcgccctgtcacccaggctggagtgcaatggcataatctcgcctcactgcaatccccgcctcccgggttccagcaattctcctgcctcagcctcctgagtagctggaattataggcgcctgccacaacacccggctaatttttgtatttgtagtagagatggggtttcaccacgttggccaggctggtctcgaactcctgacctcgtgatccacccgcctcagcctcccaaagtccaaggattgcaggcgtgacccactgtgccagccaatcaattgatttctcattcattttcagctggctctgttcccttaagccaggggattttcgtttgtttgtttccccttcaaggaaatgattctagctacagttttgatttccttgtacaactgttttcagtagcacagggaaagaaaacatcgaaagcattcaccacctcatttgtgtgctgggggaaaaagcagaaatgtgtattctctttttttgtttcgatgaccttgttcctgacttgttactcgtgacttgagagatcagagggctagaggactagaatttatagaggtgttttttttgtttgtttatttttgttcgagttgcccaggctggagtgcagtggcgcaatctcggctcactgcaacctctgcctcccaggttcaagcgattcttcggcctcagcctcctgagtagctggaactacaggcgcccgccaccacacccagctaatttttgtatttttcagtagagatgggatttcaccatattggtcaagctggcctcgaactcctgacctcgtgatccacccgcctcagtttcccaaagtgctgggagtacaggcgtgagccgccgtgcccggcctttttgtgtttttgtgtttttgagaggagctcattgctttttaggcttccctagcgtgagaaaatctggggatccatgctctagtttacttcctttttttttttttttttgagatggagtctcgcttagattgcctaatctcagctcattgcaacttctgcctccggggttcaagggattctcgtgtctcagcctcctgggtagctaggatacgggcacccgctaccatgcctggctaattttgtacttttagtagagacagggtttcgccacgttggccaggctggtctcgaactcctgacctcaggtgagccgcctgccttggcctcccaaagtgctgagattacaggcgtgagccaccgcgcttggcctaatttgcttttcctgaaattcaaatggtctaatatgaaaaacgccaaccttgcttgaaagaataagaaagaggtgcggtttcgttgggccgttgatgtttggaacaggactggttttgtccccttgctcggaaagggcagcaactgtgaggacagctccctgacgtgctctcactcagcactgttccgttcctgagcactgtccccactagctaggccaagggagctcatttggcaggcaactgctgtctggctgcgcctgtggcagtaaaatctgcctttattttttggaggcagggtcttgccctgtcgctcaggctgaagtgtgcagttatagctcactgcagcctccagcttctgtactcaactgatcctcctctctcagcctcctgagtagctgggactatacgcacgtgttaccactcccacctcagtttgtttgtttatttatttatttatttatttattgagatggagttttgctcttgctgcccaggctggagtgcaatggcgcgatctcggctcaccgcaacctccacctcctggttcaagcgattctcctgcctcagcctcctgagtagctgggattacaggcatgcaccaccacgcccggctaattttgtatttttcgtagagatggggtttctccacattggttcaggctgttctcgaactcccaacctcaggtgatccacccgcctcagcctcccaaagtgctgggattataggcgtgagcccccgaacccggccactcccagctaagtttaaattttttgtttgtttgttcgtttgtttttattttttgagacagagtctcccgcccaggctggagcgcagatcactgcatccttgacctcccaggcttaagccatcctccccactcagcctcccaagtagctgggattacaggtgtgtgccactatgcttggctaagttgtgtattttttgtagagatggggttcaagggattctcgctttgttgcctcggttggtctcaaactcctgggctcaagcagtcctccctcctcagcctcccaaggtgctggggaaatccacttttgaaacattgtctggagagttgcccaggtggtagatcacagaaataggtcatcgtggggtccttcccatgggtgcagtcttgagccacctgtggccagcaaatatttggagaataatagtcaggggagagcttgaggtccagggaaaggttttgtttttcttcagggaaaggtttttattgttctttatccctccttaaaggaccttcaggtgttactgacattcccggtctacccagtggcacatttagtttgtaagctgggccctcgtacagaggtagggaggtgagagcattggattagtggtcaccaaagctgcggtcacctagtggggtgatcagaggctcctcccttaagatcttgattgccaacgcctctggcccaactttcctttttatttatcgcaagcctcctggaatctcaattgctttttgcccacccggtgtgtcagcacaagaaatgagtcatttcctcctttaagcacagttgaaattgagctgtgagtcagtgaggtgtgtacgatattgtcaaagcggggtgtgtacagtattgacagatctgtagttgggcaagagaattatcagagtttgtgaccacagcagattccaaagctcgactcattttcttctctcttccttcccttttttcttttctttttttttttttttttgacagagtctcgctctgttgcccaggctggagtgcagtggcacaatctgggctcactgcagcccctgcctcctgggttcaaatgattctcatgtttcagcctcccgagtagctgcaattacaggcattcgggttcaagtgattctcctgcctcagccacctgagcagctgggattacaggcgcccgccaccacgcccggctaatttttgtatttttagtagagacggggtttcaccatgttggccaggctggtctcgaactcctgaactcaggtgatccgcccacttcggcctcccaaagtgctgagattacagacgtgagtcaccgcgcccagcctgttctgttctttaattctcaaaacaccctctaggaagtagagactgccattctcccccattttacagatcaggaaactgagtcccagaaggatttagtcagttacccaagttgttctagttaaatggcctggaaagccagtgaagcccaggattgtctatctaacccccttactactctaactttcagggaatccacatgaatgtgctgggtcaaccatcaaagttgaaatggataaagggggctggatgcggtggctgatgcctgtaatcctagcactttgggaggccgagatgggtgggtggattgcttgagcccaagagtttgagaccagcctgggcaacatagtgagacacctgtctctgcaaaaaataaataaaaagttagctgagtgtgatggtgcacccctctagtcacagctgttgagttaggcttaggcaggaggatcgcatgaacctgggaggtggaggcggccgtgagcctcagtcatgccactgcactccaacctgggcaacagagtgaaagccggtgtccgaaagagaaagaaaaaaagacatagatacatcttttaaagttaggttgtatgttaattacctacaactcagtttcaactgtgcttaaaggaggaaatgactcatttcttgctacatatcaaattagcccaaaatgtagtggcttaaaacaacacatttatgatttctcagtttttgcgtgtcaggaatttggaagcagcacagctagacggttccagctcagggtctctcatgaagttgcaatcaaaatattggcaggagagaaaaacatattttcagaagctgcaggcataggaagacttggctggggttgaaggatccacttccaagatggcgcactcagtggctcttggctggaggcctcagttccctgctgcgtggagctctccctccagctgcttgagtggactcatgacatgcagctggcctcccctggagcagtcgatccaacaatgagcatggccatgaactaggctcagaagccactccctgtcgtctctacattttcctatcagaagcaagtcattaaaagtccagtgccactccaggggagacgaattaggctctgccttctgaaaggattatcacagaagatgcggtcctatattctttttttaaaattattcttttttttattttgtagagatggggtcttggtatgttgcctaggccagtctggaattcctgggctcaaacaatcctgtctctgcctcccaaagtgttgggattacaggcatgagccactgcacctggtcatgtggtcatattttctttttcttttttttttttttttgagacagagtctctgtcgcccaggctggagtatggtggcgtgatctcagttcactgcagcctccgcctcccgggttcaagcgattctcctgcctcagcctcctgagtagctgggattacaggcgcccgccaacatgcccagctaatttttttagtagagatggggtttcaccatgttagccaggatggtctcgatctcctgatttggtgatccgcccaccttggcctcccaaagtttcaaccatcgatcagaacttattgatgtacttatgtagctaggcacggtggcgcgtgcctgtaatcccagctacttggaagggttaaggcaggagaatcgcttgaacctgggaggcagaggttacagtgagtcaagatcataccattgcactccagtctgggcaacagaatgagactctgtctcaaaaacaaaaaacaaacccttgtatgtgattttcctggatagcatctgttacatcttcacaaagataaaaagtcagacttggctgggcatggtggctcacacctgtaatcccagcactgagaggctgaggcaggcagatcacttgaggtcaggaatttgagaccaggctgggcagcatggtgaaaccccgtctctacaaaaaatacaaaaattagccgggtgtggtgtcacgcacctgtattcccaagctactcaggaagctaaggcaggagaatcacttgaacccagaggtggaggtttgcagtgagttgagattgtgccattgcactccagcctgggcgacagagtgagactctgtgtcaaaaataaaataaaataaaattttaaaaaaggcagatttttttttcttcttggtattgttaccttattatagtaataataagtgcatagtgcatgctgagataagcaatcataatttgttattgcggccgggcatggtggctccagcctataatcccagcactttggtcaggagttcaaggccagcctggccaatatagtgaaactccatctctactaaaatacaagaaattacctgggcatggtggcagttgctggtgatccccagctacttgggaggctgaggcaggagaatcgcttgaacctgggaagcagaggttgcagtgagccaagattgcaccactgcactccagcctgggtgacagagtgagactctgtctgaaaataataataataataatttgttattgcttttattgccttagtttacatagggaatcaaagtttatactttgatttataaaagttgctttgattctagttcacagaaccagaatctttcatataaaggtattagagggcccagtgtggtggctcatgcctgtaatcccagcatattgggaggctgaggagggaggatcactttaggagtttgaggccagcctaggcaacatagtgagaccttgtctctacaaaaaattccaacattagctgggcatggtggcatgtgcctgtagtcccatttatttggggggctgaggcaggaggatcacttgagcccacgaggttcaatccaggttgcagtaagccatgatcctgccactgcactccagtttgggtaacagagcgaagctatgtctcaaaaaaagaaaaaaaaagtattctaaatccaaatttaatatataaaactaaatgcaggccaagtgtggtggcatatacctataatcacaacactttgggaggctgaggtgggaggattgcttgagcccaagagttcaagaccagcctaggtaacacagtaagaccccatctctacaaaaagtagaaaaattagcctggcatggtggtgagtgcttttaatcccaactacttagggggctgagatgggaagattgcttgagcctcagagtttgaggctgcagtgggccgtgatcgctccactgatcgctctaaagtgagaccctgtctcaaaaaaaaagaaaatagaagaaaactaaatacattcaataagactttgatctcttttccaaggtgtaaatatattttgggaaattttccagttactttgttctcattttaatgtaataatctaagtcttggttttctaaggaaaagttttctcttattatatcttttgttaatgtttctctcccatttcttttgatctgatcttcagatacatgattatcttcactgctaaatttgtgttctctggcctctacatttataatttctcataattctttatctaagtatttcttccctacctactgaagaaaactcaagttttcttccaccttaatgattatgctgtgtctgtgagttttcttcatgactctttacagtacaagttttttgtttttgtttttttaatggtcagatggatagaacaacacaggttttgtttgttttgttttaacttttaaaaaaattataatagataaagggtctcactacgttgtccaggctgatctcatactcctgggctcaagcaatccacccacctctgcctcccaaagtgctgggattacagtcatgagccaacatgcctgggcagtacaggttttttttgagacggagttttgttcttgttgccgaggctggagtgcaatggcacaatcttggctcaccacaaagtctgcctcccaggttcaagtgattctcctgcctcagcctcctgagtagctgggattacaggcatgtgccaccacgcccagctaattttgtatttttagtagagacggggtttcaccatgttggccaggctggtttcgaactgctgacctcaggtgatctgcccacctcggcctcccaaagtgctgggattacaggcatgagccaccatgcccagctgtagtacaggttttaatatgctaaatactcttcctttctttattaatgtgcatggaagttctaatatttttttcccataccccagagagtccatattttggaatcaacaacactagcctttgttgacaagtgtctctcttgggttccttctttgtgtcctccactgaattttggggttcataaaatttcatttgttgtgcttgcttaattccctgggaatcagactgttcctgatcggatgacatttctggttaattctttagttggcaggaaatagacacaggaaacgtggtcagtttctgattctggcgttgagagaccctttctccttttcctctctctcagtgggcgacagatgcgaaagaaacgagttccagtgccaagacgggaaatgcatctcctacaagtgggtctgcgatggcagcgctgagtgccaggatggctctgatgagtcccaggagacgtgctgtgagtcccctttgggcatgatatgcatttatttttgtaatagagacagggtctcgccatgttggccaggctggtcttgaatttctggtctcaagtgatccgctggcctcggcctcccaaagtgctgggattacaggcaccacgcctggcctgtgacacgattcttaacccctttttgatgatggcggctggaaaagtggccagtggattttgatgtattcaatcatgaattaggaggtggggagagaatgaattattggagctttccttaaagccattaaatggctctattgttttttcaattgatgtgaatttcacataacatgaaattaaccagctcagtggcattaatacatctgcaatgctgtgtggccaccacctctatcttgttccaaaactttgcataacctaatgtctttttttttttttttttttgagacggagtctcgttccatcacccaggctggagtgcagtggtgtgatctcagctcactgcaacctccgcctcccaggttcacgccatcctcctgcctcagcctcccgagtagctgggactacaggcaccctccaccacatccggctaattttttgtatctttagtagagatggggtttcaccatgttagccgggatggtctcgatctcctgacctcgtgatccacctgcctccgcctcccaaagtgctggcattacaggcgtgagccaccatgcccggcctatttttttttttaagagatggagtctaattctgttgcccaggctggagtccagtggtaccatcatacttcactgcagccttgacctcttgggctcaagtgattctcttgcctcgaactcccaaagtattgggattacaggtgtgagccaccgcactcagcctaatgtccagtttttaacaagctccatttaaatgccctccgttttgacccataaaggggtaggcttggccgggcacaatggcttgtgtctgtagtcccagctacttgggaggctgaggcagaaaggcagaaagattgctttataaagcccaggagtttgagggccacctgggtggcatagctagacctcatctctaaaaaataagtaataaataaatatttgtttttgtttttttctttttcttttcttttttttttttttttgagacggagtcttgctctgttgcccaggctggagtgcagtggcgcgatctcagctcactgcaagctgtgcctcctgggttcatgccattctcctgcctcagcctcccgagtagctgggactacaggcgcccactaccacgcccagctaattttttgtatttttagtagagatggggtttcaccacgttagccaggatggtctcaatctcctgacctcgtgatccgccagctttggcctcccaaagtgttgggattacaggcgtgagccactgagcccgccccatatgtatgtatatatatatttttttaaaatgggagaccaggcatggtggctcatgcctagaatcccagcactttgggaagctgaggtaggcggatcacttgaggccatgagtttgagaccagcctgctcaacatgatgaaacttctatctctactaaaaaaaaaagtgggattaggtcaggcacggtggctcacacctgtaatcccagcactttcagaggccgaggcaggaggatcatgaggtcaggagatcgagaccatcctggctaacacggtgaaaccccgtctctactaaaaaaatacaaaaaattagccaggcgtggtggcgggtgcctgtagtcccagctactcaggaggctgaggcaggagaatggcgtgaacccgggaggcggagcttgcagtgagccaagatcgtgccactgtactccagcctgggcgacagagcaagactctgtctcaaaaaaaaaaaaaaaagtgggattgacattctcttcaaagttctggggttttcctttgcaaagacaggattggcaaggccagtgggtcttttttgtgtgtgtgtgtgtgacggagtctcactctgccacccaggctggagtgcaatggcaggatctcggctcaccgcaacctcctcctcccaggttaaagtgattctcctgcctcagcctcccgagtagctgggactacaggtgcccgccaccacacccaactaatttttgtatttttagtagagacagggtttcactatattggccaggctggtcttgaacccctgacctcacgtgatccacccgccttggcctcccaaagtgctgggattacaggcgtgagccactgtgctcggcctcagtgggtctttcctttgagtgacagttcaatcctgtctcttctgtagtgtctgtcacctgcaaatccggggacttcagctgtgggggccgtgtcaaccgctgcattcctcagttctggaggtgcgatggccaagtggactgcgacaacggctcagacgagcaaggctgtcgtaagtgtggccctgcctttgctattgagcctatctgagtcctggggagtggtctgactttgtctctacggggtcctgctcgagctgcaaggcagctgccccgaactgggctccatctcttgggggctcataccaagcctcttccgcccttcaaatccccccttgaccaggaggcattacaaagtggggatggtgctacctcttcgggtttgtcacgcacagtcagggaggctgtccctgccgagggctagccacctggcacacacactggcaagccgctgtgattcccgctggtcgtgatccccgtgatcctgtgatccccgccccgtgaggctgaacacatagtgacgcttgctagccaagcctcaatgacccacgtaacatgaagggggaaaagccagaaagttctgccaaggagcaaggccaagaatcccgaagggaaatggactttgaagctgggcgtcttcttggctgtcttaatacaagtggcacatccaaatccaaaaccccgaaattcaaagtcttgagcacccgaaattctgaaacgtcttgagcactgacctttagaaggaaatgcttattggagcattttggatttcggatttttaccactgagtgtggagtcctaattaggaaaaaaaccaggctgaccgaaccaaaggaaagcaataaaagaaggcagatagggtcaggcacggtggctcacccctgtaatcccagccttttgagaggctgaggcgggtggatcacttgaggtcaggagttcgagagcagcctggccaacacggtgaaaccccatctctactgaaaatacaaaaactagccaggtatggtggcgtctgcctgtaatcccagctactcgggaggctgagacaggagaatcacttgaacctgggaggcagaggttgcagtgagccaatatcacgccattgcactccagcctgggggacaagagcgaaattctgtctcaaaaaaaaagaagaagaaggccgacaaactatgtaactctgcctttctccatggtccagaacacacagccctcctgcgtaaataactccttatcttcctgctcccagctatcatcagacacctcggctgatagaaaattgcaagttagctcactgcaacctcggcattataagtactgcacaaagccctcttcagcgcacagcacaagcaccattctataaaatctccagcaagcggccaggtgcagtggctcatacctgtaatcccagcattttgggagactgaggcgggcggatcacctgaggtcaggagtttgagaccagcctggccaacatggtgaaaccccgtctctattaaaaatacaaaaaaattagccaggcgtggtggcaggtgcctgtaatcccagctacttggaaggctgaggcaggagaatcgcttgaacccgggaggtggaagttgcagtgagccgagatcttgccatcgcactccagcctgggggacaagagtgagacttcgtctcaaaaaaaaaaaaaaaaattcccagcaagcctttgtcttctggcagtcagctcctctcttgctgacctgctcattgctttcttgcaaggtattttcctacctactttctggaataaatctgtctttctgtacttacaactaccttttttaaaatttctttcttttttgagatggagtctcactctgtttgcccaggctggagttcagtggtgcaatctcagctcactgcaacctctacctactgggttcaagcgattctcctgcctcagcttcccgagtagctgggattacaggcgtgcaccagcacgcaggctaatttttgtatttttagtagagacggggtttcaccatgttggccaaggtggtcttgaactcctgacctcaagtgatcctcccacctcagcctcccaaagcgctaggattacggccatgagccactgaggccggctgcacctacaactgtcttgataaattcttacccccacaccactggtccagatagtcagtgctcacccacaacattaaggatattccaaatttgaaacattccaaaatcagaaaaatattccaactctgaaaatattccaaaatccaaaaaaattcaaaatccaaaacacttctggtcccaagcattttagagaagggatactcaacccaaaataaggacagcaattctataaattgtgctaccatcttgcaggtctcagtttaacagctttacacctattagcgcaccagtgctcatagcagtgctgggaaatgtgtacagatgaggaaactgaggcaccgagagggcagtggttcagagtccatggcccctgactgctccccagcccgcctttccaggggcctggcctcactgcggcagcgtccccggctatagaatgggctggtgttgggagacttcacacggtgatggtggtctcggcccatccatccctgcagcccccaagacgtgctcccaggacgagtttcgctgccacgatgggaagtgcatctctcggcagttcgtctgtgactcagaccgggactgcttggacggctcagacgaggcctcctgcccggtgctcacctgtggtcccgccagcttccagtgcaacagctccacctgcatcccccagctgtgggcctgcgacaacgaccccgactgcgaagatggctcggatgagtggccgcagcgctgtaggggtctttacgtgttccaaggggacagtagcccctgctcggccttcgagttccactgcctaagtggcgagtgcatccactccagctggcgctgtgatggtggccccgactgcaaggacaaatctgacgaggaaaactgcggtatgggcggggccagggtgggggcggggcgtcctatcacctgtccctgggctcccccaggtgtgggacatgcagtgatttaggtgccgaagtggatttccaacaacatgccaagaaagtattcccatttcatgtttgtttcttttttttcttttctttctttattttgtttttgagatggagtctcactctgtgatttttttcatctctaaatttcctacatccatatggccaccatgaggccccaggctggccgatggttgctgttagcttattgggaaatcactgtttggaaggtgctggttgttttttgttgtttgttgtttttgtttttgtttttgttttgagacggagtctcgctctgtcgccagggtggagtgcagtggcgcgatcagctcactgcaacctccgcttcctgggttcaagccattctcctgcctcagcctcccaagtagcgcggattacaggcatgtgccaccacctccggctatttttttttctatttagtagagatggggtttcaccatgttagtcaggctggtcatgaactcttgacctcaggtgatccacccgcctcggcctcccaaagtgctgggattacaggcgtgcactgctgcacccagcctttttttgtttttttgagacagggtcttgctgtcacccaggttgaagtaaggtggcacgattatggctcactgcggccttgatctccttggctcaagcgatcctctcacttcagcctctcaagcagttggaaccacaggctgtaccaccaagcctggccaatttttttgtacagacacaggctggtcttgaactcctgggctcaagcaatcctcctgccttggcctcccaaagtgctgggattccaggcatgagccgctgcacccggcaaaaggccctgcttctttttctctggttgtctcttcttgagaaaatcaacacactctgtcctgttttccagctgtggccacctgtcgccctgacgaattccagtgctctgatggaaactgcatccatggcagccggcagtgtgaccgggaatatgactgcaaggacatgagcgatgaagttggctgcgttaatggtgagcgctggccatctggttttccatcccccattctctgtgccttgctgcttgcaaatgatttgtgaagccagagggcgcttccctggtcagctctgcaccagctgtgcgtctgtgggcaagtgacttgacttctcagagcctcacttccttttgttttgagacggagtctcgctctgacacccaggctggagtgctgtggcacaatcacagctcacggcagcctctgcctctgatgtccagtgattctcctgcctcagcctcccgagtagctgagattaaaggcgtataccaccacgcccggctaattttttgtatttttattagagacagggtttctccatgttggccaggctggtcttgaactcctggtctcaggtgatccacccgcctcggcctcccaaagtgctaggattacaggtgtgagccactgcgccaggcctaatttttttgtatttttagtagagatgcggttttgccatattgcccaggctggtctcgaactcctgggctcaagcgatctgcctgccttggcctcccaaagtgctgggattacaggcacaaaccaccgtgcccgacgcgttttcttaatgaatccatttgcatgcgttcttatgtgaataaactattatatgaatgagtgccaagcaaactgaggctcagacacacctgaccttcctccttcctctctctggctctcacagtgacactctgcgagggacccaacaagttcaagtgtcacagcggcgaatgcatcaccctggacaaagtctgcaacatggctagagactgccgggactggtcagatgaacccatcaaagagtgcggtgagtctcggtgcaggcggcttgcagagtttgtggggagccaggaaagggactgagacatgagtgctgtagggttttgggaactccactctgcccaccctgtgcaaagggctccttttttcattttgagacagtctcgcacggtcgcccaggctggagcgcaatggcgcgatctcggctcactgcaacctctgcctcccaggttcaagtgattctcctgcctcagcctcctgagtagctgggattacaggcgcccaccaccaagcccgggtaattttttgtatgtttagtagagatggggtttcactatgttggccaggctggtgttgaactcctgacctcatgatccgcccacctcggcctcccaaagtgctgggattacaggcgtgacccaccccatgaaaaaaaattaaaaaatgaagcgatgctgggcgcggtggatcacgcctgtaatcccagcactttgggaagctgaggcaggcagatcacgagggcaggagattgagaccatcctggctaatacggtgaaaccccatctctactaaaactacaaaaaattagccgggtgtggtggcaggcacctgtgatcccagctactcaggaggctgaggcaggagaatcgcttgaacccaggaggtggaggttgcagtgagccgggatcacaccattgcactccagcctgggtgacagagtgagactctgtctcaaaaaaaaaaaaaaaaaaaaaagcgaattctgaaatacatgaattcttttccttagatgcctgcttctgtcttgaggtttgttgttgttatttcgaaacagagtcttgctctgtcgctcaggctggagtgcagtggcatgatcttggctcaccacaacctccggctcccaggttcaagcgattcttctgcctcagcctcctgagtagctgggattacagctgaatgccaccttgctgggctaatttttgtatttttagtagagatggggtttcaccatgttggccaggctggcctcgaactcctgacctcgagtgatctgcccgcctcctgaagtgctgggattacaggcgtgagccacctcgtcctggtgagggtttttttttttccccaaccctctgtggtggatactgaaagaccatattaggataactgtacagtatagagaaggcagtggcaagttttctctgtcatataccagagtgggcttgggcatggtggcatactcctgtagtctcagctaatcaggaggctgaggaaggaggatcgcttgggcccaggagttggagactgtagtgagctgtgatcacaccaccacacttcaatctgggcaacagagcaagagaccctatctctaaaaaaaagtaagtatttcggacactgtgggccatacggtctctggtgcagtttctcaacatggctgttgggtgaacacaaccacgcacagaacgcaaaccaatacacgtggctgtgggcccagaaaatgttatttatggacacaaaaattggaatttcatataactgttttgtgtcatgaaaatgatttccctttttatttttatttttcttctcaagtatttaaatatgtaaaagccatttttaggcctggcaggatggttcacagctgtaatcccagcactttgggaggtcgaggcgggaggatcacgaggtcaggagatcgagaccatcctggccaacacagtgaaaccccgtctctactaaaaatacaaaaaattaaccaggcttggtggcgcgcgtctgtagtcccagctgctcaggaggctgaggcaggagaatcgcttgaatgcaggaggcggaggttgtagtgagccgaggttgcaccactgcactccagcctgagcgacagagtgagagtccgcctcaaacaaaaaaatgtttgcccatgctggtcttgaactcctgggctcaagctatctgcctgccttggtctcccaaagttctgggattacaggcatgagctacagcgcccggacttttgttgttttatatctatatatctatatataacttgttttatgtatatatataacttgttttatatatatacataaactgcagtaaaaaacatgtaacataaaatttaccttctcaaaccttattaagtgcacagttctgtgccattagcaaattcacactgttgtacaacatcacaaccaccatctccagaacttttttttttttttttattctttttgagacagagtctcactcgtcgcacgggctggagtgcagtggtgcgatctcggttcactgcaacctccacctaccaggttcaagcaattctcctgcctcagccccctcagtagctgggattacaggtgcccgtcctaccacgcccagctaatttttgtattttcagtagagactgactgggtttcaccatgttggccaggctggtctcgaactcctgacctcaagtgatcctcccacctcagcctcccaaagtgctgggaatacaggcatgagccactgcgcccggccccagaactcttttatcttcccaaactgaagctctgtccccatgaaacactcactctccatcccctccccaactcctggcacccaccattctactttctgtccctatgaatgtgatggctctagggacctcctctgagtggaatcagacagcattttccttttttgactggcttatttcactgagccaagtgcggtggcacacgcctgtaatcccaaaactttgggagaccgaggcgggcgcatcacctgaggtcaggagttcgagaccagcccggccaacatggtgaaaccccatctctagtaaaaatacaaaaaattagcctgtcatggtcgtgggtgcctgtaatcccagctaagtgggaggctgaggcaggagaatcgcttgtacccaggaggcggaggtcgcagtgagccgagatcgtgccattacactccagcctgggcaacaagagtgaaactccgtctctcctaaaaatacaaaaaaattagctgggcatggtggcacatgcctgtagtcccagctacttgggaggctgaggcaggagaatcacttgaacccgggaggtggaggttgtaatgagccaaggttggcggcgaagggatgggtaggggcccgagagtgaccagtctgcatcccctggccctgcgcagggaccaacgaatgcttggacaacaacggcggctgttcccacgtctgcaatgaccttaagatcggctacgagtgcctgtgccccgacggcttccagctggtggcccagcgaagatgcgaaggtgatttccgggtgggactgagccctgggccccctctgcgcttcctgacatggcaaccaaacccctcatgcctcagtttccccatctgttaagtgtgcttgaaagcagttaggagggtttcatgagattccacctgcatggaaaactatcattggctggccagagtttcttgcctctggggattagtaattaagaaatttcaggccgggtgcgtaatccctgtaatcccaacaccttgggacgccgaggcgggcagatcacctgaggtcgggagttccagaccagcctgaccaacatggagaaaccccgtctctactaaaaatacaaaattagccgggcttggtggtgcatgcctataatcccagctactcaggaggctgaggcaggagaatcacttgaacctgggaggtggaggttgtggtgagccaagatcgtgccattgcactccagcctgggcaacaagagtgaaactccatccaaaaaaaaaagaaaagaaaagaaaaaaaagaaaagaaatttcagctgacacagcttcacactcttggttgggttcccgtggtgaatgatgaggtcaggtgatgactggggatgacacctggctgtttccttgattacatctcccgagaggctgggctgtctcctggctgccttcgaaggtgtgggttttggcctgggccccatcgctccgtctctagccattggggaagagcctccccaccaagcctctttctctctcttccagatatcgatgagtgtcaggatcccgacacctgcagccagctctgcgtgaacctggagggtggctacaagtgccagtgtgaggaaggcttccagctggacccccacacgaaggcctgcaaggctgtgggtgagcacgggaaggcggcgggtgggggcggcctcaccccttgcaggcagcagtggtgggggagtttcatcctctgaactttgcacagactcatatcccctgaccgggaggctgtttgctcctgagggctctggcaggggagtctgccgccctgttaggacttgggcttgccagggggatgcctgcatatgtcctagtttttgggaatatccagttaacggaaccctcagccctactggtggaacaggaaccggctttcctttcagggacaacctggggagtgacttcaaggggttaaagaaaaaaaattagctgggcatggtgccacacacctgtggtcccagctactcagaaggctgaggcgggaggattgcttgagggcaggaggattggttgatcctcccacctcagcctccggagtagctgggacctcaggtgcatgccactatgcctggctaattttcttttttctttttttttttttttcgagacggagtctcgctctgttgcccaggctggagtgcagtggcaggatctcggctcactgcaagctccgcctcccgggttcacgccattctcctgcctcagcctccccagtagctgggactacaggagcccgccactgcaccaggccaatttttttgtatttttagtagagacggggtttcactgtgttagccaggatggtctcgatctcctgacttcgtgatccgcccacctcggccttccaaagtgctcggattacaggcgtgagccactgcgcccagccgctaattttcatatttttagtaaaaacagggtttcaccatgttggccaggctagtcttgaactcctgaacccaagtgatcctcctgccttggcctcccaaagtgctgggattacagacaccacacctggctattattattttttagagacagggtgctgctctatcttccagcctgtagtgcagtgcagcctccatcatagctcgctgcagccttgacctcctgggttcacgtgatcgtcccgcctaagcctctggaggagctgggagtactggcatgtgccaccatgcctggttaatttttttttttttttttttgagacagagtctcattctgtcacccaggctggagtgcggtggtgcgatcttggcttactgaaacctccacctcccaggttccagcaattctcctgcctcacccttctgagtagctgggattacaggttccggctaccaaacctggctagtttttgtatgtttagtagagacagggtttcaccatgttggtgaggctggtctcgattctcccgcctcagcctcccaaagtgctgggattacaggcttgagccaccgtgcctggcttttttttttttttttttttttgtggcaataaggtctcattgtcttgcccaggctagccttatgctcctagcctcaagtgatcctcctccctcagcctcccaaagtgctgggattacaggtgggcgccactgtgcctgttcccgttgggaggtcttttccaccctctttttctgggtgcctcctctggctcagccgcaccctgcaggatgacacaaggggatggggaggcactcttggttccatcgacgggtcccctctgaccccctgacctcgctccccggacccccaggctccatcgcctacctcttcttcaccaaccggcacgaggtcaggaagatgacgctggaccggagcgagtacaccagcctcatccccaacctgaggaacgtggtcgctctggacacggaggtggccagcaatagaatctactggtctgacctgtcccagagaatgatctgcaggtgagcgtcgcccctgcctgcagccttggcccgcaggtgagatgagggctcctggcgctgatgcccttctctcctcctgcctcagcacccagcttgacagagcccacggcgtctcttcctatgacaccgtcatcagcagagacatccaggcccccgacgggctggctgtggactggatccacagcaacatctactggaccgactctgtcctgggcactgtctctgttgcggataccaagggcgtgaagaggaaaacgttattcagggagaacggctccaagccaagggccatcgtggtggatcctgttcatgggtgcgtatccacgacgctgagggctgcagagggaatggagggagcaggaaggagcttcaggaactggttagtgggctgggcatggtggctcaaagcacctgtaatcccagcactttgggaggccaaggtgggtggatcatcaagaccagcctgaccaacatggtgaaacctcgtctctactaaaaatacaaaaattagccgggtgtggtggtgggcacctgtaatcccagctgctcgggaggctgaggcaggagaatcacttgaacctgggagatggaggttgcagtgagccaagacagccccactgcactccagcctgggtgacagagtgagactccgtctcaaaaaaaaaaaaaaaaactaaacaaaaaactggttagtggctagacaacaggatggtatcttccaagcccatggctgactcagcagctcctgggtcaagacactgtgacctgtgtcccctggcaggaagcatcgcccctgccacctgcccggtgtactctgtacctgtcaggtgacatctgctacctaagcacgtgagaggtggcatttcacagtttcagtgtggtgctgacaacccgggacgcacactgtccttgcagctacaatcaggaggtgaatgttgggtttccagcagagaacactggagaaggcacacttggtgtctggaagggaaaagcagggaagagagcatcatcagatgcctgcgggtgaaggtgggcccgctatggccagcgtccctttttatttttatttatttatttatttgagatggaatctcgctctgtcgcccagactgtagtgcagtggtgcgatcacggctcactgcaagctccgcctcacaggttcacgccattctcctgcctcagcctcccgagtagctgggactacaggcacccgccaccacgcccggttaattttttgcatttttattagagacggggtttcaccgcgttagccaggatggtctaaatctcctgaccctgtgatccacccgcctcggcctccctaagtgcttggattacaagcgtgagccaccacgcccggccccctttttattttttattttttgagacggagtctcgctctgtcgcccaggctagattgcagtggcgtgatctcggctcactgcagcctccgcctcccaggttcaagtgattctcctgcctcaacctcccaactaattaggattacaagcatgtaccaccatgcctgactaattttttgtatttttagtagagactgggtttcaccatgttggctaggctggtctcgaacccttagcctcaagtaatctgcctgcctcagcctcccaaacagcggggattacaggcatgagccactgtgcccaacccaaccctggatctcttttaaacaagacaatgctcgctgttgccacagaacaatgggtggggtacatgtggcccagtgtgtttggccacataactgccaggccagagggaaagagactctcagactgtctccactcagatacaaatgtgtgtgttgtgtgcgtgtgttctggtctcatatttgtttgttttgagacagggtgtcgctctgtcactgagtctggagtgcagtggcgcaatcagagttcactgcagcctcaaactcttgggctcagttgattctcccacttcagcctcccaagtagctggaactacaggtgaacaccactgtgcccagctaatttattttatttttagtagagatgaggtctcactatgttgcccaggctggtcttgacctcctagcctcaagcaatcctcctgccttggtctcccaaagtgctgggattacacgtgcgagccattgcgcatggcttgtgttcttgtgtttcttcctttttctttcgagatggcgtctcagtctgccacccaggctggagtgcagtggtgtgatcatagctcactgtagcctcaacttcctgggctcaagcaatcctcttgatttcagcctcccgggcctggccagcatggtgaaaccccgtctctactaaaaatacaaaaatgtagccaggcgtggtggtgggcgcctgtaatcccagctacaccagaggctgaggcaggagaatcgcttgagcctggaaggtggaggttgcagcaagccaagatcgtgccactgcactccagcctgggcaacagagacagactctgtctcaaaaaaaaaaaaaaaaaacccaaacaagccacatttggagtttggggttcccagcaggactatttcccaagcctgagcctggctgtttcttccagaattcgttgcacgcattggctgggatcctcccccgccctccagcctcacagctattctctgtcctcccaccagcttcatgtactggactgactggggaactcccgccaagatcaagaaagggggcctgaatggtgtggacatctactcgctggtgactgaaaacattcagtggcccaatggcatcaccctaggtatgttcgcaggacagccgtcccagccagggccgggcacaggctggaggacagacgggggttgccaggtggctctgggacaagcccaagctgctccctgaaggtttccctctttcttttctttgttttttctttttttgagatgaggtcttggtctgtcacccaggctggagtgcactggcgcaatcgtagctcactgcagcctccacctcccaggctcaagtgatcctcctgcctcaccctcctgagtagctgagattacagacacgtgccaccacggcagactaattttattttatttttgggaagagacaaagtcttgttatgttggcctggctggtctcaaactcagggtgcaagcgatcctcccgcctcagccttccaaactgctgggattacaggcgtgggccaccgtacccagcctccttgaagtttttctgacctgcaactcccctacctgcccattggagagggcgtcacaggggaggggttcaggctcacatgtggttggagctgcctctccaggtgcttttctgctaggtccctggcagggggtcttcctgcccggagcagcgtggccaggccctcaggaccctctgggactggcatcagcacgtgacctctccttatccacttgtgtgtctagatctcctcagtggccgcctctactgggttgactccaaacttcactccatctcaagcatcgatgtcaacgggggcaaccggaagaccatcttggaggatgaaaagaggctggcccaccccttctccttggccgtctttgaggtgtggcttacgtacgagatgcaagcacttaggtggcggatagacacagactatagatcactcaagccaagatgaacgcagaaaactggttgtgactaggaggaggtcttagacctgagttatttctattttcttctttctttttttttttttttttgagacagagttttgctctcgtttcccaggctggagggcaatggcatgatctcggctcaccgcaacctccacctcccaggttcaagtgattctcctgtctcaggctccccagtagctgggattacaggcatgcaccaccaccatgcccggctaattttgtatttttagtagagacggagtttctccatgttggtcaggctggtctcgaactcccgacctcaggtgatctgcctgcctcggcctcccaaagtgctgggattacagacttgagccaccgcgcccagctatttctgttttctttctttcttcttcttctttttttttttctaagagacaggatctcactctgtccccaggcaggagtgcagtgctgtgatcatagctcactgcagccttaacctcctgggctcaagtgatcttcccacctcagcctcccaagtagctggaactacaggtgcacaccaccatgcccagctcatttttgtattttttttttttttgagacagtctcgttctgtcaccccggctggagtgcagtggtacaatcttggctcactgcaacctctgcctcccaggttcaagcgattctcctgcctcagcctcctgagtagttgagattacaggcatgtgtgccatcatacctggctgatttttgtatttttttttagagatggggtctcagtatgttgaccaggcttgtcttaaactcccggcctcaagtgatcctcccacttcagtctcccaaagtgctgggattacaggcatgagccactgcggccggtttgttttcttttttttttcgttttttggagacggaatttcacctttgttgcccaggatggagtgcaatggcacgatatcgcctcaccacaacctctgcctcctgggttcaaaccattttcctgcctcagccttcttagtagctgggattacaagcatgtgccaccacgcccggctgattttgtatttttagtagagatggggtttctccatgttggccaggctggtctcgaactcctgacctcaggtcattcgcccacctctgcctcccaaagtgctgggattacaggcgtgagccaccgtgcccggtggtttgtattctttttactgagagtcgtgaaaggcagtgatcctctgtcacatgtgatcttggctctcaggggacatttggcaatttctagagattttttggttgtcacaagtcaatggggaagactgttggcatttagtgggtagaggctggtgacgctgctgaacacccagaacagggaagtagcaggccctagatagagccatcgtggggaaaccctgctctaaggaaatggcgctattttataaccccacgttcctggcatgattaccaacagccaaaagtggagtccccccaagtgtgttcgtccatttgcattgcagtaaaggaatagctgaggccgggtaatttataaagaaaagagatttaaactgggtatggcagtttatgcctataatcccagaactttgggaggctgaggcaggaggatcgcttgagtccaggagtgtgagaccgagaccagcctggccaacatgacgaaactctgtctctacaaaaaatacaaaaagtaggccaggcacggtggttcacgcctgtaatcccagcactttgggaggccgaggcgggcggatcacgaggtcaggagatcgagaccatcctggctaacacggtgaaaccccgtctctactaaaaatacaaaaacaaaattagccgggtgtggtggcaggcgcctgtagtcccagctactcgggaggctgaggcgggagaatggcgtgaacccgggaggcggagcttgcagtgagccaagatcgcgccactgcactccagcctgggtgaccgagttgagactccgtctcaaaaaaaaaaaaaaaaaaaaaaatacaaaaagtagccaggtgtggtggcaggcacctgtaatcctgggttctcgagaccgaggcatgagaattgcctgaccccaggaggtggaggctgcagtgagccaagatcatgccactgcactccagcctgggcgacagagtgggactctgtctcaaaaaacaacaaaaaaaaagttctggaaatggatggtggtgatggtgatacttccacaacagcgtgaatctgcttaaggccaccgaactgtgcactcacaaatagtcgagatggtacattttatgttatgtgtatttcaccacaattaaaaactagttgtgggccaggtgtggtggttcatgcctgtaatcccagcactttgggaggtcagagggaggtggatcatgaggtcagcagttcgagaccagccaggccaacatggtgaaaccccatctctactaaaaatacaaaaattagccaggcgtggtggcacatgcctgtagtcccagctacttgagaggctgaagcaggagaatcgcttgaacctgggaggctaagattgcagtgagccgagatcgtgccactgcactccagcctggacgacagagtgagacttcgtctcaaaaaaaaaaccaaaaaaaaaattagctgtgggtcaggcactgtggctcacgcctgtaatcccagcactttgggagaccgaggtaggtggatggcctgaggtcaggagttcgaatccagcctggccaacatggtgaaagcccgtctctactaaaaatacaaaaaattagtcaggtatgttggcacacctgtaatcccagctactcgggaggctgaagcaagagaatcgtttgaacccaggaggtggacgttgcagtgagccgagattgggccactgtactccagcctgggcaacaaaagtgaaactctgtctgaaacaaacaaacaaacaaacaaacagacaaacaaaaaaactagttgtggagagagggtggcctgtgtctcatcccagtgtttaacgggatttgtcatcttccttgctgcctgtttaggacaaagtattttggacagatatcatcaacgaagccattttcagtgccaaccgcctcacaggttccgatgtcaacttgttggctgaaaacctactgtccccagaggatatggttctcttccacaacctcacccagccaagaggtaagggtgggtcagccccacccccccaaccttgaaacctccttgtggaaactctggaatgttctggaaatttctggaatcttctggtatagctgatgatctcgttcctgccctgactccgcttcttctgccccaggagtgaactggtgtgagaggaccaccctgagcaatggcggctgccagtatctgtgcctccctgccccgcagatcaacccccactcgcccaagtttacctgcgcctgcccggacggcatgctgctggccagggacatgaggagctgcctcacaggtgtggcacacgccttgtttctgcgtcctgtgtcctccaactgccccctcctgagcctctctctgctcatctgtcaaatgggtacctcaaggtcgttgtaaggactcatgagtcgggataaccatacttttcttggatggacacatcagcaccgggcttgacatttacccagttcccctttgatgcctggtttcctctttcccggccccctgaagaggtgatctgatttctgacaggagccctgagggaggaaatggtcccctttgttgacttttctttttctttatttttttcttttgagatttgctgtcacccagcctggaatgcagtggtgccatcttggctcactgctacctctcccactgggttcaagcaattctcctgcctcagcctcccaagtagctgggattacaagcatgcgccaccatgcctggctaagttttgtatttttagtacagacagggtttctccatggtggccaggctggtcttgaactcctgacctcaggtgatcctcccacctctgcctcccgaagtgctacgattacaggcatgagccaccgcgcccatccccctttgttgacttttctcatcctctgagaaagtctcagttgaggccagcacctccctcaagtgaattgaatctcccttttgaacaacaacaaataacaatatgacccagacgtggtggctcacacctgtggtcccagctactcgggaggctgaggtgtgaggattgcttgagcccaggaggtcaaggctacagagagctataatcacaccacttcactccagcctgggggacaaagtgaaaccctgtctgaaaaaaacaaaaaaagaaaaaggaaaaagaaacaatacgatcacaaagtagatattcatagtgtttattttcagtactcttttttttttttttttttttttttgagacggagtcttgctctgttgcccaggctggagtgcagtggcacgatcttggctcactgcagcctctgcctcccaggttcaagcgcttggctcactgcaacctccgcctcctgggttcaagcgcttcttctgcctcagcctccccagtagctgggactataggcacgtcccactacgcccagctaattttttgtattttttagtagagatggggtttcactatgttagccaggatggtctcgatctcctgacctcgtgatctgcctgccttgggctcccaaagtgttgggattatgggcatgagccactgcacctggccttttttttttttttttttgagatggagtttcgctcttgttgcccaggctggagtgcaatggtgtgatctcggctcactgcaacctctgcctcctgggttcaagcaattctcctgcctcagcctcccgagtagctgggattacaggcacctgccaccacgcctggctaatttttgtacttttagtagagacggggtttctccatgttggtcaggctggtctcaaactcctgacctcaggtgatccacccacctcggcctcccaaagttctgggattacagacatgagccaccgcgcctggccgtgtctggccttttttagttatttcttttttttttttttttttttttgagacagagtcttactccgtcgcccaggctggagtgcagcggtgcgatgtctgcgcactgcaagctccgccccctgggttcatgccattctcctgcctcagccttctgagtagctgggactgcaggcgcctgccactacgcccggctacttttttgtatatttagtagagatggagtttcactgtgttagccaggatggtctcgatctcctgactttgtgatccgcccgcctcggcctcccaaagtgctgggattacaggcgtgagccaccatgccaggcttttttttttttttttttttttgagacggagtcttgctctgtcgcccaggctggagtgcagtgccatgatctcagctcactgcaagctccacttcccaggctcacgccattctccagcctcagcctcccaagtagctgagactacaggggcccgccaccacactcggctaatttttttgtatttttagtagagacggggtttcaccatgttagccaggctggtcttgaactcctaacctcaggcgattcacctgcctcggcctcccaaagtgctgggattaaaggtatgagccacctcgcctggtgtgagccacctcgcccagcctgagccacctcacccagcctaagccactgtgcctggcctgattttggactttttaaaaattttattaataattatttttgggtttcttttttttgagacagggtcttactctgtcatccaggccatcctgtctgtctgtcatcccagtgatgggatcataccttgctgcagcctctacctcctgggctcaagcgatcctcccccctcagcctcctgagtagctgggagtacaggtgtgcaccaccacacctggctaatttttttttttttttttgtatatagagatggtattttgccatgttgaccaggctagtcttaaactcctggactcactcaagagatcctcctgccttggcctcccaaggtcatttgagactttcgtcattaggcgcacacctatgagaagggcctgcaggcacgtggcactcagaagacgtttatttattctttcagaggctgaggctgcagtggccacccaggagacatccaccgtcaggctaaaggtcagctccacagccgtaaggacacagcacacaaccacccgacctgttcccgacacctcccggctgcctggggccacccctgggctcaccacggtggagatagtgacaatgtctcaccaaggtaaagactgggccctccctaggcccctcttcacccagagacgggtcccttcagtggccacgaacattttggtcacgagatggagtccaggtgtcgtcctcactcccttgctgaccttctctcacttgggccgtgtgtctctgggccctcagtttccctatctgtaaagtgggtctaataacagttcttgccctctttgcaaggattaaatgggccaaatcatatgaggggccaggtccttcaggctcctggttcccaaagtcagccacgcaccgtgtgggtcccaaaattttatcaaggcacattcgttgcctcagcttcaggcatctgcccaaaaaggccaggactaaggcaaggagagggagggattcctcagtactcagcttttcacagaggctccaaaaggctaaggaatccagtaacgttttaacacaattttacaatttttttttttgagacggagttttgctcttgttgcccaggctggagtgcagtggcacgatctcggctcactgcaacctctggctcccgggttcaagcgattctcctgcctcagtctcccgagtagctgggattacaggcatgcgccaccacgctcggctaattttgtatttttagtacagaaggggcttctctgttggtcaggctggtcgtgaactctcaacctcaggtgagccacccgcctgagcctcccaaagtgctgggattacaggtgtgagccaccacgcctggccttttttttgagacagagtctcgctctcgcccatgctgtactgcagtgacgcagtctgggctcactgtaacctccgcttcccaggttcaagtgattcttctgccgcagcctcccatgtagagtagctgggattacaggcacccgccaccatgcctggctaattcttgcatttttagtagagatggggtttcacagtgttggccaggctggtctcaaacttctgacctcaagtcatctgcctgccttggccctgccaaagtgctgggattatagatgtgagccaccgcgcctggcctacagtttattctttggtggctcacacctgtaatctcagcactttgggaggccaaggtgggagaatggcttgagcccaggagttcaagtccagcctgggcaacatagcaagaccctatctctactacaaaataaataataaataaactaattttttttcttttaaaacccaactattcaacatggcaatgcaatatattaaaaaaattttttttttctttgaaacggagtctctcactgtcacccgggctggagtgcagtgtcgccatcttggctcactgcaacctccgcctcccaggtccaagtgattctcctgcttcagcctcccgagtagctgggattacaggcacccaccaccatacccagctaatatttttgtatttttagtagagatggggtttcactatgttgggcaggctggtctggaactcctgacctcgtgatctgcccgaggatcggcggcctcccaaagtgctggggattgcaggcatgagccaccgtgcccagccaaaacttttttatttttatttttttgggacacggtctcactgtgtaccccagactggagtgatagagtgctgtcatggctcactgcagcctcaacctccctgggctcaggtgatcttcctgcttcagtctcccaggtagctgggactacaggcatgagccaccacacccagctaatttttgaatttttttgtagagacagggtttcaccttgtggcccagacttgtctctaactccagggctcaagcgatctgcccaccttggcctcccaaagtgctgagattaatgcaatttaaaaaattttttggccaggcctggtggctcatgcctgtattcacaacaccttgggaggcaaaggtgggcagatcacttgaggtcaggagttcgagactagcctggccaacatggtgaaaccccctgtctactaaaaaaatacaaaaattacctgggcacagtggtgggtgcctgtaatcccagctacttgggatgctgagggtggagaattgcttgaacctgggaggcagaagttgcagtaagccaagatcatgccactggactccagcctcagtgacagagcaaaactctgtctccaaaaaaattgttttttttttttttttttcaaatcatcacactacagccaaggcctggccacttacttttgtaaataaagttttattggagccagtggaccagtgaggccgaatcttgcaggtgtaagatcacagtctatccttgaaaattttgatattttgttcattgggtggtttttcattaatttaaattttaaaaaataacatattaaaggctggtgtggaggtgcacgcctgcagtcctagctactcccagaggctgaggcgggagacttgcttgagcccaagagttgaagtccagcctgggcaacatagcgagacccccatctctaaaaataaaaataatgcattagaatattattggattcctgggcagggcacagtggctcacacctgtaatcccagcactttgggaggctgaggtgggtggatcacctgaggtcaggagtttgagaccagcctggccaacatggtgaaaccccgtctctactaaaaatacaaaaattagccaggcgtggtggcaggtgcctgtaatcccagctactcgggaggctgaagcacgagaatcgcttgaatccaggaggcggaggttgcagtgagctgagattgcgccattgcactccagcctggaggacaagagtgaaactccattcccctctgcaaagaaaaggaatattatcagattcctaagctttttggctccccctttagtttgggggctggggtggtgagtgtctgacctggcctcactgtcctccctggatgtgatgagacccaggtgtgggtcaggatgtcattcgtttgtccaccagagggcgcccaaactgctttgagctgctgggaaatggtgctcctagacttttagcaaacaaacaaaaaaaaatggcacatcggcaaatttcagaccattctttttttttttttttttggttccagagtagctgaaatctttgttcagttacaagcaggataaaatggaaactgcctgggagaggctgagaaaccttcttgcttgggggaggtggggcactgctagaattaatcgcttcacagaccagcccatccaggactcctcaaatttggcaaaaaagccattcattcattcattcatttatgtagagacgagggggatctggctatattgcctagattggtctcaaattcctggcctcaagtgatcctcctgccttggtctactaatgtgctgcgattacaggcatgagccaccgtgcctagctctagtggacttgaaatgttgccttgcccagggcccttatgttgaatggcccaggtccacttgtatggttctgtaccaaggttaaccccatcccataatgcctgggacagttgatgcaggacaatcagcttctgtgccattcaacctcaggactgagcatgctgggcattgtggggtccgaaggtggctcccctgtccccttcaaaataccctctttttcttttcttcttttttttttttttttttttttgagacgaagtcttgctctgttgccccagctagagtgcagtggtgcgatctcagctccccgcaacctctgcttcccgggttcaggcgattctcctgcctcagcctcctgagtagctgggattacaggtgcccaccgccacagctggctaatttttgtatttttagtagagacagggtttcaccgtgttggccaggctggtcttgaactcctgacctcaggcaacctgcccacctcagcctcccaaagtgctgggattacaggtttgagccactgggcctggccttttttttttttttttgagagggagtctcactctgttgcccaggctggagtgcaatggcgcgatcttgactcactgcaactccatttcccgggttcaagtgattctcctccctcagcctcccaagtagctgggattacaggtgcatgccaccacggccagctaattttgtatttttagtagagacagggtttcactatgttgatcatgctggtctcaaactcctgaccttaggtgatctgcccgccttagcctcccaaagtgttgggattacaggtgtgagccaccgcgcccagaccaaaatatgctcattttaataaaatgcacaagtaggttgacaagaatttcacctgcaaccttgtcaaccacctagaataaaagcctctgcagccctcccctaaagactcatcaatgtgaggctcaagaaccttcttaggctgggctcggtggctcatttctgtaatccctgcactttggaaggctgaggcaggaggatctcttgaggccaggagttcaagacaagcctgggcaacatagccagacctctgtttctatcccccacaaaaagaaccttcttaaaccggaattgagtcctacaacctcgataactcacaaataagcccgtgtggcctctcacagacttgggaagttctccaagtgtccagggagatgtgccaggcgctttcctgccgtgaccaccgtcctctgcctgctccatttcttggtggccttcctttagacctgggcctcactcttgcttctctcctgcagctctgggcgacgttgctggcagaggaaatgagaagaagcccagtagcgtgagggctctgtccattgtcctccccatcggtaagcgcgggccggtcccccagcgtcccccaggtcacagcctcccgctatgtgacctcgtgcctggctggttgggcctgttcactttttctcctggacagggaacagccccactggtgtcctttatcacccccacggcctctcctggcttggggctgacagtgacaagatcagacagctaaggggtcagatggaggatgtggagctgggtcccgtgctgtggaatagcctcaccgagatttgagtgccttctggggaactggttcccttgcagggggctgtgtggagaggcgcgctctccctgcctcacccatgctcatcctaactcggttaccatcacatctcttttttctttttttcttaaattttaagaaaaaagaaatttaatttttttgagagacagagtcttgctctgtcacccaggctggagtgcagtggcaccatcatgcctcgctgcagcctcaatgtctgggctcaagcgatcctcccacctcagcctcctgagtagctggtgcaagccactataccccacttcctatttcttaaaaagtcacagccctgtgtgtggctaatcctggacagaaatctagaagaagtcagctacttctggggcgtggctcacccagtgggcttcaggttagatatttcttatacttatgaggctgggtgtggtggcttatgcctgtaatcccagcactttgggaggctgaagtgggtggattgcttgggctcaggagttcgagaccaacctgggcaacatggcgaaaccctgtttctagaaaaggtacaaaaattagctgggcaggtggcacgtgcctgtggtaccagctacttgagggcctgaggcaggaggatcgcttgaacctgggaggtcgaggttgcagtgaactgagatcatgtcactgcactccagcctggtgacagagcaagaccccgtctcaaaaaaaaaaaaagaaagaaaaaaattcttatgcatagatttgcctcttttctgtttgtttgttttgagatggagtctcgctctgtcgcccaggctggagtacagtggctcaacctcggctcactgcaacctctgcctcccgggttcaagcaattctcctgcctcagcctcctgagtagctgggactacaggcgcccgccaccatgcccagctaatttttgtatttttagtagagactgactgggtttcatcatgttggccaggctggtctcgaactcttgacctcatgatccgcccgcctcagcctcccaaaatgctgggattacaggcgtgagccaccaggcccaggccgcaaggcgatctctaaacaaacataaaagaccaggagtcaaggttatggtacgatgcccgtgttttcactccagccacggagctgggtctctggtctcgggggcagctgtgtgacagagcgtgcctctccctacagtgctcctcgtcttcctttgcctgggggtcttccttctatggaagaactggcggcttaagaacatcaacagcatcaactttgacaaccccgtctatcagaagaccacagaggatgaggtccacatttgccacaaccaggacggctacagctacccctcggtgagtgaccctctctagaaagccagagcccatggcggccccctcccagctggaggcatatgatcctcaagggaccaggccgaggcttccccagccctccagatcgaggacagcattaggtgaatgcttctgtgcgctcattcagaatgtcagcggacaatggccttggtggtgtagaggaatgttggataagcaaatagagagctccatcagatggtgacagggcaaagaaagtcaaaaggagttcagaggccgggcgcggtggctcatgcctgtaatcccaggactttgggaggccgaggctggcggatcacctgaagtcaggagtttgagaccagcttggccatcatgacaaaaccccgtctctattaaaaatacaaaaaattagccaggcgtgggagtgggcgcctgtaatcccagctactcgggaggccgaggtagaaaaatcgcttgaacctaggaggcagaggttgcagtgagccgagatcgcgccactgcattccagcccgggaggcaagagcaaaactccatctcaaaaaaaaaaaaaaaaggagttcagaggcccggcatggtggttcacacatgtgatcccagaacttggggaggttgaggcaggagaatcacctgagctcagagttcaagaccagcctgggcagcacagcaagaccccatctctgcaaaaaataaaaatttagcccagtgtggtgatgagcgcctagttccagctactagggaggctaaggcaggaggattgcttgaggctaaggtaggagattgagactgcagtgacttgtgattgcgtcactgcgctccagcctgggtgacagagcaagcccttgtctcttaaaaaaaaaaaaaaattcaaagaagggtttccagagggccaggagggaggaagggagaggaggtgttttatttttttgcttttattttttattttgagacagagtctctctctgtcacccaggttggagtgcagtgctgtgatcttggctcactgcaacttctgcctcctgggttcaagcaattcttatgcctcagcctcagcctcctgagtagctgggattacaacactatgcccgggtaatttttgtatttttagtagagacgaggtttcgccatgttgcccagactggtctcgaactcctgacctcaagtgatccacccgccttggcctccccacgtgctgggattgcaggcgtgagccactgcgcccgccttgatctttacacaaggggtttagggtaggtagccttctctgaaccaggagaacagcctgtgcgaaggccctgaggctggaccgtgcctgttgggtttgaggccgttgtagctggagcaaacagagagaggggtaaaaaggcaggaggctaccaggcaggttgtgcagagccttgtgggccactggggaggactttggcttttgccctgagagcggtgggaagtgactgaatccggtactcaccgtctccctctggcggctcctgggggaacatgcttggggatcaggctgggggaggctgccaggcccaggaggtgagaagtaggtggcctccagccgtgtttcctgaatgctggactgatagtttccgctgtttaccatttgttggcagagacagatggtcagtctggaggatgacgtggcgtgaacatctgcctggagtcccgtccctgcccagaacccttcctgagacctcgccggccttgttttattcaaagacagagaagaccaaagcattgcctgccagagctttgttttatatatttattcatctgggaggcagaacaggcttcggacagtgcccatgcaatggcttgggttgggattttggtttcttcctttcctcgtgaaggataagagaaacaggcccggggggaccaggatgacacctccatttctctccaggaagttttgagtttctctccaccgtgacacaatcctcaaacatggaagatgaaaggggaggggatgtcaggcccagagaagcaagtggctttcaacacacaacagcagatggcaccaacgggaccccctggccctgcctcatccaccaatctctaagccaaacccctaaactcaggagtcaacgtgtttacctcttctatgcaagccttgctagacagccaggttagcctttgccctgtcacccccgaatcatgacccacccagtgtctttcgaggtgggtttgtaccttccttaagccaggaaagggattcatggcgtcggaaatgatctggctgaatccgtggtggcaccgagaccaaactcattcaccaaatgatgccacttcccagaggcagagcctgagtcactggtcacccttaatatttattaagtgcctgagacacccggttaccttggccgtgaggacacgtggcctgcacccaggtgtggctgtcaggacaccagcctggtgcccatcctcccgacccctacccacttccattcccgtggtctccttgcactttctcagttcagagttgtacactgtgtacatttggcatttgtgttattattttgcactgttttctgtcgtgtgtgttgggatgggatcccaggccagggaaagcccgtgtcaatgaatgccggggacagagaggggcaggttgaccgggacttcaaagccgtgatcgtgaatatcgagaactgccattgtcgtctttatgtccgcccacctagtgcttccacttctatgcaaatgcctccaagccattcacttccccaatcttgtcgttgatgggtatgtgtttaaaacatgcacggtgaggccgggcgcagtggctcacgcctgtaatcccagcactttgggaggccgaggcgggtggatcatgaggtcaggagatcgagaccatcctggctaacacgtgaaaccccgtctctactaaaaatacaaaaaattagccgggcgtggtggcgggcacctgtagtcccagctactcgggaggctgaggcaggagaatggtgtgaacccgggaagcggagcttgcagtgagccgagattgcgccactgcagtccgcagtctggcctgggcgacagagcgagactccgtctcaaaaaaaaaaaacaaaaaaaaaccatgcatggtgcatcagcagcccatggcctctggccaggcatggcgaggctgaggtgggaggatggtttgagctcaggcatttgaggctgtcgtgagctatgattatgccactgctttccagcctgggcaacatagtaagaccccatctcttaaaaaatgaatttggccagacacaggtgcctcacgcctgtaatcccagcactttgggaggctgagctggatcacttgagttcaggagttggagaccaggcctgagcaacaaagcgagatcccatctctacaaaaaccaaaaagttaaaaatcagctgggtacggtggcacgtgcctgtgatcccagctacttgggaggctgaggcaggaggatcgcctgagcccaggaggtggaggttgcagtgagccatgatcgagccactgcactccagcctgggcaacagatgaagaccctatttcagaaatacaactataaaaaaataaataaatcctccagtctggatcgtttgacgggacttcaggttctttctgaaatcgccgtgttactgttgcactgatgtccggagagacagtgacagcctccgtcagactcccgcgtgaagatgtcacaagggattggcaattgtccccagggacaaaacactgtgtcccccccagtgcagggaaccgtgataagcctttctggtttcggagcacgtaaatgcgtccctgtacagatagtggggattttttgttatgtttgcactttgtatattggttgaaactgttatcacttatatatatatatatacacacatatatataaaatctatttatttttgcaaaccctggttgctgtatttgttcagtgactattctcggggccctgtgtagggggttattgcctctgaaatgcctcttctttatgtacaaagattatttgcacgaactggactgtgtgcaacgctttttgggagaatgatgtccccgttgtatgtatgagtggcttctgggagatgggtgtcactttttaaaccactgtatagaaggtttttgtagcctgaatgtcttactgtgatcaattaaatttcttaaatgaaccaatttgtctaaactcgatgcacgttcttctgttcgcgcgcttctttttgtttttttttttttcctgagatggagcctggctctgtcacccctggctggagtgcagtggcatgatctcggcttactgcaagctccgcctcccaggttcaagcaattctcctgcctcagcctccctagtagctaggattacaggtgagtgccaccacgcctggccaattttttttttttttttttttttgagacagagtctcgctctgtcacccaggctggagtgcagtggtgtgatctcggctcactgcaagctctgcctcccaggttaatgccattctcctgtctcagcctcctgagtagctggggccacaggcgcctgccaccacgcccggctaatttttttttgtacttcttttagtacagacggggtttcaccatgttagccaggatggtctcgatctcctgaccttgtgatccacctgcttcggcctcccaaagtgctgagattacaggcgtgagccaccgcgggtggccaacgctaatttttttgtttttttagatggagtcttgctctgtcgcccaggctggagtgcagtggcgtgatctctgcctactgcaagctccgcctcccgggttcatgccattctcctgcctcagcctcctgagtaactgggactacaggcacccgccaccacgcccggctaattttttgtatttttagtagagacagggtttcaccgtgttagccaggatggtcttgatctcctgaccttgtgatccacccgtctcggcctcccaaagtgctgggattagaggtgtgagccaccacacctggcctagcctggctaatttttgtatttttggtagagacggggtttcaccatgttggtcaggctggtcttgaacttctgacctcaggtaatctgcctgcctcagtctcccaaagtgctgggattacaggtgtgagccaccgcgcctggcctcacttccttctgtcatctgtttgtggattggactccccaggagaaggacccagaaggggaagactcccagaactccgggcaagatgcaatctccgtgggctgccacagtgcctggcaggtgctgtgatggctgagctggtgattgtgttctctgctgtcgcttctctgagttggagattttgtcaagtcccctgctcatccattcatacactcgacaaatatctgttgagtgctaagtgcgaaccatgctctgccgtaggcttgtgggacactacaggggatataagaaatgaaagccgggtgtggtggctcacacctgtaatcctagcagtttgggaggccgaggcgggcagatcatgaggtcaggagatcgagaccatcctagctaacacagtgaaaccccatctctactaaaaatacaaaaaattagccaggcgtggtggtgggcgcctgtagtcccagctgcttgggaggctgaggcaggagaatagcgtgaacctgggagttggagcttgcagtgagccgagatcgcaccactgcactctagcctgggcaacagagcaagactccatctacaaaaaaaaaaaaaagaaatgaagtcttgatacggtggctcatgcctgtaatcccagcactttgggaggccaaggcaggcggatcacgagctcaggagatcgagaccatcctggccaacgtggcgaaacccagtctctactaaagatacaaaaaattagccaggcatggtggcgggcgcctgtagtcccagctacttgggaggctgaggcaggagaatggcatgaacccaggaggcagagcttgcagtgagctgagatcgcgccactgcactccagcctgggcgacagagcgagactctgtctcaaaaaaaaaacaaaaaagaaatgaaaatctccctgtctgtccttaaggacctgacatcattttattttatttatttttttgagacaaggtcttgctttattgcccaggctggagtgcagtggcacaatcttggctcactgcaacctccacctcccgggttcaagcgattctcctgcctcagcctcctgtgttgctgggatcacaggcgcgtacccggctaatttttatattttcagtagagatggggttttgccatgttggccaggctattcttgaactcttgacctcaagtcgtctaccgcctcggcctcccaaaatgctaggattacaggtgtgagccaccgcaccaagccaaatgttacttcattagagaaactccccctgaagaaaacttccttcctgccagttgcttttctgtccccatactctgtttaatattcttctagaatattcttctaaaatgtagcaattttttgtatctattctaaaaatggaggccaaggaaggcagatcacttgaggtcaggagtttgagactagcctggccaacatggtgaaaccatgtctctactaaaaagggtaagattttgaggctgcagtgagctatgacggcaccattgcactccaggctgggcaacagagcgagacaccatctcaataaaaaaaaaaaaaagcagggtgcggtggctcaagcctgtaatcccaacactttgggaggctgaggcaggcggatcatgaggtcaggagttcgagaccagcctgcccaacatagtgaaaccctgtctactaaaaatacaaaaaaattagccgggtatgctggcaggtgactgcaccataaaaaatgttcaagattaaacagggggacggtgaggtaacccagaaataagcaacagcagaaagcgccaccaccacaaaaccaggagaggaagatgtggtttctggagcctgggagctggtgagagccagaaactcataggagggaaagaagtgctgcagacatggtccccagcagagcgaggcggggaagagcccagcctgtcccccgctccaggctctatctcccaccagtgcctcccacgggctgagcccaacagggacaggctgatgaagcccaggcaatggtgccttactgggtggatcgaaggagggacagggttggcccaggggtgacacgacactggggtggttaggtccacaaacgtggctcatgcctgtaatcccagtaccttgggaagctgaggcaggaggattgcttgagcccaggagttcaagagcagtctgggcaacatagcaagaccccatctctaaaaaacgtttttaaatttctgggctcagtggctcatgcctataatcccagcactctgggaggccgaggcaggcggatcacctgaggtcaggagttcaaaaccagcctagccaaaatggcaaaaccccgcctctactaaaaatacaaaaattagttgggtgtggtggcgcatgcctgtaatcccagctacttgggaggctgaggcaggagaatcgcttgaactcgggaggccgaggttgcactgagccaagatcgcaccactgcactccagcctgacagagcgagacactgcgtcaaaaaaacagacaacaacaacagaaaaagttttaaaattaccagccggatgcgatggcgcacacctgtagtcccagatacttggaggctgaggtgggaagatctcttgagtccagcactttgggaggccaaggtgggcggatcacctgaggttgggggtttgagaccagcctgaccaacatggagaaaccccatctctactaaaaatacaaaattagctgggtgtggcggcgcatgcctgtaatcccagctacgcgggaggctgaggtaggagaattgcttgaacctgggaggaagaggttgcggtgagccgagattgcaccattgcactccagcctgggaaactctgtctcaaaaaaacaaaacaaaacacaacaaaaacccaaaaagagcagactgaccaggccgtctgggttcataacctggctctgccactgactcgctgggtgacaggcacctcagagcctcagtttccccacctgacaatggagacaaagctaatctccccctccccaggggctctggaagtggggcaggatggggctgcgcaggcgctcggagacaaaggcagggcctgtcatctttcctgcgtccacggggtggcacttccttcctgccttccgccttttgttttgggacgcttccaaaacgcccctgggagggaaaactgagcagcccacacaggaagcgtcctggagcctgcacacaggcgctcgataattgctcgattgacgaaattggtgctcaaccaagtggcaaacaggataagcgggctcagatggccaggaaaacgggagggcctgggaggtggcggctcgagggtgctgagactgagacgggagggtgggcaggaccggggtgcatccccaggcaggggtggggactgggagcacagcatgggtggggcatggcccagaggagaggccagaggtgatggaaggttctggtattcggccttggctgctgcattgggagcttgtatcagagctttgagggtgacacagacatgcagacattcagtttcctgacaatccatcgttctgccccgatggtcgccaaagggagggagggttgacagccacccattttacagagagaaataggaggctcgggtcactgtggctggattctgatcctcgccggttccagttctctggctcagaacggggccctggtaaaatgcgctgctggctccctggtctataggctcagcacccacccacccacccacttgtcctgcagggctgggggcagcctgcagcttggggaacgccacccctgcaggctggtggtcctgtcctgtctccgcaggctcaacagctctggccaggacagggtggaaggtgggaggaatttgtcccactcccagcaagtctgacacccacaactagtgtcccctgctgtccctccccttctcctgtccccaggccgttccccttccagcagcccgaggcatcccagaccacagctgtctgcagtgagtcagcctggagcctctgggctgagccgcggctgccagagggaggtggggagaggggtgcaggctgccctgccctgcagctggccctggcctaatcccctccccgctccccagtctggggtcagcaccctcctcccttgcaggcagtgattttccgtgatgatgaaggaataaaaaagccacggagggttctgagtgggagtccctggtccccatcaccccactgagcatggccgctggggtttcctggcaactttctgctccatccggagccgtccctcccctgggctgggctgctctggggctgttcctgggatggggagcggggagcttgggagtaaatagtgacatcagccacctagacaggcggggccactgtgtcaaggggccatgtcaggttcccttctcccagagctggggcttgtcttggaattggaaaatcctccccacattgccctgtggactgcaggcctggcgtgatcaaggacccctgccctcctgccatcccccttggtctcctccatgccagccttgctgtttcccctgcctggctcacagtctccacacctttatcccctgggggctcaagtctgggacaaatgacacctcctccctgggcctcccacagagccacagagcgtcaccccccaccaccccacagcgttcatttgtgggtcaggattaagagcacaagctctgaacacactcagctcagattaaagccctggctctgccacccgtctacagaaaaactgacacagtggcctccactggggtgtggctccatgaaggagggtctggcgggccacaggcttacagtactcatttctcttttcttttctttcttccttcatttcctttctctctctccttccttcctccctccctcccttccttccttctttcttcctttgtttctctctcttttttttttgagacggagtctcgctctgtcgcccaggctggagtgtagtggtgcgatctcagctcaaggcaaccaccacctcctgggttcaaacgattctcttagcctcctgagtagctgggattacaagcacgcaccaccacgcctggctagtttttgtgtgtttagtaaagatagggtttcaccatgttggctgagctggtcttgaactcctgacctcaagcaatctgccccacctcggcctccagaagcgttgggattacaggcgtgagccaccacaccggcttctcctctccctctcctctttctccttttccttcctttcttccttccttcccttccccttccttccttccttccttcattctttcttccccccgctcccccctctttttttttgagacagggtcttgctttgtcacccaggctggagcgcagtggtgcaatcctagctcactgcagccttgacctcccagggttgaggcaatcctcccacctcagcctcccaagtagccaggactacgagtgcacgccaccatgcctggctaattttttagtttttttttgtagagacaggagtctcactgtgttgtccaggctggtcttgaactcctcggttcaagcaatcttcctgccttggcctcctaaagtgctgggattacaggcgtgagccacagcacctggcccagtccacatttctaagtaaatatgggaggccagccaggtgcagtggctgtaatcccagcactttgggaggccgaggtgggtggatcacctgaggtcaggagttccagaccagtctggccaacatggtgaaatcccgtctttactaaaaatacaaaaattagccgggcgtggtggctcatgcctgtaatcccagcactttgggaggctgaggcggcagatcacaaggtcaggagatcgagaccatcctggctaatacggtgaaacccgtctctattaaaaatacaaaaaattagccgggcatggtggcaggagcctgtagtcccagctactcaggaggctgaggcaggagaatggtgtaaacccgggaggcagagcttgcagtgagccgagatggtgccactgcactccagcccaggtgagagtgtgagactccgtctcaaaaaaacaaaataaaacaaaaaatacaaaaattagcggggcgtgatggcaggtgcctgtagtcccagctacttaggaggctgagggaagagaatcacttgaacccgggaagcagaagttgcagtgagccgcgatcgcatcactgcactgcagcccgggtgacagagcaagactccatctcaaaaaaaaaaaaaaaaaaaagggaggccactggaggttgtggggccaccatgagagtcgacaagggtggcccacattcctagatgagttgcctggaggctgtagtcccagacctcaggggggtcccctccggaacccaaacactgtcatgccaatgacacaaaactggtcttcctggcctctcccatcctgtccagcctagaagggagactgagacttcagatccgacaaccatgggttcaaatccagccttgaaaacttcccatgcacaggcaagccccattgcgatctgtttcttttcttttcctttctttctttttttttttttttttttttttgagacagtcttgctctgtcacccaggctagagtgcagtggcgtgatctcggctcactgcaacctccgcctcacaggttcaagcgattctcctgcctcagcctcccaagtagctgggattacaggtgcccatcaccgtgcccagctaatttttgtatttttagtagagacgggagtttcaccatcttggccaggctggtctcgaactcctgacctcgtgatctgcttgcctcagcctgccaaagtgctgggattacaggggtgagccactgtgcccggctgcgatctgtttcttttaaccgtaaactgggaagaactttgaccacctcttagtccagaactatcagggaaggggcactgaatgccaggctggaggagggttgcatgaaaggcttgaccccagctactcaggaggctgaggcagaaggactgtttgacctgatgaattcgaggctgcagtgaggctgtgatcgcgccactgcactccagcctaggcaatagagtgagaccctgtctctaaaaaaaaaaaaaaaaaaatggctcagccatcccaagctgctcccagctgcctgcccctctaggtggcccccactactggcctgaggatgcactttatccccgccagggcctgaggagtcctggggaaaggtacccaagtctagtcctcaggagaagccgcccagggagcactagggcccgaggaagggttcaacctcgagactccatagcccctgggctcccgtccccagaaacaccagttacgagcagggggctggccatggtgtgaattcatgacctgcacacctcttgccgtaatgactaagtggctagagcttcaggctgccccactgctgccctctggagctcgagcaggtgcaggtgtgggtgcccaccctggcttggcctcttctcacctgggtggcttcggacacagggtggactcctcaaaggggctgcttcccatctgagaagccagcataatcctccaggggctactgatatacacacgctgcccctggtcctgagttagatcaccctgcccctagggagggcttgggggcttcactgctgaagttcagactccagggtggtccttgtcctgtgtgcctcagtttccccatctgtaaaatggatggtcctggggctgagcctcagtgctgcagggactagtgtggaaccctgtgtcctggtgcctgaaaccttactcccacctcagcagggctgggctgagccatcagcaagcctctggccggcctccatcattcaggaaagagccggtggctgaaggcacagctctcagagggagaacaaacgggggcgggggtgggatgggggcggggccggaggccaccggcctcaggctgtcctgggcatccagccagtgctgggcagtgagtcaggggccaggcatgtggagtggggcctctcccagccccggagatcaggcacctcccggaacccgcctgctgggcccccaccaggccgcgttcctctcccactcgctctccccatagaggggaccctggacctgcctgggggggacgaggatggggatgtggctggtgggcacagggcctctctgagccccggcacaggccgcctgatgggaccgtctcttccttggggaaactgaggcccaggttgctggggtggaggggatgtggagtgacagggcagggcaatggctcctcggccccctccgggaacaaagccaggtcattcctgtggggagggagcgccaaccccagggttggggggggcacgggccctgggtcaggggtacagataagcctgggctcccagaacccttgtcacagcggcacccctgccccatgcctgctttctctccagggcactcagagctgcagtttgcaggacgagagggagacgtgcccaatccccccatcccaggacgctcagccgtgcgtgggctgggcccactccactcccggcgcccacagttgccccagtgaaccggccagtggaggcatcctgtcccgtgtgcgggaaaggaatgaccgccaaggtgacagcagcgcttagccaaccctggcgctgacacctgacttgcaaactgctccctgcctgaggcttcaaggcaggcgagaggctttgtgtgtgtgacttcctccccgaagggacactggcaacagctggagacatttcctgttgttaaggctgagggggagctgctggcatttggtgggtggaggccagggatgacgttaactgttctactacgcccaggacagcccccaacacacacaacagcctggcccaatgtcacgagagctgaggtggaacagccctgttctgcttcaggtcttcaggtctttgggggtcaaggatgcaaatagaggactctgctcccaattcagctcacataaaagaaccggccgggcgctgtcgctcatgcctataatcccagcgctttgggaggccgaagtgggaggatcgcttgagcccaggagtttgagaccagcctgggtaacatagcaagatcccatttctacgaaagtacaaaaattacctgggcacggtggcatgcacctgtagtcccagcggcttgggaggctgaggtgggaagtttgcttgagcccaggaggttgaggctgcagtgagccgagatcatgccagtgcactccagcctcggcgacagagttagactctatctcaaaaaagaaaaaagagagaaaacccaccaacttggaaaattaaaacagccccaagggcatctaggaacagttaactgcacatctaaacccaggcccgccgttcttagaagctctgcaagctgcatggactgactcctgacatttcagggctagactcaaaaatccctttaaaaaaattttgtttctgagacggagtttcactcttgtccaagctggagtggaatggcacgatctcggctcactgcaacctccacctcctgggttcaagtaagtctcctgccacagcctccagagtagctgggattacaggtgcccgccaccatgcctggctaacttgtatttttagtagagatggggtttcaccatgttggccagactggtcttgaactcctgatgtcaggtgacccacctgccttggcctcccaatgttgctggtactacagacatgagccaccatgcctggtctcttcttttttttttttttttttttttttgagacagtctcgctctgtcgcccaggctggagtgcagtggctcgatctcggctcactgcgaactctgccgcctgcgttcacgccattctcctgcctcactcagcctcctgagtagctgggactacaggtgcccaccatcatgcccggctaactttttgtatttttagtagagatggggtttcaccgtgttagcctggtctcgatctccagaccttgtgatccgcccacctcggcctccctaagtgttgggattacaggcatgagccaccgcgcccggccccctttttttttgttgttgacacagggtctcacttcgtcccctaggctggagtgatgtggcgcagtcgtagctcaccacggcaacttcctgggctcaagcgatcctcccacttcaggccccgaagtagcgggggatacaggcaggcaccaccatgcccggctaatttatttttttcttagtagaggtggggtttcgcaatgttgcccaggctggtctcaaattcctagactcaagtgatttgcccgcctaggcctcccaaagtgctgggattacaggcatgagccacaacagctggcccctttctaagacagggtctcattctgtcacccaggctggagtgcagtgacactaccatggctcactgtagcctcaacctcccaggctcaagtgatcctcctgcctcagccgcccgagtagctgggactacaggcaagcaccaccagacgctgttaaagcttactgttccctctgcctaaaaacgcccctctctgattaagaactgcacttaagttcagtcgtggaaagggacatgatgaaacccaagcccaagttcacggaactaacacattcaagggcaaagctgtatctggggacaactgtcagtgggacccaacctccctctctcctccctcaggcaggcaggtggtgtgcacgcctcctttccttagcggtacccaaaacaccgaggatgggagagtgatgaacacattgattggccggccctggactggagtacatgttcagttagggtttattttggtatctgtcatagaaaacccccaaaaccagcagcttacacaaggtagaagttgagattggttctccccttctctctcccatttaaataagtttgtgctgatatctggctctgccatcatcagggaaccaggctcctgtcatccctaaaggacggcactcgtctgtacacgtggcagtatggctgccagggctccagccatcacacccacattccaggaaataggaagggggaagaaagggtgtatttgtcttttaagaatccttctagaagtgtcatgtaacatttccacatacatttcactggcc

SEQ ID NO: 58 - DNA, 68468 bp, Homo sapiens
ggccagtgaaatgtatgtggaaatgttacatgacacttctagaaggattcttaaaagacaaatacaccctttcttcccccttcctatttcctggaatgtgggtgtgatggctggagccctggcagccatactgccacgtgtacagacgagtgccgtcctttagggatgacaggagcctggttccctgatgatggcagagccagatatcagcacaaacttatttaaatgggagagagaaggggagaaccaatctcaacttctaccttgtgtaagctgctggttttgggggttttctatgacagataccaaaataaaccctaactgaacatgtactccagtccagggccggccaatcaatgtgttcatcactctcccatcctcggtgttttgggtaccgctaaggaaaggaggcgtgcacaccacctgcctgcctgagggaggagagagggaggttgggtcccactgacagttgtccccagatacagctttgcccttgaatgtgttagttccgtgaacttgggcttgggtttcatcatgtccctttccacgactgaacttaagtgcagttcttaatcagagaggggcgtttttaggcagagggaacagtaagctttaacagcgtctggtggtgcttgcctgtagtcccagctactcgggcggctgaggcaggaggatcacttgagcctgggaggttgaggctacagtgagccatggtagtgtcactgcactccagcctgggtgacagaatgagaccctgtcttagaaaggggccagctgttgtggctcatgcctgtaatcccagcactttgggaggcctaggcgggcaaatcacttgagtctaggaatttgagaccagcctgggcaacattgcgaaaccccacctctactaagaaaaaaataaattagccgggcatggtggtgcctgcctgtatcccccgctacttcggggcctgaagtgggaggatcgcttgagcccaggaagttgccgtggtgagctacgactgcgccacatcactccagcctaggggacgaagtgagaccctgtgtcaacaacaaaaaaaaagggggccgggcgcggtggctcatgcctgtaatcccaacacttagggaggccgaggtgggcggatcacaaggtctggagatcgagaccaggctaacacggtgaaaccccatctctactaaaaatacaaaaagttagccgggcatgatggtgggcacctgtagtcccagctactcaggaggctgagtgaggcaggagaatggcgtgaacgcaggcggcagagttcgcagtgagccgagatcgagccactgcactccagcctgggcgacagagcgagactgtctcaaaaaaaaaaaaaaaaaaaaaaaagaagagaccaggcatggtggctcatgtctgtagtaccagcaacattgggaggccaaggcaggtgggtcacctgacatcaggagttcaagaccagtctggccaacatggtgaaaccccatctctactaaaaatacaagttagccaggcatggtggcgggcacctgtaatcccagctactctggaggctgtggcaggagacttacttgaacccaggaggtggaggttgcagtgagccgagatcgtgccattccactccagcttggacaagagtgaaactccgtctcagaaacaaaatttttttaaagggatttttgagtctagccctgaaatgtcaggagtcagtccatgcagcttgcagagcttctaagaacggcgggcctgggtttagatgtgcagttaactgttcctagatgcccttggggctgttttaattttccaagttggtgggttttctctcttttttcttttttgagatagagtctaactctgtcgccgaggctggagtgcactggcatgatctcggctcactgcagcctcaacctcctgggctcaagcaaacttcccacctcagcctcccaagccgctgggactacaggtgcatgccaccgtgcccaggtaatttttgtactttcgtagaaatgggatcttgctatgttacccaggctggtctcaaactcctgggctcaagcgatcctcccacttcggcctcccaaagcgctgggattataggcatgagcgacagcgcccggccggttcttttatgtgagctgaattgggagcagagtcctctatttgcatccttgacccccaaagacctgaagacctgaagcagaacagggctgttccacctcagctctcgtgacattgggccaggctgttgtgtgtgttgggggctgtcctgggcgtagtagaacagttaacgtcatccctggcctccacccaccaaatgccagcagctccccctcagccttaacaacaggaaatgtctccagctgttgccagtgtcccttcggggaggaagtcacacacacaaagcctctcgcctgccttgaagcctcaggcagggagcagtttgcaagtcaggtgtcagcgccagggttggctaagcgctgctgtcaccttggcggtcattcctttcccgcacacgggacaggatgcctccactggccggttcactggggcaactgtgggcgccgggagtggagtgggcccagcccacgcacggctgagcgtcctgggatggggggattgggcacgtctccctctcgtcctgcaaactgcagctctgagtgccctggagagaaagcaggcatggggcaggggtgccgctgtgacaagggttctgggagcccaggcttatctgtacccctgacccagggcccgtgccccccccaaccctggggttggcgctccctccccacaggaatgacctggctttgttcccggagggggccgaggagccattgccctgccctgtcactccacatcccctccaccccagcaacctgggcctcagtttccccaaggaagagacggtcccatcaggcggcctgtgccggggctcagagaggccctgtgcccaccagccacatccccatcctcgtcccccccaggcaggtccagggtcccctctatggggagagcgagtgggagaggaacgcggcctggtgggggcccagcaggcgggttccgggaggtgcctgatctccggggctgggagaggccccactccacatgcctggcccctgactcactgcccagcactggctggatgcccaggacagcctgaggccggtggcctccggccccgcccccatcccacccccgcccccgtttgttctccctctgagagctgtgccttcagccaccggctctttcctgaatgatggaggccggccagaggcttgctgatggctcagcccagccctgctgaggtgggagtaaggtttcaggcaccaggacacagggttccacactagtccctgcagcactgaggctcagccccaggaccatccattttacagatggggaaactgaggcacacaggacaaggaccaccctggagtctgaacttcagcagtgaagcccccaagccctccctaggggcagggtgatctaactcaggaccaggggcagcgtgtgtatatcagtagcccctggaggattatgctggcttctcagatgggaagcagcccctttgaggagtccaccctgtgtccgaagccacccaggtgagaagaggccaagccagggtgggcacccacacctgcacctgctcgagctccagagggcagcagtggggcagcctgaagctctagccacttagtcattacggcaagaggtgtgcaggtcatgaattcacaccatggccagccccctgctcgtaactggtgtttctggggacgggagcccaggggctatggagtctcgaggttgaacccttcctcgggccctagtgctccctgggcggcttctcctgaggactagacttgggtacctttccccaggactcctcaggccctggcggggataaagtgcatcctcaggccagtagtgggggccacctagaggggcaggcagctgggagcagcttgggatggctgagccatttttttttttttttttttagagacagggtctcactctattgcctaggctggagtgcagtggcgcgatcacagcctcactgcagcctcgaattcatcaggtcaaacagtccttctgcctcagcctcctgagtagctggggtcaagcctttcatgcaaccctcctccagcctggcattcagtgccccttccctgatagttctggactaagaggtggtcaaagttcttcccagtttacggttaaaagaaacagatcgcagccgggcacagtggctcacccctgtaatcccagcactttggcaggctgaggcaagcagatcacgaggtcaggagttcgagaccagcctggccaagatggtgaaactcccgtctctactaaaaatacaaaaattagctgggcacggtgatgggcacctgtaatcccagctacttgggaggctgaggcaggagaatcgcttgaacctgtgaggcggaggttgcagtgagccgagatcacgccactgcactctagcctgggtgacagagcaagactgtctcaaaaaaaaaaaaaaaaaaaaaaagaaagaaaggaaaagaaaagaaacagatcgcaatggggcttgcctgtgcatgggaagttttcaaggctggatttgaacccatggttgtcggatctgaagtctcagtctcccttctaggctggacaggatgggagaggccaggaagaccagttttgtgtcattggcatgacagtgtttgggttccggaggggacccccctgaggtctgggactacagcctccaggcaactcatctaggaatgtgggccacccttgtcgactctcatggtggccccacaacctccagtggcctcccttttttttttttttttttttgagatggagtcttgctctgtcacccgggctgcagtgcagtgatgcgatcgcggctcactgcaacttctgcttcccgggttcaagtgattctcttccctcagcctcctaagtagctgggactacaggcacctgccatcacgccccgctaatttttgtattttttgttttattttgtttttttgagacggagtctcacactctcacctgggctggagtgcagtggcaccatctcggctcactgcaagctctgcctcccgggtttacaccattctcctgcctcagcctcctgagtagctgggactacaggctcctgccaccatgcccggctaattttttgtatttttaatagagacgggtttcaccgtattagccaggatggtctcgatctcctgaccttgtgatctgccgcctcagcctcccaaagtgctgggattacaggcatgagccaccacgcccggctaatttttgtatttttagtaaagacgggatttcaccatgttggccagactggtctggaactcctgacctcaggtgatccacccacctcggcctcccaaagtgctgggattacagccactgcacctggctggcctcccatatttacttagaaatgtggactgggccaggtgctgtggctcacgcctgtaatcccagcactttaggaggccaaggcaggaagattgcttgaaccgaggagttcaagaccagcctggacaacacagtgagactcctgtctctacaaaaaaaaactaaaaaattagccaggcatggtggcgtgcactcgtagtcctggctacttgggaggctgaggtgggaggattgcctcaaccctgggaggtcaaggctgcagtgagctaggattgcaccactgcgctccagcctgggtgacaaagcaagaccctgtctcaaaaaaaaagaggggggagcggggggaagaaagaatgaaggaaggaaggaaggaaggggaagggaaggaaggaagaaaggaaggaaaaggagaaagaggagagggagaggagaagccggtgtggtggctcacgcctgtaatcccaacgcttctggaggccgaggtggggcagattgcttgaggtcaggagttcaagaccagctcagccaacatggtgaaaccctatctttactaaacacacaaaaactagccaggcgtggtggtgcgtgcttgtaatcccagctactcaggaggctaagagaatcgtttgaacccaggaggtggtggttgccttgagctgagatcgcaccactacactccagcctgggcgacagagcgagactccgtctcaaaaaaaaaagagagagaaacaaaggaagaaagaaggaaggaagggagggagggaggaaggaaggagagagagaaaggaaatgaaggaagaaagaaaagaaaagagaaatgagtactgtaagcctgtggcccgccagaccctccttcatggagccacaccccagtggaggccactgtgtcagtttttctgtagacgggtggcagagccagggctttaatctgagctgagtgtgttcagagcttgtgctcttaatcctgacccacaaatgaacgctgtggggtggtggggggtgacgctctgtggctctgtgggaggcccagggaggaggtgtcatttgtcccagacttgagcccccaggggataaaggtgtggagactgtgagccaggcaggggaaacagcaaggctggcatggaggagaccaagggggatggcaggagggcaggggtccttgatcacgccaggcctgcagtccacagggcaatgtggggaggattttccaattccaagacaagccccagctctgggagaagggaacctgacatggccccttgacacagtggccccgcctgtctaggtggctgatgtcactatttactcccaagctccccgctccccatcccaggaacagccccagagcagcccagcccaggggagggacggctccggatggagcagaaagttgccaggaaaccccagcggccatgctcagtggggtgatggggaccagggactcccactcagaaccctccgtggcttttttattccttcatcatcacggaaaatcactgcctgcaagggaggagggtgctgaccccagactggggagcggggaggggattaggccagggccagctgcagggcagggcagcctgcacccctctccccacctccctctggcagccgcggctcagcccagaggctccaggctgactcactgcagacagctgtggtctgggatgcctcgggctgctggaaggggaacggcctggggacaggagaaggggagggacagcaggggacactagttgtgggtgtcagacttgctgggagtgggacaaattcctcccaccttccaccctgtcctggccagagctgttgagcctgcggagacaggacaggaccaccagcctgcaggggtggcgttccccaagctgcaggctgcccccagccctgcaggacaagtgggtgggtgggtgggtgctgagcctatagaccagggagccagcagcgcattttaccagggccccgttctgagccagagaactggaaccggcgaggatcagaatccagccacagtgacccgagcctcctatttctctctgtaaaatgggtggctgtcaaccctccctccctttggcgaccatcggggcagaacgatggattgtcaggaaactgaatgtctgcatgtctgtgtcaccctcaaagctctgatacaagctcccaatgcagcagccaaggccgaataccagaaccttccatcacctctggcctctcctctgggccatgccccacccatgctgtgctcccagtccccacccctgcctggggatgcaccccggtcctgcccaccctcccgtctcagtctcagcaccctcgagccgccacctcccaggccctcccgttttcctggccatctgagcccgcttatcctgtttgccacttggttgagcaccaatttcgtcaatcgagcaattatcgagcgcctgtgtgcaggctccaggacgcttcctgtgtgggctgctcagttttccctcccaggggcgttttggaagcgtcccaaaacaaaaggcggaaggcaggaaggaagtgccaccccgtggacgcaggaaagatgacaggccctgcctttgtctccgagcgcctgcgcagccccatcctgccccacttccagagcccctggggagggggagattagctttgtctccattgtcaggtggggaaactgaggctctgaggtgcctgtcacccagcgagtcagtggcagagccaggttatgaacccagacggcctggtcagtctgctctttttgggtttttgttgtgttttgttttgtttttttgagacagagtttcccaggctggagtgcaatggtgcaatctcggctcaccgcaacctcttcctcccaggttcaagcaattctcctacctcagcctcccgcgtagctgggattacaggcatgcgccgccacacccagctaattttgtatttttagtagagatggggtttctccatgttggtcaggctggtctcaaacccccaacctcaggtgatccgcccaccttggcctcccaaagtgctggactcaagagatcttcccacctcagcctccaagtatctgggactacaggtgtgcgccatcgcatccggctggtaattttaaaactttttctgttgttgttgtctgtttttttgacgcagtgtctcgctctgtcaggctggagtgcagtggtgcgatcttggctcagtgcaacctcggcctcccgagttcaagcgattctcctgcctcagcctcccaagtagctgggattacaggcatgcgccaccacacccaactaatttttgtatttttagtagaggcggggttttgccattttggctaggctggttttgaactcctgacctcaggtgatccgcctgcctcggcctcccagagtgctgggattataggcatgagccactgagcccagaaatttaaaaacgttttttagagatggggtcttgctatgttgcccagactgctcttgaactcctgggctcaagcaatcctcctgcctcagcttcccaaggtactgggattacaggcatgagccacgtttgtggacctaaccaccccagtgtcgtgtcacccctgggccaaccctgtccctccttcgatccacccagtaaggcaccattgcctgggcttcatcagcctgtccctgttgggctcagcccgtgggaggcactggtgggagatagagcctggagcgggggacaggctgggctcttccccgcctcgctctgctggggaccatgtctgcagcacttctttccctcctatgagtttctggctctcaccagctcccaggctccagaaaccacatcttcctctcctggttttgtggtggtggcgctttctgctgttgcttatttctgggttacctcaccgtccccctgtttaatcttgaacattttttatggtgcagtcacctgccagcatacccggctaatttttttgtatttttagtagacagggtttcactatgttgggcaggctggtctcgaactcctgacctcatgatccgcctgcctcagcctcccaaagtgttgggattacaggcttgagccaccgcaccctgcttttttttttttttattgagatggtgtctcgctctgttgcccagcctggagtgcaatggtgccgtcatagctcactgcagcctcaaaatcttaccctttttagtagagacatggtttcaccatgttggccaggctagtctcaaactcctgacctcaagtgatctgccttccttggcctccatttttagaatagatacaaaaaattgctacattttagaagaatattctagaagaatattaaacagagtatggggacagaaaagcaactggcaggaaggaagttttcttcagggggagtttctctaatgaagtaacatttggcttggtgcggtggctcacacctgtaatcctagcattttgggaggccgaggcggtagacgacttgaggtcaagagttcaagaatagcctggccaacatggcaaaaccccatctctactgaaaatataaaaattagccgggtacgcgcctgtgatcccagcaacacaggaggctgaggcaggagaatcgcttgaacccgggaggtggaggttgcagtgagccaagattgtgccactgcactccagcctgggcaataaagcaagaccttgtctcaaaaaaataaataaaataaaatgatgtcaggtccttaaggacagacagggagattttcatttcttttttgttttttttttgagacagagtctcgctctgtcgcccaggctggagtgcagtggcgcgatctcagctcactgcaagctctgcctcctgggttcatgccattctcctgcctcagcctcccaagtagctgggactacaggcgcccgccaccatgcctggctaattttttgtatctttagtagagactgggtttcgccacgttggccaggatggtctcgatctcctgagctcgtgatccgcctgccttggcctcccaaagtgctgggattacaggcatgagccaccgtatcaagacttcatttcttttttttttttttgtagatggagtcttgctctgttgcccaggctagagtgcagtggtgcgatctcggctcactgcaagctccaactcccaggttcacgctattctcctgcctcagcctcccaagcagctgggactacaggcgcccaccaccacgcctggctaattttttgtatttttagtagagatggggtttcactgtgttagctaggatggtctcgatctcctgacctcatgatctgcccgcctcggcctcccaaactgctaggattacaggtgtgagccaccacacccggctttcatttcttatatcccctgtagtgtcccacaagcctacggcagagcatggttcgcacttagcactcaacagatatttgtcgagtgtatgaatggatgagcaggggacttgacaaaatctccaactcagagaagcgacagcagagaacacaatcaccagctcagccatcacagcacctgccaggcactgtggcagcccacggagattgcatcttgcccggagttctgggagtcttccccttctgggtccttctcctggggagtccaatccacaaacagatgacagaaggaagtgaggccaggcgcggtggctcacacctgtaatcccagcactttgggagactgaggcaggcagattacctgaggtcagaagttcaagaccagcctgaccaacatggtgaaaccccgtctctaccaaaaatacaaaaattagccaggctaggccaggtgtggtggctcacacctctaatcccagcactttgggaggccgagacgggtggatcacaaggtcaggagatcaagaccatcctggctaacacggtgaaaccctgtctctactaaaaatacaaaaaattagccgggcgtggtggcgggtgcctgtagtcccagttactcaggaggctgaggcaggagaatggcatgaacccgggaggcggagcttgcagtaggcagagatcacgccactgcactccagcctgggcgacagagcaagactccatctaaaaaaacaaaaaaattagcgttggccacccgcggtggctcacgcctgtaatctcagcactttgggaggccgaagcaggtggatcacaaggtcaggagatcgagaccatcctggctaacatggtgaaaccccgtctgtactaaaagaagtacaaaaaaaaattagccgggcgtggtggcaggcgcctgtggccccagctactcaggaggctgagacaggagaatggcattaacctgggaggcagagcttgcagtgagccgagatcacaccactgcactccagcctgggtgacagagcgagactctgtctcaaaaaaaaaaaaaaaaaaaaaattggccaggcgtggtggcactcacctgtaatcctagctactagggaggctgaggcaggagaattgcttgaacctgggaggcggagcttgcagtaagccgagatcatgccactgcactccagccaggggtgacagagccaggctccatctcaggaaaaaaaaaaaaacaaaaagaagcgcgcgaacagaagaacgtgcatcgagtttagacaaattggttcatttaagaaatttaattgatcacagtaagacattcaggctacaaaaaccttctatacagtggtttaaaaagtgacacccatctcccagaagccactcatacatacaacggggacatcattctcccaaaaagcgttgcacacagtccagttcgtgcaaataatctttgtacataaagaagaggcatttcagaggcaataaccccctacacagggccccgagaatagtcactgaacaaatacagcaaccagggtttgcaaaaataaatagattttatatatatgtgtgtatatatatatatataagtgataacagtttcaaccaatatacaaagtgcaaacataacaaaaaatccccactatctgtacagggacgcatttacgtgctccgaaaccagaaaggcttatcacggttccctgcactgggggggacacagtgttttgtccctggggacaattgccaatcccttgtgacatcttcacgcgggagtctgacggaggctgtcactgtctctccggacatcagtgcaacagtaacacggcgatttcagaaagaacctgaagtcccgtcaaacgatccagactggaggatttatttatttttttatagttgtatttctgaaatagggtcttcatctgttgcccaggctggagtgcagtggctcgatcatggctcactgcaacctccacctcctgggctcaggcgatcctcctgcctcagcctcccaagtagctgggatcacaggcacgtgccaccgtacccagctgatttttaactttttggtttttgtagagatgggatctcgctttgttgctcaggcctggtctccaactcctgaactcaagtgatccagctcagcctcccaaagtgctgggattacaggcgtgaggcacctgtgtctggccaaattcattttttaagagatggggtcttactatgttgcccaggctggaaagcagtggcataatcatagctcacgacagcctcaaatgcctgagctcaaaccatcctcccacctcagcctcgccatgcctggccagaggccatgggctgctgatgcaccatgcatggtttttttttgttttttttttttgagacggagtctcgctctgtcgcccaggccagactgcggactgcagtggcgcaatctcggctcactgcaagctccgcttcccgggttcacaccattctcctgcctcagcctcccgagtagctgggactacaggtgcccgccaccacgcccggctaattttttgtatttttagtagagacggggtttcacgtgttagccaggatggtctcgatctcctgacctcatgatccacccgcctcggcctcccaaagtgctgggattacaggcgtgagccactgcgcccggcctcaccgtgcatgttttaaacacatacccatcaacgacaagattggggaagtgaatggcttggaggcatttgcatagaagtggaagcactaggtgggcggacataaagacgacaatggcagttctcgatattcacgatcacggctttgaagtcccggtcaacctgcccctctctgtccccggcattcattgacacgggctttccctggcctgggatcccatcccaacacacacgacagaaaacagtgcaaaataataacacaaatgccaaatgtacacagtgtacaactctgaactgagaaagtgcaaggagaccacgggaatggaagtgggtaggggtcgggaggatgggcaccaggctggtgtcctgacagccacacctgggtgcaggccacgtgtcctcacggccaaggtaaccgggtgtctcaggcacttaataaatattaagggtgaccagtgactcaggctctgcctctgggaagtggcatcatttggtgaatgagtttggtctcggtgccaccacggattcagccagatcatttccgacgccatgaatccctttcctggcttaaggaaggtacaaacccacctcgaaagacactgggtgggtcatgattcgggggtgacagggcaaaggctaacctggctgtctagcaaggcttgcatagaagaggtaaacacgttgactcctgagtttaggggtttggcttagagattggtggatgaggcagggccagggggtcccgttggtgccatctgctgttgtgtgttgaaagccacttgcttctctgggcctgacatcccctcccctttcatcttccatgtttgaggattgtgtcacggtggagagaaactcaaaacttcctggagagaaatggaggtgtcatcctggtccccccgggcctgtttctcttatccttcacgaggaaaggaagaaaccaaaatcccaacccaagccattgcatgggcactgtccgaagcctgttctgcctcccagatgaataaatatataaaacaaagctctggcaggcaatgctttggtcttctctgtctttgaataaaacaaggccggcgaggtctcaggaagggttctgggcagggacgggactccaggcagatgttcacgccacgtcatcctccagactgaccatctgtctctgccaacaaatggtaaacagcggaaactatcagtccagcattcaggaaacacggctggaggccacctacttctcacctcctgggcctggcagcctcccccagcctgatccccaagcatgttcccccaggagccgccagagggagacggtgagtaccggattcagtcacttcccaccgctctcagggcaaaagccaaagtcctccccagtggcccacaaggctctgcacaacctgcctggtagcctcctgcctttttacccctctctctgtttgctccagctacaacggcctcaaacccaacaggcacggtccagcctcagggccttcgcacaggctgttctcctggttcagagaaggctacctaccctaaaccccttgtgtaaagatcaaggcgggcgcagtggctcacgcctgcaatcccagcacgtggggaggccaaggcgggtggatcacttgaggtcaggagttcgagaccagtctgggcaacatggcgaaacctcgtctctactaaaaatacaaaaattacccgggcatagtgttgtaatcccagctactcaggaggctgaggctgaggcataagaattgcttgaacccaggaggcagaagttgcagtgagccaagatcacagcactgcactccaacctgggtgacagagagagactctgtctcaaaataaaaaataaaagcaaaaaaataaaacacctcctctcccttcctccctcctggccctctggaaacccttctttgaatttttttttttttttaagagacaagggcttgctctgtcacccaggctggagcgcagtgacgcaatcacaagtcactgcagtctcaatctcctaccttagcctcaagcaatcctcctgccttagcctccctagtagctggaactaggcgctcatcaccacactgggctaaatttttattttttgcagagatggggtcttgctgtgctgcccaggctggtcttgaactctgagctcaggtgattctcctgcctcaacctccccaagttctgggatcacatgtgtgaaccaccatgccgggcctctgaactccttttttttttttttttgagatggagttttgctcttgcctcccgggctggaatgcagtggcgcgatctcggctcactgcaacctctgcctcctaggttcaagcgatttttctacctcggcctcccgagtagctgggattacaggcgcccactcccacgcctggctaattttttgtatttttaatagagacggggttttgtcatgatggccaagctggtctcaaactcctgacttcaggtgatccgccagcctcggcctcccaaagtcctgggattacaggcatgagccaccgcgcccggcctctgaactccttttgactttctttgccctgtcaccatctgatggagctctctatttgcttatccaacattcctctacaccaccaaggccattgtccgctgacattctgaatgagcgcacagaagcattcacctaatgctgtcctcgatctggagggctggggaagcctcggcctggtcccttgaggatcatatgcctccagctgggagggggccgccatgggctctggctttctagagagggtcactcaccgaggggtagctgtagccgtcctggttgtggcaaatgtggacctcatcctctgtggtcttctgatagacggggttgtcaaagttgatgctgttgatgttcttaagccgccagttcttccatagaaggaagacccccaggcaaaggaagacgaggagcactgtagggagaggcacgctctgtcacacagctgcccccgagaccagagacccagctccgtggctggagtgaaaacacgggcatcgtaccataaccttgactcctggtcttttatgtttgtttagagatcgccttgcggcctgggcctggtggctcacgcctgtaatcccagcattttgggaggctgaggcgggcggatcatgaggtcaagagttcgagaccagcctggccaacatgatgaaacccagtcagtctctactaaaaatacaaaaattagctgggcatggtggcgggcgcctgtagtcccagctactcaggaggctgaggcaggagaattgcttgaacccgggaggcagaggttgcagtgagccgaggttgagccactgtactccagcctgggcgacagagcgagactccatctcaaaacaaacaaacagaaaagaggcaaatctatgcataagaatttttttctttctttttttttttttgagacggggtcttgctctgtcaccaggctggagtgcagtgacatgatctcagttcactgcaacctcgacctcccaggttcaagcgatcctcctgcctcaggccctcaagtagctggtaccacaggcacgtgccacctgcccagctaatttttgtaccttttctagaaacagggtttcgccatgttgcccaggttggtctcgaactcctgagcccaagcaatccacccacttcagcctcccaaagtgctgggattacaggcataagccaccacacccagcctcataagtataagaaatatctaacctgaagcccactgggtgagccacgccccagaagtagctgacttcttctagatttctgtccaggattagccacacacagggctgtgactttttaagaaataggaagtggggtatagtggcttgcaccagctactcaggaggctgaggtgggaggatcgcttgagcccagacattgaggctgcagcgaggcatgatggtgccactgcactccagcctgggtgacagagcaagactctgtctctcaaaaaaattaaatttcttttttcttaaaatttaagaaaaaaagaaaaaagagatgtgatggtaaccgagttaggatgagcatgggtgaggcagggagagcgcgcctctccacacagccccctgcaagggaaccagttccccagaaggcactcaaatctcggtgaggctattccacagcacgggacccagctccacatcctccatctgaccccttagctgtctgatcttgtcactgtcagccccaagccaggagaggccgtgggggtgataaaggacaccagtggggctgttccctgtccaggagaaaaagtgaacaggcccaaccagccaggcacgaggtcacatagcgggaggctgtgacctgggggacgctgggggaccggcccgcgcttaccgatggggaggacaatggacagagccctcacgctactgggcttcttctcatttcctctgccagcaacgtcgcccagagctgcaggagagaagcaagagtgaggcccaggtctaaaggaaggccaccaagaaatggagcaggcagaggacggtggtcacggcaggaaagcgcctggcacatctccctggacacttggagaacttcccaagtctgtgagaggccacacgggcttatttgtgagttatcgaggttgtaggactcaattccggtttaagaaggttctttttgtgggggatagaaacagaggtctggctatgttgcccaggcttgtcttgaactcctggcctcaagagatcctcctgcctcagccttccaaagtgcagggattacagaaatgagccaccgagcccagcctaagaaggttcttgagcctcacattgatgagtctttaggggagggctgcagaggcttttattctaggtggttgacaaggttgcaggtgaaattcttgtcaacctacttgtgcattttattaaaatgagcatattttggtctgggcgcggtggctcacacctgtaatcccaacactttgggaggctaaggcgggcagatcacctaaggtcaggagtttgagaccagcatgatcaacatagtgaaaccctgtctctactaaaaatacaaaattagctggccgtggtggcatgcacctgtaatcccagctacttgggaggctgagggaggagaatcacttgaacccgggaaatggagttgcagtgagtcaagatcgcgccattgcactccagcctgggcaacagagtgagactccctctcaaaaaaaaaaaaaaaaggccaggcccagtggctcaaacctgtaatcccagcactttgggaggctgaggtgggcaggttgcctgaggtcaggagttcaagaccagcctggccaacacggtgaaaccctgtctctactaaaaatacaaaaattagccagctgtggcggtgggcacctgtaatcccagctactcaggaggctgaggcaggagaatcgcctgaacccgggaagcagaggttgcggggagctgagatcgcaccactgcactctagctggggcaacagagcaagacttcgtctcaaaaaaaaaaaaaaaaaaaaaagaagaaaagaaaaagagggtattttgaaggggacaggggagccaccttcggaccccacaatgcccagcatgctcagtcctgaggttgaatggcacagaagctgattgtcctgcatcaactgtcccaggcattatgggatggggttaaccttggtacagaaccatacaagtggacctgggccattcaacataagggccctgggcaaggcaacatttcaagtccactagagctaggcacggtggctcatgcctgtaatcgcagcacattagtagaccaaggcaggaggatcacttgaggccaggaatttgagaccaatctaggcaatatagccagatccccctcgtctctacataaatgaatgaatgaatgaatggcttttttgccaaatttgaggagtcctggatgggctggtctgtgaagcgattaattctagcagtgccccacctcccccaagcaagaaggtttctcagcctctcccaggcagtttccattttatcctgcttgtaactgaacaaagatttcagctactctggaaccaaaaaaaaaaaaaaaaagaatggtctgaaatttgccgatgtgccatttttttttgtttgtttgctaaaagtctaggagcaccatttcccagcagctcaaagcagtttgggcgccctctggtggacaaacgaatgacatcctgacccacacctgggtctcatcacatccagggaggacagtgaggccaggtcagacactcaccaccccagcccccaaactaaagggggagccaaaaagcttaggaatctgataatattccttttctttgcagaggggaatggagtttcactcttgtcctccaggctggagtgcaatggcgcaatctcagctcactgcaacctccgcctcctggattcaagcgattctcgtgcttcagcctcccgagtagctgggattacaggcacctgccaccacgcctggctaatttttgtatttttagtagagacggggtttcaccatgttggccaggctggtctcaaactcctgacctcaggtgatccacccacctcagcctcccaaagtgctgggattacaggtgtgagccactgtgccctgcccaggaatccaataatattctaatgcattatttttatttttagagatgggggtctcgctatgttgcccaggctggacttcaactcttgggctcaagcaagtctcccgcctcagcctctgggagtagctaggactgcaggcgtgcacctccacaccagcctttaatatgttattttttaaaatttaaattaatgaaaaaccacccaatgaacaaaatatcaaaattttcaaggatagactgtgatcttacacctgcaagattcggcctcactggtccactggctccaataaaactttatttacaaaagtaagtggccaggccttggctgtagtgtgatgatttgaaaaaaaaaaaaaaaaaacaatttttttggagacagagttttgctctgtcactgaggctggagtccagtggcatgatcttggcttactgcaacttctgcctcccaggttcaagcaattctccaccctcagcatcccaagtagctgggattacaggcacccaccactgtgcccaggtaatttttgtatttttttagtagacagggggtttcaccatgttggccaggctagtctcgaactcctgacctcaagtgatctgcccacctttgcctcccaaggtgttgtgaatacaggcatgagccaccaggcctggccaaaaaattttttaaattgcattaatctcagcactttgggaggccaaggtgggcagatcgcttgagccctggagttagagacaagtctgggccacaaggtgaaaccctgtctctacaaaaaaattcaaaaattagctgggtgtggtggctcatgcctgtagtcccagctacctgggagactgaagcaggaagatcacctgagcccagggaggttgaggctgcagtgagccatgacagcactctatcactccagtctggggtacacagtgagaccgtgtcccaaaaaaataaaaataaaaaagttttggctgggcacggtggctcatgcctgcaatccccagcactttgggaggccgccgatcctcgggcagatcacgaggtcaggagttccagaccagcctgcccaacatagtgaaaccccatctctactaaaaatacaaaaatattagctgggtatggtggtgggtgcctgtaatcccagctactcgggaggctgaagcaggagaatcacttggacctgggaggcggaggttgcagtgagccaagatggcgacactgcactccagcccgggtgacagtgagagactccgtttcaaagaaaaaaaaaatttttttaatatattgcattgccatgttgaatagttgggttttaaaagaaaaaaaattagtttatttattatttattttgtagtagagatagggtcttgctatgttgcccaggctggacttgaactcctgggctcaagccattctcccaccttggcctcccaaagtgctgagattacaggtgtgagccaccaaagaataaactgtaggccaggcgcggtggctcacatctataatcccagcactttggcagggccaaggcaggcagatgacttgaggtcagaagtttgagaccagcctggccaacactgtgaaaccccatctctactaaaaatgcaagaattagccaggcatggtggcgggtgcctgtaatcccagctactctacatgggaggctgcggcagaagaatcacttgaacctgggaagcggaggttacagtgagcccagactgcgtcactgcagtacagcatgggcgagagcgagactctgtctcaaaaaaaaggccaggcgtggtggctcacacctgtaatcccagcactttgggaggctcaggcgggtggctcacctgaggttgagagttcacgaccagcctgaccaacagagaagccccttctgtactaaaaatacaaaattagccgagcgtggtggcgcatgcctgtaatcccagctactcgggagactgaggcaggagaatcgcttgaacccgggagccagaggttgcagtgagccgagatcgtgccactgcactccagcctgggcaacaagagcaaaactccgtctcaaaaaaaaaaattgtaaaattgtgttaaaacgttactggattccttagccttttggagcctctgtgaaaagctgagtactgaggaatccctccctctccttgccttagtcctggcctttttgggcagatgcctgaagctgaggcaacgaatgtgccttgataaaattttgggacccacacggtgcgtggctgactttgggaaccaggagcctgaaggacctggcccctcatatgatttggcccatttaatccttgcaaagagggcaagaactgttattagacccactttacagatagggaaactgagggcccagagacacacggcccaagtgagagaaggtcagcaagggagtgaggacgacacctggactccatctcgtgaccaaaatgttcgtggccactgaagggacccgtctctgggtgaagaggggcctagggagggcccagtctttaccttggtgagacattgtcactatctccaccgtggtgagcccaggggtggccccaggcagccgggaggtgtcgggaacaggtcgggtggttgtgtgctgtgtccttacggctgtggagctgacctttagcctgacggtggatgtctcctgggtggccactgcagcctcagcctctgaaagaataaataaacgtcttctgagtgccacgtgcctgcaggcccttctcataggtgtgcgcctaatgacgaaagtctcaaatgaccttgggaggccaaggcaggaggatctcttgagtgagtccaggagtttaagactagcctggtcaacatggcaaaataccatctctatatacaaaaaaaaaaaaaaaaattagccaggtgtggtggtgcacacctgtactcccagctactcaggaggctgaggggggaggatcgcttgagcccaggaggtagaggctgcagcaaggtatgatcccatcactgggatgacagacagacaggatggcctggatgacagagtaagaccctgtctcaaaaaaaagaaacccaaaaataattattaataaaatttttaaaaagtccaaaatcaggccaggcacagtggcttaggctgggtgaggtggctcaggctgggcgaggtggctcacaccaggcgaggtggctcatacctttaatcccagcactttgggaggccgaggcaggtgaatcgcctgaggttaggagttcaagaccagcctggctaacatggtgaaaccccgtctctactaaaaatacaaaaaaattagccgagtgtggtggcgggcccctgtagtctcagctacttgggaggctgaggctggagaatggcgtgagcctgggaagtggagcttgcagtgagctgagatcatggcactgcactccagcctgggcgacagagcaagactccgtctcaaaaaaaaaaaaaaaaaaaaaagcctggcatggtggctcacgcctgtaatcccagcactttgggaggccgaggcgggcggatcacaaagtcaggagatcgagaccatcctggctaacacagtgaaactccatctctactaaatatacaaaaaagtagccgggcgtagtggcaggcgcctgcagtcccagctactcagaaggctgaggcaggagaatggcatgaacccagggggcggagcttgcagtgcgcagacatcgcaccgctgcactccagcctgggcgacggagtaagactctgtctcaaaaaaaaaaaaaaaaaaaaaagaaataactaaaaaaggccagacacggccaggcgcggtggctcatgtctgtaatcccagaactttgggaggccgaggtgggtggatcacctgaggtcaggagtttgagaccagcctgaccaacatggagaaaccccgtctctactaaaagtacaaaaattagccaggcgtggtggcaggtgcctgtaatcccagctactcgggaggctgaggcaggagaattgcttgaacccaggaggcagaggttgcagtgagccgagatcacaccattgcactccagcctgggcaacaagagcgaaactccatctcaaaaaaaaaaaaaaaaaaggccaggtgcagtggctcatgcccataatcccaacactttgggagcccaaggcaggcagatcacgaggtcaggagatcgagaccatcctggctaacatagtgaaaccccatctctactaaaaaatacaaaaaattagctgggcgtagtgggacgtgcctatagtcccagctactggggaggctgaggcagaagaagcgcttgaacccaggaggcggaggttgcagtgagccaagcgcttgaacctgggaggcagaggctgcagtgagccaagatcgtgccactgcactccagcctgggcaacagagcaagactccgtctcaaaaaaaaaaaaaaaaaaaaaaaagagtactgaaaataaacactatgaatatctactttgtgatcgtattgtttctttttcctttttctttttttgtttttttcagacagggtttcactttgtcccccaggctggagtgaagtggtgtgattatagctctctgtagccttgacctcctgggctcaagcaatcctcacacctcagcctcccgagtagctgggaccacaggtgtgagccaccacgtctgggtcatattgttatttgttgttgttcaaaagggagattcaattcacttgagggaggtgctggcctcaactgagactttctcagaggatgagaaaagtcaacaaagggggatgggcgcggtggctcatgcctgtaatcgtagcacttcgggaggcagaggtgggaggatcacctgaggtcaggagttcaagaccagcctggccaccatggagaaaccctgtctgtactaaaaatacaaaacttagccaggcatggtggcgcatgcttgtaatcccagctacttgggaggctgaggcaggagaattgcttgaacccagtgggagaggtagcagtgagccaagatggcaccactgcattccaggctgggtgacagcaaatctcaaaagaaaaaaataaagaaaaagaaaagtcaacaaaggggaccatttcctccctcagggctcctgtcagaaatcagatcacctcttcagggggccgggaaagaggaaaccaggcatcaaaggggaactgggtaaatgtcaagcccggtgctgatgtgtccatccaagaaaagtatggttatcccgactcatgagtccttacaacgaccttgaggtacccatttgacagatgagcagagagaggctcaggagggggcagttggaggacacaggacgcagaaacaaggcgtgtgccacacctgtgaggcagctcctcatgtccctggccagcagcatgccgtccgggcaggcgcaggtaaacttgggcgagtgggggttgatctgcggggcagggaggcacagatactggcagccgccattgctcagggtggtcctctcacaccagttcactcctggggcagaagaagcggagtcagggcaggaacgagatcatcagctataccagaagattccagaaatttccagaacattccagagtttccacaaggaggtttcaaggttgggggggtggggctgacccacccttacctcttggctgggtgaggttgtggaagagaaccatatcctctggggacagtaggttttcagccaacaagttgacatcggaacctgtgaggcggttggcactgaaaatggcttcgttgatgatatctgtccaaaatactttgtcctaaacaggcagcaaggaagatgacaaatcccgttaaacactgggatgagacacaggccaccctctctccacaactagtttttttgtttgtctgtttgtttgtttgtttgtttgtttcagacagagtttcacttttgttgcccaggctggagtacagtggcccaatctcggctcactgcaacgtccacctcctgggttcaaacgattctcttgcttcagcctcccgagtagctgggattacaggtgtgccaacatacctgactaattttttgtatttttagtagagacgggctttcaccatgttggccaggctggattcgaactcctgacctcaggccatccacctacctcggtctcccaaagtgctgggattacaggcgtgagccacagtgcctgacccacagctaattttttttttggttttttttttgagacgaagtctcactctgtcgtccaggctggagtgcagtggcacgatctcggctcactgcaatcttagcctcccaggttcaagcgattctcctgcttcagcctctcaagtagctgggactacaggcatgtgccaccacgcctggctaatttttgtatttttagtagagatggggtttcaccatgttggcctggctggtctcgaactgctgacctcatgatccacctccctctgacctcccaaagtgctgggattacaggcatgaaccaccacacctggcccacaactagtttttaattgtggtgaaatacacataacataaaatgtaccatctcgactatttgtgagtgcacagttcggtggccttaagcagattcacgctgttgtggaagtatcaccatcaccaccatccatttccagaactttttttttgttgttttttgagacagagtcccactctgtcgcccaggctggagtgcagtggcatgatcttggctcactgcagcctccacctcctggggtcaggcaattctcatgcctcggtctcgagaacccaggattacaggtgcctgccaccacacctggctactttttgtatttttttttttttttttttttttgagacggagtctcaactcggtcacccaggctggagtgcagtggcgcgatcttggctcactgcaagctccgcctcccgggttcacgccattctcccgcctcagcctcccgagtagctgggactacaggcgcctgccaccacacccggctaattttgtttttgtatttttagtagagacggggtttcaccgtgttagccaggatggtctcgatctcctgacctcgtgatccgcccgcctcggcctcccaaagtgctgggattacaggcgtgaaccaccgtgcctggcctactttttgtattttttgtagagacagagtttcgtcatgttggccaggctggtctcggtctcacactcctggactcaagcgatcctcctgcctcagcctcccaaagttctgggattataggcataaactgccatacccagtttaaatctcttttctttataaattacccggcctcagctattcctttactgcaatgcaaatggacgaacacacttggggggactccacttttggctgttggtaatcatgccaggaacgtggggttataaaatagcgccatttccttagagcagggtttccccacgatggctctatctagggcctgctacttccctgttctgggtgttcagcagcgtcaccagcctctacccactaaatgccaacagtcttccccattgacttgtgacaaccaaaaaatctctagaaattgccaaatgtcccctgagagccaagatcacatgtgacagaggatcactgcctttcacgactctcagtaaaaagaatacaaaccaccgggcacggtggctcacgcctgtaatcccagcactttgggaggcagaggtgggcgaatgacctgaggtcaggagttcgagaccagcctggccaacatggagaaaccccatctctactaaaaatacaaaatcagccgggcgtggtggcacatgcttgtaatcccagctactaagaaggctgaggcaggaaaatggtttgaacccaggaggcagaggttgtggtgaggcgatatcgtgccattgcactccatcctgggcaacaaaggtgaaattccgtctccaaaaaacgaaaaaaaaaagaaaacaaaccggccgcagtggctcatgcctgtaatcccagcactttgggagactgaagtgggaggatcacttgaggccgggagtttaagacaagcctggtcaacatactgagaccccatctctaaaaaaaaatacaaaaatcagccaggtatgatggcacacatgcctgtaatctcaactactcaggaggctgaggcaggagaatcgcttgaacctgggaggcagaggttgcagtgagccaagattgtaccactgcactccagccggggtgacagaacgagactgtctcaaaaaaaaaaaaaatacaaaaatgagctgggcatggtggtgtgcacctgtagttccagctacttgggaggctgaggtgggaagatcacttgagcccaggaggttaaggctgcagtgagctatgatcacagcactgcactcctgcctggggacagagtgagatcctgtctcttagaaaaaaaaaaagaagaagaagaaagaaagaaaacagaaatagctgggcgcggtggctcaagtctgtaatcccagcactttgggaggccgaggcaggcagatcacctgaggtcgggagttcgagaccagcctgaccaacatggagaaactccgtctctactaaaaatacaaaattagccgggcatggtggtggtgcatgcctgtaatcccagctactggggagcctgagacaggagaatcacttgaacctgggaggtggaggttgcggtgagccgagatcatgccattgccctccagcctgggaaacgagagcaaaactctgtctcaaaaaaaaaaaaaaaaagaaagaagaaaatagaaataactcaggtctaagacctcctcctagtcacaaccagttttctgcgttcatcttggcttgagtgatctatagtctgtgtctatccgccacctaagtgcttgcatctcgtacgtaagccacacctcaaagacggccaaggagaaggggtgggccagcctcttttcatcctccaagatggtcttccggttgcccccgttgacatcgatgcttgagatggagtgaagtttggagtcaacccagtagaggcggccactgaggagatctagacacacaagtggataaggagaggtcacgtgctgatgccagtcccagagggtcctgagggcctggccacgctgctccgggcaggaagaccccctgccagggacctagcagaaaagcacctggagaggcagctccaaccacatgtgagcctgaacccctcccctgtgacgccctctccaatgggcaggtaggggagttgcaggtcagaaaaacttcaaggaggctgggtacggtggcccacgcctgtaatcccagcagtttggaaggctgaggcgggaggatcgcttgcaccctgagtttgagaccagccaggccaacataacaagactttgtctcttcccaaaaataaaataaaattagtctgccgtggtggcacgtgtctgtaatctcagctactcaggagggtgaggcaggaggatcacttgagcctgggaggtggaggctgcagtgagctacgattgcgccagtgcactccagcctgggtgacagaccaagacctcatctcaaaaaaagaaaaaacaaagaaaagaaagagggaaaccttcagggagcagcttgggcttgtcccagagccacctggcaacccccgtctgtcctccagcctgtgcccggccctggctgggacggctgtcctgcgaacatacctagggtgatgccattgggccactgaatgttttcagtcaccagcgagtagatgtccacaccattcaggccccctttcttgatcttggcgggagttccccagtcagtccagtacatgaagctggtgggaggacagagaatagctgtgaggctggagggcgggggaggatcccagccaatgcgtgcaacgaattctggaagaaacagccaggctcaggcttgggaaatagtcctgctgggaaccccaaactccaaatgtggcttgtttgggttttttttttttttttttgagacagagtctgtctctgttgcccaggctggagtgcagtggcacgatcttggcttgctgcaacctccaccttccaggctcaagcgattctcctgcctcagcctctggtgtagctgggattacaggcgcccaccaccacgcctggctacatttttgtatttttagtagagacggggtttcaccatgctggccaggcccgggaggctgaaatcaagaggattgcttgagcccaggaagttgaggctacagtgagctatgatcacaccactgcactccagcctgggtggcagactgagacgccatctcgaaagaaaaaggaagaaacacaagaacacaagccatgcgcaatggctcgcacgtgtaatcccagcactttgggagaccaaggcaggaggattgcttgaggctaggaggtcaagaccagcctgggcaacatagtgagacctcatctctactaaaaataaaataaattagctgggcacagtggtgttcacctgtagttccagctacttgggaggctgaagtgggagaatcaactgagcccaagagtttgaggctgcagtgaactctgattgcgccactgcactccagactcagtgacagagcgacaccctgtctcaaaacaaacaaatatgagaccagaacacacgcacacaacacacacatttgtatctgagtggagacagtctgagagtctctttccctctggcctggcagttatgtggccaaacacactgggccacatgtaccccacccattgttctgtggcaacagcgagcattgtcttgtttaaaagagatccagggttgggttgggcacagtggctcatgcctgtaatccccgctgtttgggaggctgaggcaggcagattacttgaggctaagggttcgagaccagcctagccaacatggtgaaacccagtctctactaaaaatacaaaaaattagtcaggcatggtggtacatgcttgtaatcctaattagttgggaggttgaggcaggagaatcacttgaacctgggaggcggaggctgcagtgagccgagatcacgccactgcaatctagcctgggcgacagagcgagactccgtctcaaaaaataaaaaataaaaagggggccgggcgtggtggctcacgcttgtaatccaagcacttagggaggccgaggcgggtggatcacagggtcaggagatttagaccatcctggctaacgcggtgaaaccccgtctctaataaaaatgcaaaaaattaaccgggcgtggtggcgggtgcctgtagtcccagctactcgggaggctgaggcaggagaatggcgtgaacctgtgaggcggagcttgcagtgagccgtgatcgcaccactgcactacagtctgggcgacagagcgagattccatctcaaataaataaataaataaaaataaaaagggacgctggccatagcgggcccaccttcacccgcaggcatctgatgatgctctcttccctgcttttcccttccagacaccaagtgtgccttctccagtgttctctgctggaaacccaacattcacctcctgattgtagctgcaaggacagtgtgcgtcccgggttgtcagcaccacactgaaactgtgaaatgccacctctcacgtgcttaggtagcagatgtcacctgacaggtacagagtacaccgggcaggtggcaggggcgatgcttcctgccaggggacacaggtcacagtgtcttgacccaggagctgctgagtcagccatgggcttggaagataccatcctgttgtctagccactaaccagttttttgtttagtttttttttttttttttgagacggagtctcactctgtcacccaggctggagtgcagtggggctgtcttggctcactgcaacctccatctcccaggttcaagtgattctcctgcctcagcctcccgagcagctgggattacaggtgcccaccaccacacccggctaatttttgtatttttagtagagacgaggtttcaccatgttggtcaggctggtcttgatgatccacccaccttggcctcccaaagtgctgggattacaggtgctttgagccaccatgcccagcccactaaccagttcctgaagctccttcctgctccctccattccctctgcagccctcagcgtcgtggatacgcacccatgaacaggatccaccacgatggcccttggcttggagccgttctccctgaataacgttttcctcttcacgcccttggtatccgcaacagagacagtgcccaggacagagtcggtccagtagatgttgctgtggatccagtccacagccagcccgtcgggggcctggatgtctctgctgatgacggtgtcataggaagagacgccgtgggctctgtcaagctgggtgctgaggcaggaggagagaagggcatcagcgccaggagccctcatctcacctgcgggccaaggctgcaggcaggggcgacgctcacctgcagatcattctctgggacaggtcagaccagtagattctattgctggccacctccgtgtccagagcgaccacgttcctcaggttggggatgaggctggtgtactcgctccggtccagcgtcatcttcctgacctcgtgccggttggtgaagaagaggtaggcgatggagcctgggggtccggggagcgaggtcagggggtcagaggggacccgtcgatggaaccaagagtgcctccccatccccttgtgtcatcctgcagggtgcggctgagccagaggaggcacccagaaaaagagggtggaaaagacctcccaacgggaacaggcacagtggcgcccacctgtaatcccagcactttgggaggctgagggaggaggatcacttgaggctaggagcataaggctagcctgggcaagacaatgagaccttattgccacaaaaaaaaaaaaaaaaaaaaaagccaggcacggtggctcaagcctgtaatcccagcactttgggaggctgaggcgggagaatcgagaccagcctcaccaacatggtgaaaccctgtctctactaaacatacaaaaactagccaggtttggtagccggaacctgtaatcccagctactcagaagggtgaggcaggagaattgctggaacctgggaggtggaggtttcagtaagccaagatcgcaccaccgcactccagcctgggtgacagaatgagactctgtctcaaaaaaaaaaaaaaaaaaattaaccaggcatggtggcacatgccagtactcccagctcctccagaggcttaggcgggacgatcacgtgaacccaggaggtcaaggctgcagcgagctatgatggaggctgcactgcactacaggctggaagatagagcagcaccctgtctctaaaaaataataatagccaggtgtggtgtctgtaatcccagcactttgggaggccaaggcaggaggatcacttgggttcaggagttcaagactagcctggccaacatggtgaaaccctgtttttactaaaaatatgaaaattagcggctgggcgcagtggctcacgcctgtaatccgagcactttggaaggccgaggtgggcggatcacgaagtcaggagatcgagaccatcctggctaacacagtgaaaccccgtctctactaaaaatacaaaaaaattggcctggtgcagtggcgggctcctgtagtcccagctactggggaggctgaggcaggagaatggcgtgaacccgggaggcggagcttgcagtgagccgagatcctgccactgcactccagcctgggcaacagagcgagactccgtctcgaaaaaaaaaaaaaaagaaaaaagaaaattagccaggcatagtggcatgcacctgaggtcccagctactccggaggctgaggtgggaggatcaaccaatcctcctgccctcaagcaatcctcccgcctcagccttctgagtagctgggaccacaggtgtgtggcaccatgcccagctaattttttttctttaaccccttgaagtcactccccaggttgtccctgaaaggaaagccggttcctgttccaccagtagggctgagggttccgttaactggatattcccaaaaactaggacatatgcaggcatccccctggcaagcccaagtcctaacagggcggcagactcccctgccagagccctcaggagcaaacagcctcccggtcaggggatatgagtctgtgcaaagttcagaggatgaaactcccccaccactgctgcctgcaaggggtgaggccgcccccacccgccgccttcccgtgctcacccacagccttgcaggccttcgtgtgggggtccagctggaagccttcctcacactggcacttgtagccaccctccaggttcacgcagagctggctgcaggtgtcgggatcctgacactcatcgatatctggaagagagagaaagaggcttggtggggaggctcttccccaatggctagagacggagcgatggggcccaggccaaaacccacaccttcgaaggcagccaggagacagcccagcctctcgggagatgtaatcaaggaaacagccaggtgtcatccccagtcatcacctgacctcatcattcaccacgggaacccaaccaagagtgtgaagctgtgtcagctgaaatttcttttcttttttttcttttcttttcttttttttttggatggagtttcactcttgttgcccaggctggagtgcaatggcacgatcttggctcaccacaacctccacctcccaggttcaagtgattctcctgcctcagcctcctgagtagctgggattataggcatgcaccaccaagcccggctaattttgtatttttagtagagacggggtttctccatgttggtcaggctggtctggaactcccgacctcaggtgatctgcccgcctcggcgtcccaaggtgttgggattacagggattacgcacccggcctgaaatttcttaattactaatccccagaggcaagaaactctggccagccaatgatagttttccatgcaggtggaatctcatgaaaccctcctaactgctttcaagcacacttaacagatggggaaactgaggcatgaggggtttggttgccatgtcaggaagcgcagagggggcccagggctcagtcccacccggaaatcaccttcgcatcttcgctgggccaccagctggaagccgtcggggcacaggcactcgtagccgatcttaaggtcattgcagacgtgggaacagccgccgttgttgtccaagcattcgttggtccctgcgcagggccaggggatgcagactggtcactctcgggcccctacccatcccttcgccgccaaccttggctcattacaacctccacctcccgggttcaagtgattctcctgcctcagcctcccaagtagctgggactacaggcatgtgccaccatgcccagctaatttttttgtatttttaggagagacggagtttcactcttgttgcccaggctggagtgtaatggcacgatctcggctcactgcgacctccgcctcctgggtacaagcgattctcctgcctcagcctcccacttagctgggattacaggcacccacgaccatgacaggctaattttttgtatttttactagagatggggtttcaccatgttggccgggctggtctcgaactcctgacctcaggtgatgcgcccgcctcggtctcccaaagttttgggattacaggcgtgtgccaccgcacttggctcagtgaaataagccagtcaaaaaaggaaaatgctgtctgattccactcagaggaggtccctagagccatcacattcatagggacagaaagtagaatggtgggtgccaggagttggggaggggatggagagtgagtgtttcatggggacagagcttcagtttgggaagataaaagagttctggggccgggcgcagtggctcatgcctgtattcccagcactttgggaggctgaggtgggaggatcacttgaggtcaggagttcgagaccagcctggccaacatggtgaaacccagtcagtctctactgaaaatacaaaaattagctgggcgtggtaggacgggcacctgtaatcccagctactgagggggctgaggcaggagaattgcttgaacctggtaggtggaggttgcagtgaaccgagatcgcaccactgcactccagcccgtgcgacgagtgagactctgtctcaaaaagaataaaaaaaaaaaaaaaagttctggagatggtggttgtgatgttgtacaacagtgtgaatttgctaatggcacagaactgtgcacttaataaggtttgagaaggtaaattttatgttacatgttttttactgcagtttatgtatatatataaaacaagttatatatatacataaaacaagttatatatagatatatagatataaaacaacaaaagtccgggcgctgtagctcatgcctgtaatcccagaactttgggagaccaaggcaggcagatagcttgagcccaggagttcaagaccagcatgggcaaacatttttttgtttgaggcggactctcactctgtcgctcaggctggagtgcagtggtgcaacctcggctcactacaacctccgcctcctgcattcaagcgattctcctgcctcagcctcctgagcagctgggactacagacgcgcgccaccaagcctggttaattttttgtatttttagtagagacggggtttcactgtgttggccaggatggtctcgatctcctgacctcgtgatcctcccgcctcgacctcccaaagtgctgggattacagctgtgaaccatcctgccaggcctaaaaatggcttttacatatttaaatacttgagaagaaaaataaaaataaaaagggaaatcattttcatgacacaaaacagttatatgaaattccaatttttgtgtccataaataacattttctgggcccacagccacgtgtattggtttgcgttctgtgcgtggttgtgttcacccaacagccatgttgagaaactgcaccagagaccgtatggcccacagtgtccgaaatacttacttttttttagagatagggtctcttgctctgttgcccagattgaagtgtggtggtgtgatcacagctcactacagtctccaactcctgggcccaagcgatcctccttcctcagcctcctgattagctgagactacaggagtatgccaccatgcccaagcccactctggtatatgacagagaaaacttgccactgccttctctatactgtacagttatcctaatatggtctttcagtatccaccacagagggttggggaaaaaaaaaaaccctcaccaggacgaggtggctcacgcctgtaatcccagcacttcaggaggcgggcagatcactcgaggtcaggagttcgaggccagcctggccaacatggtgaaaccccatctctactaaaaatacaaaaattagcccagcaaggtggcattcagctgtaatcccagctactcaggaggctgaggcagaagaatcgcttgaacctgggagccggaggttgtggtgagccaagatcatgccactgcactccagcctgagcgacagagcaagactctgtttcgaaataacaacaacaaacctcaagacagaagcaggcatctaaggaaaagaattcatgtatttcagaattcgcttttttttttttttttttttttgagacagagtctcactctgtcacccaggctggagtgcaatggtgtgatcccggctcactgcaacctccacctcctgggttcaagcgattctcctgcctcagcctcctgagtagctgggatcacaggtgcctgccaccacacccggctaattttttgtagttttagtagagatggggtttcaccgtattagccaggatggtctcaatctcctgccctcgtgatctgcctgcctcagcttcccaaagtgctgggattacaggcgtgatccaccgcgcccagcatcgcttcattttttaattttttttcatggggtgggtcacgcctgtaatcccagcactttgggaggccgaggtgggcggatcatgaggtcaggagttcaacaccagcctggccaacatagtgaaaccccatctctactaaacatacaaaaaattacccgggcttggtggtgggcgcctgtaatcccagctactcaggaggctgaggcaggagaatcacttgaacctgggaggcagaggttgcagtgagccgagatcgcgccattgcgctccagcctgggcgaccgtgcgagactgtctcaaaatgaaaaaaggagccctttgcacagggtgggcagagtggagttcccaaaaccctacagcactcatgtctcagtccctttcctggctccccacaaactctgcaagccgcctgcaccgagactcaccgcactctttgatgggttcatctgaccagtcccggcagtctctagccatgttgcagactttgtccagggtgatgcattcgccgctgtgacacttgaacttgttgggtccctcgcagagtgtcactgtgagagccagagagaggaaggaggaaggtcaggtgtgtctgagcctcagtttgcttggcactcattcatataatagtttattcacataagaacgcatgcaaatggattcattaagaaaacgcgtcgggcacggtggtttgtgcctgtaatcccagcactttgggaggccaaggcaggcagatcgcttgagcccaggagttcgagaccagcctgggcaatatggcaaaaccgcatctctactaaaaatacaaaaaaattaggcctggcgcagtggctcacacctgtaatcctagcactttgggaggccgaggcgggtggatcacctgagaccaggagttcaagaccagcctggccaacatggagaaaccctgtctctaataaaaatacaaaaaattagccgggcgtggtggtatacgcctttaatctcagctactcgggaggctgaggcaggagaatcactggacatcagaggcagaggctgccgtgagctgtgattgtgccacagcactccagcctgggtgtcagagcgagactccgtctcaaaacaaaaggaagtgaggctctgagaagtcaagtcacttgcccacagacgcacagctggtgcagagctgaccagggaagcgccctctggcttcacaaatcatttgcaagcagcaaggcacagagaatgggggatggaaaaccagatggccagcgctcaccattaacgcagccaacttcatcgctcatgtccttgcagtcatattcccggtcacactgccggctgccatggatgcagtttccatcagagcactggaattcgtcagggcgacaggtggccacagctggaaaacaggacagagtgtgttgattttctcaagaagagacaaccagagaaaaagaagcagggccttttgccgggtgcagcggctcatgcctggaatcccagcactttgggaggccaaggcaggaggattgcttgagcccaggagttcaagaccagcctgtgtctgtacaaaaaaattggccaggcttggtggtacagcctgtggttccaactgcttgagaggctgaagtgagaggatcgcttgagccaaggagatcaaggccgcagtgagccataatcgtgccaccttacttcaacctgggtgacagcaagaccctgtctcaaaaaaacaaaaaaaggctgggtgcagcagtgcacgcctgtaatcccagcactttgggaggccgaggcgggtggatcacctgaggtcaagagttcatgaccagcctgactaacatggtgaaaccccatctctactaaatagaaaaaaaaatagccggaggtggtggcacatgcctgtaatccgcgctacttgggaggctgaggcaggagaatggcttgaacccaggaagcggaggttgcagtgagctgatcgcgccactgcactccaccctggcgacagagcgagactccgtctcaaaacaaaaacaaaaacaaaaacaacaaacaacaaaaaacaaccagcaccttccaaacagtgatttcccaataagctaacagcaaccatcggccagcctggggcctcatggtggccatatggatgtaggaaatttagagatgaaaaaaatcacagagtgagactccatctcaaaaacaaaataaagaaagaaaagaaaaaaaagaaacaaacatgaaatgggaatactttcttggcatgttgttggaaatccacttcggcacctaaatcactgcatgtcccacacctgggggagcccagggacaggtgataggacgccccgcccccaccctggccccgcccataccgcagttttcctcgtcagatttgtccttgcagtcggggccaccatcacagcgccagctggagtggatgcactcgccacttaggcagtggaactcgaaggccgagcaggggctactgtccccttggaacacgtaaagacccctacagcgctgcggccactcatccgagccatcttcgcagtcggggtcgttgtcgcaggcccacagctgggggatgcaggtggagctgttgcactggaagctggcgggaccacaggtgagcaccgggcaggaggcctcgtctgagccgtccaagcagtcccggtctgagtcacagacgaactgccgagagatgcacttcccatcgtggcagcgaaactcgtcctgggagcacgtcttgggggctgcagggatggatgggccgagaccaccatcaccgtgtgaagtctcccaacaccagcccattctatagccggggacgctgccgcagtgaggccaggcccctggaaaggcgggctggggagcagtcaggggccatggactctgaaccactgccctctcggtgcctcagtttcctcatctgtacacatttcccagcactgctatgagcactggtgcgctaataggtgtaaagctgttaaactgagacctgcaagatggtagcacaatttatagaattgctgtccttattttgggttgagtatcccttctctaaaatgcttgggaccagaagtgttttggattttgaatttttttggattttggaatattttcagagttggaatatttttctgattttggaatgtttcaaatttggaatatccttaatgttgtgggtgagcactgactatctggaccagtggtgtgggggtaagaatttatcaagacagttgtaggtgcagccggcctcagtggctcatggccgtaatcctagcgctttgggaggctgaggtgggaggatcacttgaggtcaggagttcaagaccaccttggccaacatggtgaaaccccgtctctactaaaaatacaaaaattagcctgcgtgctggtgcacgcctgtaatcccagctactcgggaagctgaggcaggagaatcgcttgaacccagtaggtagaggttgcagtgagctgagattgcaccactgaactccagcctgggcaaacagagtgagactccatctcaaaaaagaaagaaattttaaaaaaggtagttgtaagtacagaaagacagatttattccagaaagtaggtaggaaaataccttgcaagaaagcaatgagcaggtcagcaagagaggagctgactgccagaagacaaaggcttgctgggaatttttttttttttttttgagacgaagtctcactcttgtcccccaggctggagtgcgatggcaagatctcggctcactgcaacttccacctcccgggttcaagcgattctcctgcctcagccttccaagtagctgggattacaggcacctgccaccacgcctggctaatttttttgtatttttaatagagacggggtttcaccatgttggccaggctggtctcaaactcctgacctcaggtgatccgcccgcctcagtctcccaaaatgctgggattacaggtatgagccactgcacctggccgcttgctggagattttatagaatggtgcttgtgctgtgcgctgaagagggctttgtgcagtacttataatgccgaggttgcagtgagctaacttgcaattttctatcagccgaggtgtctgatgatagctgggagcaggaagataaggagttatttacgcaggagggctgtgtgttctggaccatggagaaaggcagagttacatagtttgtcggccttcttcttctttttttttgagacagaatttcgctcttgtcccccaggctggagtgcaatggcgtgatattggctcactgcaacctctgcctcccaggttcaagtgattctcctgtctcagcctcccgagtagctgggattacaggcagacgccaccatacctggctagtttttgtattttcagtagagatggggtttcaccgtgttggccaggctgctctcgaactcctgacctcaagtgatccacccgcctcagcctctcaaaaggctgggattacaggggtgagccaccgtgcctgaccctatctgccttcttttattgctttcctttggttcggtcagcctggtttttttcctaattaggactccacactcagtggtaaaaatccgaaatccaaaatgctccaataagcatttccttctaaaggtcagtgctcaagacgtttcagaatttcgggtgctcaagactttgaatttcggggttttggatttggatgtgccacttgtattaagacagccaagaagacgcccagcttcaaagtccatttcccttcgggattcttggccttgctccttggcagaactttctggcttttcccccttcatgttacgtgggtcattgaggcttggctagcaagcgtcactatgtgttcagcctcacggggcggggatcacaggatcacggggatcacgaccagcgggaatcacagcggcttgccagtgtgtgtgccaggtggctagccctcggcagggacagcctccctgactgtgcgtgacaaacccgaagaggtagcaccatccccactttgtaatgcctcctggtcaaggggggatttgaagggcggaagaggcttggtatgagcccccaagagatggagcccagttcggggcagctgccttgcagctcgagcaggaccccgtagagacaaagtcagaccactccccaggactcagataggctcaatagcaaaggcagggccacacttacgacagccttgctcgtctgagccgttgtcgcagtccacttggccatcgcacctccagaactgaggaatgcagcggttgacacggcccccacagctgaagtccccggatttgcaggtgacagacactacagaagagacaggattgaactgtcactcaaaggaaagacccactgaggccgagcacagtggctcacgcctgtaatcccagcactttgggaggccaaggcgggtggatcacgtgaggtcaggggttcaagaccagcctggccaatatagtgaaaccctgtctctactaaaaatacaaaaattagttgggtgtggtggcgggcacctgtagtcccagctactcgggaggctgaggcaggagaatcactttaacctgggaggaggaggttgcggtgagccgagatcctgccattgcactccagcctgggtggcagagtgagactccgtcacacacacacacacaaaaaagacccactggccttgccaatcctgtctttgcaaaggaaaaccccagaactttgaagagaatgtcaatcccacttttttttttttttttgagacagagtcttgctctgtcgcccaggctggagtacagtggcacgatcttggctcactgcaagctccgcctcccgggttcacgccattctcctgcctcagcctcctgagtagctgggactacaggcacccgccaccacgcctggctaattttttgtatttttttagtagagacggggtttcaccgtgttagccaggatggtctcgatctcctgacctcatgatcctcctgcctcggcctctgaaagtgctgggattacaggtgtgagccaccgtgcctgacctaatcccacttttttttttagtagagatagaagtttcatcatgttgagcaggctggtctcaaactcatggcctcaagtgatccgcctacctcagcttcccaaagtgctgggattctaggcatgagccaccatgcctggtctcccattttaaaaaaatatatatatacatacatatggggcgggctcagtggctcacgcctgtaatcccaacactttgggaggccaaagctggcggatcacgaggtcaggagattgagaccatcctggctaacgtggtgaaaccccatctctactaaaaatacaaaaaattagctgggcgtggtagtgggcgcctgtagtcccagctactcgggaggctgaggcaggagaatggcatgaacccaggaggcacagcttgcagtgagctgagatcgcgccactgcactccagcctgggcaacagagcaagactccgtctcaaaaaaaaaaaaaaaagaaaagaaaaagaaaaaaacaaaaacaaatatttatttattacttattttttagagatgaggtctagctatgccacccaggtggccctcaaactcctgggctttataaagcaatctttctgcctttctgcctcagcctcccaagtagctgggactacagacacaagccattgtgcccggccaagcctacccctttatgggtcaaaacggagggcatttaaatggagcttgttaaaaactggacattaggctgagtgcggtggctcacacctgtaatcccaatactttgggagttcgaggcaagagaatcacttgagcccaagaggtcaaggctgcagtgaagtatgatggtaccactggactccagcctgggcaacagaattagactccatctcttaaaaaaaaaaataggccgggcatggtggctcacgcctgtaatgccagcactttgggaggcggaggcaggtggatcacgaggtcaggagatcgagaccatcccggctaacatggtgaaaccccatctctactaaagatacaaaaaattagccggatgtggtggagggtgcctgtagtcccagctactcgggaggctgaggcaggaggatggcgtgaacctgggaggcggaggttgcagtgagctgagatcacaccactgcactccagcctgggtgatggaacgagactccgtctcaaaaaaaaaaaaaaaaaaagacattaggttatgcaaagttttggaacaagatagaggtggtggccacacagcattgcagatgtattaatgccactgagctggttaatttcatgttatgtgaaattcacatcaattgaaaaaacaatagagccatttaatggctttaaggaaagctccaataattcattctctccccacctcctaattcatgattgaatacatcaaaatccactggccacttttccagccgccatcatcaaaaaggggttaagaatcgtgtcacaggccaggcgtggtgcctgtaatcccagcactttgggaggccgaggccagcggatcacttgagaccagaaattcaagaccagcctggccaacatggcgagaccctgtctctattacaaaaataaatgcatatcatgcccaaaggggactcacagcacgtctcctgggactcatcagagccatcctggcactcagcgctgccatcgcagacccacttgtaggagatgcatttcccgtcttggcactggaactcgtttctttcgcatctgtcgcccactgagagagaggaaaaggagaaagggtctctcaacgccagaatcagaaactgaccacgtttcctgtgtctatttcctgccaactaaagaattaaccagaaatgtcatccgatcaggaacagtctgattcccagggaattaagcaagcacaacaaatgaaattttatgaaccccaaaattcagtggaggacacaaagaaggaacccaagagagacacttgtcaacaaaggctagtgttgttgattccaaaatatggactctctggggtatgggaaaaaaatattagaacttccatgcacattaataaagaaaggaagagtatttagcatattaaaacctgtactacagctgggcatggtggctcatgcctgtaatcccagcactttgggaggccgaggtgggcagatcacctgaggtcagcagttcgaaaccagcctggccaacatggtgaaaccccgtctctactaaaaatacaaaattagctgggcgtggtggcacatgcctgtaatcccagctactcaggaggctgaggcaggagaatcacttgaacctgggaggcagactttgtggtgagccaagattgtgccattgcactccagcctcggcaacaagaacaaaactccgtctcaaaaaaaacctgtactgcccaggcatgttggctcatgactgtaatcccagcactttgggaggcagaggtgggtggattgcttgagcccaggagtatgagatcagcctggacaacgtagtgagaccctttatctattataatttttttaaaagttaaaacaaaacaaacaaaacctgtgttgttctatccatctgaccattaaaaaaacaaaaacaaaaaacttgtactgtaaagagtcatgaagaaaactcacagacacagcataatcattaaggtggaagaaaacttgagttttcttcagtaggtagggaagaaatacttagataaagaattatgagaaattataaatgtagaggccagagaacacaaatttagcagtgaagataatcatgtatctgaagatcagatcaaaagaaatgggagagaaacattaacaaaagatataataagagaaaacttttccttagaaaaccaagacttagattattacattaaaatgagaacaaagtaactggaaaatttcccaaaatatatttacaccttggaaaagagatcaaagtcttattgaatgtatttagttttcttctattttctttttttttgagacagggtctcactttagagcgatcagtggagcgatcacggcccactgcagcctcaaactctgaggctcaagcaatcttcccatctcagccccctaagtagttgggattaaaagcactcaccaccatgccaggctaatttttctactttttgtagagatggggtcttactgtgttacctaggctggtcttgaactcttgggctcaagcaatcctcccacctcagcctcccaaagtgttgtgattataggtatatgccaccacacttggcctgcatttagttttatatattaaatttggatttagaatactttttttttctttttttgagacatagcttcgctctgttacccaaactggagtgcagtggcaggatcatggcttactgcaacctggattgaacctcgtgggctcaagtgatcctcctgcctcagccccccaaataaatgggactacaggcacatgccaccatgcccagctaatgttggaattttttgtagagacaaggtctcactatgttgcctaggctggcctcaaactcctaaagtgatcctccctcctcagcctcccaatatgctgggattacaggcatgagccaccacactgggccctctaatacctttatatgaaagattctggttctgtgaactagaatcaaagcaacttttataaatcaaagtataaactttgattccctatgtaaactaaggcaataaaagcaataacaaattattattattattattttcagacagagtctcactctgtcacccaggctggagtgcagtggtgcaatcttggctcactgcaacctctgcttcccaggttcaagcgattctcctgcctcagcctcccaagtagctggggatcaccagcaactgccaccatgcccaggtaatttcttgtattttagtagagatggagtttcactatattggccaggctggccttgaactcctgaccaaagtgctgggattataggctggagccaccatgcccggccgcaataacaaattatgattgcttatctcagcatgcactatgcacttattattactataataaggtaacaataccaagaagaaaaaaaaatctgccttttttaaaattttattttattttatttttgacacagagtctcactctgtcgcccaggctggagtgcaatggcacaatctcaactcactgcaaacctccacctctgggttcaagtgattctcctgccttagcttcctgagtagcttgggaatacaggtgcgtgacaccacacccggctaatttttgtattttttgtagagacggggtttcaccatgctgcccagcctggtctcaaattcctgacctcaagtgatctgcctgcctcagcctctcagtgctgggattacaggtgtgagccaccatgcccagccaagtctgactttttatctttgtgaagatgtaacagatgctatccaggaaaatcacatacaagggtttgttttttgtttttgagacagagtctcattctgttgcccagactggagtgcaatggtatgatcttgactcactgtaacctctgcctcccaggttcaagcgattctcctgccttaacccttccaagtagctgggattacaggcacgcgccaccgtgcctagctacataagtacatcaataagttctgatcgatggttgaaactttgggaggccaaggtgggcggatcaccaaatcaggagatcgagaccatcctggctaacatggtgaaaccccatctctactaaaaaaattagctgggcatgttggcgggcgcctgtaatcccagctactcaggaggctgaggcaggagaatcgcttgaacccgggaggcggaggctgcagtgaactgagatcacgccaccatactccagcctgggcgacagagactctgtctcaaaaaaaaaaaaaaaagaaaaagaaaatatgaccacatgaccaggtgcagtggctcatgcctgtaatcccaacactttgggaggcagagacaggattgtttgagcccaggaattccagactggcctaggcaacataccaagaccccatctctacaaaataaaaaaaagaataattttaaaaaaagaatataggaccgcatcttctgtgataatcctttcagaaggcagagcctaattcgtctcccctggagtggcactggacttttaatgacttgcttctgataggaaaatgtagagacgacagggagtggcttctgagcctagttcatggccatgctcattgttggatcgactgctccaggggaggccagctgcatgtcatgagtccactcaagcagctggagggagagctccacgcagcagggaactgaggcctccagccaagagccactgagtgcgccatcttggaagtggatccttcaaccccagccaagtcttcctatgcctgcagcttctgaaaatatgtttttctctcctgccaatattttgattgcaacttcatgagagaccctgagctggaaccgtctagctgtgctgcttccaaattcctgacacgcaaaaactgagaaatcataaatgtgttgttttaagccactacattttgggctaatttgatatgtagcaagaaatgagtcatttcctcctttaagcacagttgaaactgagttgtaggtaattaacatacaacctaactttaaaagatgtatctatgtctttttttctttctctttcggacaccggctttcactctgttgcccaggttggagtgcagtggcatgactgaggctcacggccgcctccacctcccaggttcatgcgatcctcctgcctaagcctaactcaacagctgtgactagaggggtgcaccatcacactcagctaactttttatttattttttgcagagacaggtgtctcactatgttgcccaggctggtctcaaactcttgggctcaagcaatccacccacccatctcggcctcccaaagtgctaggattacaggcatcagccaccgcatccagccccctttatccatttcaactttgatggttgacccagcacattcatgtggattccctgaaagttagagtagtaagggggttagatagacaatcctgggcttcactggctttccaggccatttaactagaacaacttgggtaactgactaaatccttctgggactcagtttcctgatctgtaaaatgggggagaatggcagtctctacttcctagagggtgttttgagaattaaagaacagaacaggctgggcgcggtgactcacgtctgtaatctcagcactttgggaggccgaagtgggcggatcacctgagttcaggagttcgagaccagcctggccaacatggtgaaaccccgtctctactaaaaatacaaaaattagccgggcgtggtggcgggcgcctgtaatcccagctgctcaggtggctgaggcaggagaatcacttgaacccgaatgcctgtaattgcagctactcgggaggctgaaacatgagaatcatttgaacccaggaggcaggggctgcagtgagcccagattgtgccactgcactccagcctgggcaacagagcgagactctgtcaaaaaaaaaaaaaaaaagaaaagaaaaaagggaaggaagagagaagaaaatgagtcgagctttggaatctgctgtggtcacaaactctgataattctcttgcccaactacagatctgtcaatactgtacacaccccgctttgacaatatcgtacacacctcactgactcacagctcaatttcaactgtgcttaaaggaggaaatgactcatttcttgtgctgacacaccgggtgggcaaaaagcaattgagattccaggaggcttgcgataaataaaaaggaaagttgggccagaggcgttggcaatcaagatcttaagggaggagcctctgatcaccccactaggtgaccgcagctttggtgaccactaatccaatgctctcacctccctacctctgtacgagggcccagcttacaaactaaatgtgccactgggtagaccgggaatgtcagtaacacctgaaggtcctttaaggagggataaagaacaataaaaacctttccctgaagaaaaacaaaacctttccctggacctcaagctctcccctgactattattctccaaatatttgctggccacaggtggctcaagactgcacccatgggaaggaccccacgatgacctatttctgtgatctaccacctgggcaactctccagacaatgtttcaaaagtggatttccccagcaccttgggaggctgaggagggaggactgcttgagcccaggagtttgagaccaaccgaggcaacaaagcgagaatcccttgaaccccatctctacaaaaaatacacaacttagccaagcatagtggcacacacctgtaatcccagctacttgggaggctgagtggggaggatggcttaagcctgggaggtcaaggatgcagtgatctgcgctccagcctgggcgggagactctgtctcaaaaaataaaaacaaacgaacaaacaaacaaaaaatttaaacttagctgggagtggccgggttcgggggctcacgcctataatcccagcactttgggaggctgaggcgggtggatcacctgaggttgggagttcgagaacagcctgaaccaatgtggagaaaccccatctctacgaaaaatacaaaattagccgggcgtggtggtgcatgcctgtaatcccagctactcaggaggctgaggcaggagaatcgcttgaaccaggaggtggaggttgcggtgagccgagatcgcgccattgcactccagcctgggcagcaagagcaaaactccatctcaataaataaataaataaataaataaacaaacaaactgaggtgggagtggtaacacgtgcgtatagtcccagctactcaggaggctgagagaggaggatcagttgagtacagaagctggaggctgcagtgagctataactgcacacttcagcctgagcgacagggcaagaccctgcctccaaaaaataaaggcagattttactgccacaggcgcagccagacagcagttgcctgccaaatgagctcccttggcctagctagtggggacagtgctcaggaacggaacagtgctgagtgagagcacgtcagggagctgtcctcacagttgctgccctttccgagcaaggggacaaaaccagtcctgttccaaacatcaacggcccaacgaaaccgcacctctttcttattctttcaagcaaggttggcgtttttcatattagaccatttgaatttcaggaaaagcaaattaggccaagcgcggtggctcacgcctgtaatctcagcactttgggaggccaaggcaggcggctcacctgaggtcaggagttcgagaccagcctggccaacgtggcgaaaccctgtctctactaaaagtacaaaattagccaggcatggtagcgggtgcccgtatcctagctacccaggaggctgagacacgagaatcccttgaaccccggaggcagaagttgcaatgagctgagattaggcaatctaagcgagactccatctcaaaaaaaaaaaaaaaaaggaagtaaactagagcatggatccccagattttctcacgctagggaagcctaaaaagcaatgagctcctctcaaaaacacaaaaacacaaaaaggccgggcacggcggctcacgcctgtactcccagcactttgggaaactgaggcgggtggatcacgaggtcaggagttcgaggccagcttgaccaatatggtgaaatcccatctctactgaaaaatacaaaaattagctgggtgtggtggcgggcgcctgtagttccagctactcaggaggctgaggccgaagaatcgcttgaacctgggaggcagaggttgcagtgagccgagattgcgccactgcactccagcctgggcaactcgaacaaaaataaacaaacaaaaaaaacacctctataaattctagtcctctagccctctgatctctcaagtcacgagtaacaagtcaggaacaaggtcatcgaaacaaaaaaagagaatacacatttctgctttttcccccagcacacaaatgaggtggtgaatgctttcgatgttttctttccctgtgctactgaaaacagttgtacaaggaaatcaaaactgtagctagaatcatttccttgaaggggaaacaaacaaacgaaaatcccctggcttaagggaacagagccagctgaaaatgaatgagaaatcaattgattggctggcacagtgggtcacgcctgcaatccttggactttgggaggctgaggcgggtggatcacgaggtcaggagttcgagaccagcctggccaacgtggtgaaaccccatctctactacaaatacaaaaattagccgggtgttgtggcaggcgcctataattccagctactcaggaggctgaggcaggagaattgctggaacccgggaggcggggattgcagtgaggcgagattatgccattgcactccagcctgggtgacagggcgagactccaactcaaaaaaaaaaaaaatagacatcaattgatcagtgcttctttccaaataaggtgggtattttccccagagtgatctcagcaattgattttgcttccggaagagagagcctgactcactgtttgctgctggtcggttacatctgcagtctcttagcaacaaaaggctatttgcttgacagttgggacagagtgtggaaggaaaagggacatcaaaaagcccatcaaaataataataataataataataataataataaagcccatcaaagcacccatcaaagcaaggagcaaccgacccatctagaattggatcttatcagggaggaagtctacagataagagcaggaatgaggaacagaattcccctacaggttttctgtctcaacaaaggtctccctgttttttcccagtgttccctggaagataggtatttccggaaatgacaagggaatcaccctgcggctcgttaaagcagccaactcccttactcaaatttgggtgagtcattgacacgtttggagctgcgctcaccgctgttgcctgattttggtctaagtgaaggcttgcggttcagattccaacaacttccctttgtaaaggaaatggacaagaaactcccccctggatatgccttgaagccagctacagcgtgaggtggtgcagctagaaagtgctagaaacacacaccagctctcagaagtctggaggaaaacatcaggggtgtagtctccttgacaacagaggaaacatcacattctcagccatcccgggagagagaaactaaagtgatgaacaaacaaggccttgcctaagacttccttaacattttctcttaaggaagaggttgattggtgagtgagatacacattaatccagtgcctctctttcttttgtaaaactgagtggcagaatgtttgcaatcatcatcatccccggtggggcgcggtggctcactcctgtaatcccaacactttgggaggctgaggtaggaggatcgcttgaggccaggagttcaagaccagcctgagcaaccaagcgagacctcatctctacaaaaagttaaaaaataaataagtaaataaaaataaaagaacaatcatccgtatttcattacaccctccctccctctctggcctcccagaggaaactggtgtgttagttacagcgtgaatttcaaggcagttcaaagctctccatccagtcaaagccaacccccttgccaattaaaaaaaaagtttcctgcaatccttgtgttcatcaggcaatcccaatccttttctaggctaggctggttctcaggagggaaagggccatgtagctgttgtctagggcgaggctgtctctctgcaactaatttaaagccacctaaaaagctctaactcaggatcatgcactaaccagcctcttgtggaaatctaaaatctaatccatttcacccagaggaaaaatcgccgcttggacagctgaaccgaagccattcacagcctctgaagaagcgaggccaccccagggggtcggtcccgggggatagctgccccaccgtggctgaagatctcggctgcagaccaaggaggggcggggagattctgaggcaacgtttcaacctcgtaaggaaccgaggccttgagggtggccgggggcccctctgtgaacttgatcggggctggtggggcgagggcgccccccaggacaaggtggggacggaggtgtcgccacagagcacagcggaaaccggggacttcgccaggagggcccaggataacggagggcgactcgtgtatgtcgcggaggcggctccggggacccgggacttgtcgtcgcctttgtgacaggaaccgcggaggaacgccaggcctcccctgcatccgcctcgccccggacaaggtgaggctcagacttccgcgccagccccgccccgctcgtacacaagccccgtcctcccgacgcccgcctccgcctccaccgcctcacattggacaaggggagtggctcgagggtggcctgttggactacacccaatggaattcggggggcgggccaaaggggcgggggcaggggcgggagggggtggcccccgtcccggagcacgcggcggaatcccgggactgcacccaactcaggatggcagtggcgccctggggtcgcgcaaagcggatcgggacccctgagcccgcggtgacctccaggctggacatccgggtctccagtcgccctcgcccccagaaggacttaaggcgggggtgggagtgatcccttgttttaggactggaggtccccacacccagctccgagttagaagagagggtcccggccgggcgcggtggctgacgcctgtaatcccagcacttttgggcagatcacctgaggtcggggttcgagaccagcctggccaaaatggtgaaaacccgtctctactaaaaatacaaaaattaggcgggcgtggtggttgggcgcctgtaatcccagctattcgggaggctgagagaggagactcgcttaaacccgggaggcggaggttgcagtgagctgagatcgtgccactgcactccatcctgggcgacagagctagactccgtctcaaagaagatgcggtccctcaccctgtggagacttgggggacagcggtgccccgtttcccttaaatccctcagactcctcccgaccctcgcgctcccctcagcgcccccctccagcgccccctccagccgtttgggaaggaccccgtgccattaccccacaagtctcccagggatggagtgattatttgtacccaaaaaaataaattcccaagggccccccgggggctccctctcaacctattctggcgcctggagcaagccttacctgcagtccccgccgcggcgaggagcaaggcgacggtccagcgcaatttccagccccagggccccatgctcgcagcctctgccaggcagtgtcccgacccggatcacgacctgctgtgtcctagctggaaaccctggcttcccgcgattgcactcggggcccacgtcatttacagcatttcaatgtgaggtttctagcagggggaggagtttgcagtggggtgattttcaaatgtcttcacctcactgcaagaggaggagtttcgaacggccgatgtgacatcggctttttaacccgtgaagctctgattcccactccagtccttcgaaagtgtcgccagggcaggcgacttgatttgttgtatttgggtctccggtgaagagctgacgccccctcaaaattggaaacgcatcttctgaaagatcctcctgaaatttctcgatgtttaactgttaacattttgctgttgttgtccacagaaggataacaacagcctttcaagatcctccaatagcctaatgccattgtcctctctgcctcaaaaggaaaacactaaaaatgttgggaacttccgccactttctatatttgccttttcctttctaggaattgtgtatagatttttagcttcctttcgttgtatattgtttttacattgttattccaaatcacctaatagacactgatcaatcaggaatttaaataaaatcttcacaaaagtacagccaaaaaaatattttttgttttgtgggatcccgcctttggctgagtataaacatctgaaaaatcaattgtacggatacctggagtctggacgtaaatattgatttctccccttaggagaaggagttgaacaaacagaagggcggtttcctctccctcaaagcaaaatcaaaacaaaacagggctttcacagttgaacttgaacccctaagccacagagagctggtggagaccaacttttagaattgagtctctttggggactcatggggttgccagaggcctcttgccaaaaaggcacatgtgagaaacttgcctgaaccccacacagggctgggcagtcttggcggttcccccaggaataagctggatttctctgggattttgcaaactgactttggcaggcagtgctaacctctcagcaggattttagggaaacctaggagaccaggcagaaaagggacaaattgaactctcagaaggacaaaaaaaaagattaatcagggaaaataattttttaattatttttattataattttttaaataattatttattatttatttatcattatttccagctgtcactcaggctggactgcagtggcgtgatcacagctctctgcagcgtcaaccctgggctcaaggaatcctcccacctcagcctcctgaatagctaggaccacaggagtgcaccaccatgcccaactaatttttaatttttttttatagatggggtctcactatgttgcccaggctggtcccaaactcctagcttcactcaatcctcttcctcttgcatcatgatgcctctcaaattgctggctttacaggcatgagccactgtgcccaacccagaagaagaaattgatgataagaatttttggcagttaagactcagtttcagaattcggccttggacagataaattagctttcccaacctgtaaaggggccatcaaaatgcttgaacctacttggcaggctcagtgtcaaggtcaaattgaaataattagcgggctgggcatggtggctcacgcctgtaatcccagcactttgggaggctgaggcaggtggatcacgaggtcaggagatcaagaccatcctggataacacagtgaaaccccacctctactaaaaaaaaatacaaaaaattagccgggcgtggtggcgggtgcctgtagtcccagctactcgggaggctgaggcaggagaatggcgtgaacccgggaggtggagtttgcagtgagacgagattgcgccactgtactccagcctgggcgacagagtgagactccgtctcaaaaaaaaaaaaaaaaaaagaagtaattagcaatcacctagagaagtttacaaggataggcaagttctaggagctgctgcaacgtttataaatgtgtccccattgaatcccattccttatgccatttgcgacattaaacaaaaaagtgaagtctggatgtggtggctcatgcctgtaatcccagcactttgggagggtgaggcggggggatcacttgagcctaggagttcagaacaagccagggcaacacagtgggaccctgtctctacaaaaaatacaaaaataagctggacatggttgtgtgcgcctgtagtcccagctactcgggaggctgaggcgggaggatggcttgagcccaggaggtcaacgctgcactgagctgtggttgtaccactgcactccagcctgggcgacagagtgagactgtgtctcaaaaataaagataagtttaaagattcaacttaaagcaaaaaataagtaaataaaaatttaaaaagtaagtatcactggatttttttttctttttttttttgagacagagtcttgctctgtcacccaggctggagtgcagtggtgtgatatcggttcactgcaacatcctgctcccaggttcaagcgattctcatgcctcagcttcccgagtagctgagattacaggtgcatgccactacgcccggctaattttcttatttttagtagagacggggtttcgccatgtttgccgggctggtctcgaactcctgacctcaggtgattcacctgcctcagcctcccaaagtggtggaattacaggtgtgagccactgtactggcccaatatcactgggtttgatttcccttaaaaaaaaatttaaggctgggtgcggtggctcacgcctgtaatgccagcattttgggaggccgagacgggtggatcacgaggtcaggagatcgagaccatcctggctaacaaggtgaaaccccatctctactaaaaaaatacaaaaaaattagccgggcgtggtggtgggcgcctgtagtctcagttactcatgaggcagaggcaggagaatggcatgaacccaggaggcggagcttgcagtgaaccaagatcgcgcctttgcactccagcctgggcgacagagtgaaaccctgtctcaaaaaaaaaaaaaaaaaaaaaaaaaatttaagatggccagtcacagtggctcatgccctataatcccagcacttcagaaggccaaggcaggtggatcacctgaagtcaagagtttgagaccagcctggccaacatggcaaaacccggtttctactaaaactacaaaaattagccaggcatggtagcaggcgcctgtagtcccagctacttgggaggctgagtcaggagaatcacttgaacctgggagatagaggttacagtgggccgagatcacgccactacacttcagcctgggtgacagagggacactccctctgaaaaaaaagaaaaaaaaaatgcgccgggcgtggtggctcacagctgtctcacacctgtaatcccagcactttgggaggcagaggtgggcggatcacctgaggtcaggagttggtgaccagcctggctaacaaggtgaaaccccgtttctactaaaaaaaaaaaaatacaaaaaattagccaggcgtggtggcgcatgcctgcaattccagctactagggaggctgaggcaggagaatcgcttgaacctgggaggcagaggttgcagtgagccgagatcgcaccattgcactccagcctgggcaagaagaccgaaactgtctcaaaaacaaaaacaaaaaattataagacgtaggctcagtgtgtgtcatgagtccacatctggttacccagaaagagttaccaggagagggactcccttcccggaaggcacttggcttacatagttcccagagctagaggtcagggcaggtctggaaaagagccacaaaaactctgaaaagcacattcctcgggtgccaaggcctggccaaggtttccagaacagcgttccccaggcccctgacctgcctgccatgcacggacacggccatacatggctctgaggactgagtcatgctgataaatttttctgtttcttggtttccatttgtgctcctgtaactagctcacagggctcttgtaaggattaagttaaaatatataaagcgactagaggccaggcgaggtggctcatgcctgtaatccccagcactttgggaggcagaggtgggaggatcacttgagcccaggagttggaaaccagcctgggccacatagtgagaccctgtctctacaaaaaaaaaaaaaacaattagccaggcgtggtggctcacacctgtggtcccagctactcaggaggctgaggtaggaggattgcttgagccaaggaggttgaggctgcaatgagctacggtcgcgccactgcactccagcccaatcaacagagccaggctgtctctcaattaaaaaaaaaaaagtgattagagccacactcggtgcataataaataccatatatgggtttgcttttctctgtggctgcttttgtgttgcaactgcatttttttttttttatctcttcagggaagacctgccagttcctgctgtttttttttttttgtttttttgttttttgttttttgttttttgacggagtctagctctgtcacccaggctggagtgcagtggcgcgatctcggctcactgcaacctccgtctcccgggttcaaacaattctcctgcctcagcctcccaagtagctgggactacagtcacgtgcacgtgccaccacgcctggctaattttttgtattttttttttttttttttgagacggagtctctgtctgttgcccaggctggagtgcagtggcgcagtctcggctcactgcaagctgcgcctcccgagttcacaccactctcctgcctcagcctcctgagtagctgggactacaggcgcccgccaccacacctggctaatttttttttgtatgtttagtagagatggggttttaccgtgttagccaggacggtctcgatctcctgacctcgtgatccgcccgcctcagcctcccaaagtgctgggattacaggcacgagccaccacgcccagcctaattttttgtatttttagtagagacggggtttcactttgttagccaggatggtctggatctcctgaccttgtgatccacccgcctcagcctcccaacgtgctgggattacagacatgagccaacacgcccggcctgtgcctgccttctttctattagggagtcagtaagtaatcctgctgtggaacccactttattggaaagttcctgaactcccaaagttatctaatacaactcagggtgggcattttcctcgctgtaatagcccacctgcccccgtcctcccattttctacctctctaattcaccaggaggctcagtccggaataggtctctgccccaacgagcctggcctttggcagaggtgagccattgcagctgtggtctggccttaagcccatcaatccacagagaaaccatcagtaacagcagagacctcggtgcctgccagtgggtggaatcaggaacctgccttggctcagctggcatcagttatcttcacaaaatgcccaaagccgtgtgctgacagacctcatggcttgctgaaatacagcaatactaaaattccacagtgcaattccacagtgcctcctagaatatagcaatagtgaaaattgcataaataagtgaaaataaggccgagtgtagtgggtcacacctgtaatcccagcactttgggaggctgaggtgggcggatcacttgaggtcaggagttcaagactagcctgggcaacatggtgagaccctgtctctactaaaaacaaaacaacaaaacaaaacaaaacaaaaaaccgggagagtggagggctagggaagggatagcattaggagaaatacctaatgtagatgaccggttgatgggtgcagcaaaccaccatggcacatgtatacctatgtaacaaacctgcacgttctgtacatgtatcccagaacttaaaagtataataaatacacatatatttttaaaaagtagctgggcacagtggcgcacacctgtagtcccagctgcggagaggctgaggcacaagaatcgcttgaacctgggaggcagaggttgcagcgagccaagatcacaccagccgggtgcagtggctcacgcctgtaatcccagcactttgggaggccgaggcaggcggatcacgaggtcaggagatcgagaccatcctggccaacatagtgaaaccctgtctctactaaaaatacaaaaattagccgggtgaggtggtgggcggctgtggtcccagctacttgggaggctgaggcataagaatggcacgaacctgggaggcggagcttgcagtgagctgagatcgtgacactgcactccagcctgggcgacagagcgagactccatctcaaaaaaaaaaaaaaaatagatcacaccaccacattctagcctgggcgacaagagcgagagtctgtctcaaaaaaaaaaattgccttataatccagaaattccacatctgaaatatccccaaaagcattgaaagcagagacccaaagatatatgtgtataccatgtacatagaagcttcttcaaaatggccaaaggtggaatcaacccaagtgtccatcaggataaacaaaatatgacatattaatataatagaataaaatttagccttaaaaacaaggaaattcaggcatcctccaacatggataaaccttgaggatataaggccgggtgaaataagccagccacaaaaggacaaacaggtttgactccacttctattaggtcctagaataggcaaattcatacaaaaagtagacaaaaagtagaatagtgattaccaggggctgagaggaagaacgggaaattgggtatggggttttcactttgcaagatgaaaaacttctgcaggtgagtagtggtgacagttgaacaacaatgtgagtatactttaatgcctctgaacttgaaaatggttaatatggtaaattttagggctgagcgtggtggctcctgcctgtaatcccagcactttgggaggccgaggggggcggatcacttgaggtcaggagtttgcgaccagcttggccaacttggcgtaaccccgtctctactaaaaatacaaaattagccgggtatggtggcaagcacctgtaatcccagctactcgggaggctgaggcaggaaaatcgcttgaacccaggaggcagaggctgcagtgagccaagatcatgccactgcactccaacctgggcaacagagtgagaccctgtctcaaaaaaaaaaagggtaaattttatatctattttgctacaataaaaagatttaaaaaaaaaaagcaaaagggctcaaaaggtggacacatggaaaaacctccatcccatgcaggtcccctgccctctgacaattaagactgctgaccttttttgtttttttttgagacggagtcctgttctgtcacccaggctgcagtgcaatggcacagtctcggctcactgcaacctctgcctcccgagttcaagcgattctcctgcctcaggttccaaagtagctgggactacaggcacatgccaccgtacccggctaatttttgtatttttagtaaagatgaggtttcactatattggtcaggctgatctagaactcctgaccttgtgatccgtccgcgttggcatcccaaagtgctgagattacaggcgtgagccaccacgcctggccaggactgctaaccttttaagcatatccttctagaacattctaagcatatacaaggaggagagtatatcatattcccctccatttccccctgtacattgtagtacccattcatactgctctataccctctggtttcatttattgaggtatcttaaagaatgttccaggggaaaaaaaaaagaatgttctggaacaacagaaatcagactatggatggacaggatttccgcaggtaggagcagcgccgaggtggaaatggcagatcagtgaaagctggctgaggcaaggcatatgtgtggaacgctgggaggttgaaataaaattgggagagacactttcacatcccctgggaatgaaagaaactatttttggggcagtgagaagactttgaaaaaaaaaattagagttcttatgcgggtgcatgacttctcggttcggtcatgggagtggggctaccagagggaaaggagactgatcaatcaggttgggacttggggtgaggtggggcgaggacagcaggacagaggaaaaagtatacacctcttacgttagactttatatttatctctcgagcaggtcattatttgaatcattaaattaaactttctttctttttttttttttgagacaagagtcttactctgtcacccagtggcgcaatctcagttcactgcaacttccatctcccaggttgaagcgattctcctgcctcagccttccgagtagctgggactacacccggctactttttgtatttttagtagagacggggtttcaccatgtttgttggccaggctggtcttgaactcctgacctcaagagatctacccaccttggcctcccaaagtgctgggattacaggtgtgagccaccgtgcccgaacttttttatgttttttttgttgttgttgctgttgttgtttcttttttgagacggagtcttgctctgttgccaggctggaatgcagtggcacaatctcctctcgctgcaacctctgactccctggttcaagtgattctcctgcctcagcctcccgagtagctgggattacaggtatacgccaccacgcccagctaatttttgtgttttcagtagagacagggtttcatcatgttggccaggatggcctcgatctcctgacctcgtggtctgcccaccccagcctcccaaagtgctgggattacaggcgtgagccaccgcgtccggccttatttttttatttttatttttttgaggcagcctctttctctgtcacccagactggagtgtagtagttcaatcgtagctcattgcagctcaacctcctgggctcaagagatcctcctgcttcagcctccaaaaaagctaaaactagaggcatacaccaccatatctacctaatttttaaattttttgtagcgacagggtctcactatgtggcccagactggtcttgaactcctggactcaagcaatcctcctgcctgggtcttccaaagtcctgggattataggcgtgagccaacatacccggccgtaaaaatttcattcatgaagtgtccttgtcttctcatcgtttatgaattgtatctgtgtgaaacacattgtttacagactactcctagttagatttcacgaatgatttctggaaatatctagaatgatctggaagagtctggaaagctttggagggatgggaagtctggccaaaattaggaagagtcagatttccatcttgattacgttgcttctgtgaccttcctcggacgaatcatttctttctgggtcttctatttactcttcattcaagcaacttttcttggccaggcgcaggggttcacacctgtaatcccagcactctgggaggccgaggcaggtggatcacgtgaggtcaggagtttgagaccagcctggccaacatggtgaaaccgcatctctactaaaaatacaaaaattagccaggcatggtggcgggcgcgtataatcctagctacttggaaggctgaggcaggagaatcacttgaacccgggagacagagcttgcagcttttttttttttttttcttgcgatggagtctcactcttttgcccaggctagagtgcagtggcgcgatctcagctcactgcaagctccacctcccgggatgaagcgattctcctgcctcagcctccagagtagctgggattacaggcatgcagcatcatgcccggctaatttttgtatttttagtagagacggggtttcaccatgttggccaggctggtctcgaatccctgacctcgtgatctgcccgcctcatcttcccagtgttgggattacaggtgtgagccaccatgcccggccatatttttatttttatttatttttatttatctgcttttgggacagagtcttgttctgcagtccaggttggagtgcagtggcgcaatctcggctcactgcaacctctgcctccagggttcaagcaattctccttcctcagcctcccgagtagctgggattacaggtgcccgccaccatgcccagctaatttttgtatgtttagtagagacggggtttcatcatattggtcaggctggtctagaacgccggacctcaggtggtctgcccacctcagccccccaaagtgctgggattacaggcgtgagccactgcgcccagccagattctgcttttattttagctgacatggctgatggttccaaaggccaaggtcaggtgtttgttgaccacaatctaatcttggtctacaaagacctgggctgcaaggtcttccatttcccagtggtgggcagatccgttgcagttgctggggaacagactcgccgttatctggcatgtgcgtaactgtggaaaaaccaagatagaaggaaggacattggcagcagccaagatgggccagagtcctgtaatcccagcactttgggaggctgaggcggaaggatcacggggtcaggagtttgaggctagcctgaccaatgtggtgaaaccccgtctctactaaaaatacaaaaatcagccgggcgtggtcacaggcacctgtaatcccagatactcaggaggctgaggcaggagaatcgcttgaacccggaaggtggaggttgcagtgagccgagatcgcaccatcgcactctagcctgggtgacagagactgtctaaaaaaaaaaaaagaggccgggcgcggtggctcactcctgtcatcccagcactttgggaggcccgaggcaggcggatcataaggtcaggaaatctagaccatcctggctaacagggtgaaaccccatctctactaaaaaatacaagaaattagccgggtgtggtggcgggcgcctgtagtcccagctgctcgggaggctgaggcgggggaatggcgtgaactcaggaggcagagcttgcagtgagccgagatcgcaccactgcgctccagtctgggcgacagagcgagactctgtctcaaaaaaaaataaaaaataaaaataaaagaggggccagagtccaggactccaacctggctgagactgaacttcaactacccaagtagcaagtggctacaacgtttaaaattgcacagccccaggttctgatctggagatgggggtgggggcgtgggggcggtggtgggggcagtgggtgggggaagggtgtcttatatgttgcacttcattgcacagatgtcgtattggccgggcacagtggctcattcctgtaatcccagcacttcgggagaccgagacaggaagatcacttgaagccaggagttcaataccagcgtggccaacgtggtgaaaccccgtctctactaaaaatacaaaatttagccaggtgtggtgatggttacctgtaatcccagctactcaggaggctgaggcaggagaattgcttgatcctgggaggcagaggttgcagtgagccaagattgcgccactgcactccagcctaggtgacagagtaagactccgtgtcaaaaaaaaaaaagaatgtcgtatgtatggattacctgtgtgattaagaggagaaaggtgggccgcgcctgtaatcccagcactttggaaggccaaagtggatcgtctgaggtcaggagttcgagaccagcctggccaacatggtgaaaccccgcctctactaaaaatacaaaaaaattagccgagatcacgccattgcattccagcctgagcaacaagagcgaaattttgtctcataaataaagaggagaaaagtgaaataagccagtcactgaagtggagacactgtaggattcaacttataggcggtccccagagtaacagattcacagaaagcagattcacagagtagaacctggagtagaattctggtttgaccgtgattagggaacgaggctgtgggctggttcttacactcgagcatgtgttgagacttgcctggtttgaaattcccctagcaccagaataaaatggggggtgccaggggctggggaggtggaatggggagtgagtgtttcac

SEQ ID NO: 59 - DNA, 50325 bp, Mus musculus
tcgtgcataaggcacatccaaaaaacattcctttgcaaaaaacaaaggctaggtagaagaattggaatgtaccggtaaaggtactggccatgatcttactatggcccacaaaggtatacttatcccggtctcaatcatcaggagcaggatcatcttgggattcatcttgatctttcacagtccttgtcagtcgttctgggacccacagctgttgtcaatgatcctggggaaacaaacaaacagaccctctcgcccacgtcaacaccgtcaacaccggtggacaatgatttccacgcccttatggcaatctgattcacctgctcaaacacctgcactggatatcttgtctgttgctgtgcaaagcgaccttgaccaagcagcatatccctatcccatgctggatttcctgcagcagagttagccactgcctgttcactgtaaattcaataaggaaggctttccaatctaaatactgcccaggtgaaaggcatgccttcctcctcctctgccttggctctttcattttgtcctttctgtccacctgataacactgtgtctcctttctttttcctttttctttttaagcccttctcctcttccgacatactttcttgttgctctgtaaggattttctgacctgagttgactgcctctacacacgtttcaaacagtaacagagtccatatatcagaacaaacaagaccaaaattatcagacctacccacaaagggtcaataggaaaaaaaagcataactcatgaaccttaacttgtcccaaaaccgggaaccttaacttgtcccaaagccgggaaccttattgtctcaatcctttctttccttcctttcctttccctttttttttttcctttcccctttccttttcttcactatttccttttctttatcactgattccttttatttttcctcccttttcttttcctttttatccccctttaacccggggatcaatttgggagacttaccagtaccaccgttcctcagctgaagagttctgaatccacgctggatccttctcagcagtctgttttttttttttttttaaagatttatttattattatatgtaagtacactgtagctgtcttcagacacaccagaagagggagtcagatttcattacagatggttgtgagccaccatgtggttgctgggatttgaactccggacctttggaagagcagtcgggtgctcttacccactgagccatctcaccagccctcagcagtctgttttataggaacactttattaccaccgttccccagccgaagagttctgaatccacgctggatccttctcagcagtctgttttacgggaacctttattaacagctccttccccgtgatgcagttctgaatcctccctgtagcagggggtcttcgctagtgcctgaagatgtttcttgtcccgggtttcggcaccacttcttgcgcgcgctcgactggccaggaagaacaatgctgcaacaggatccttctgcacacgtttattgggagagcttgattgtagaggcgaaaagacctcgagcccagaactggtgctgcttttataggcctaggacaggcattctctctcatctgattggttaacttgtctctcatctgattggttaacttgtctctcatctgattggttaacttttgtcaattctcaaaacctcaccttggcaaaagaacctttactggctatgtatgtgtggtggccagcagtagccaactgccactctgcaactgccactctgtaactgccactctgcaacggcttcccacacacatcctctgggcaagtccaactccaaggaatgagatgctctcttctgtctggtttctaccagcatttatctgcatgtgctcaaggacacacacacacacacacacacacactacagagagagacagagacagagagagtaaaataagtgtttaaaaaccccagcatgccaggtggtagtagcacacccctttaatcccagcacttaggaggcagaagcaggaagatctgagtttgaggccagcctggtctacagagtgaattattccaaggacaaccagagaaaacctatgtcgaggggaacaaaaacagagaaaatggcaacccagccatgggattatgggactctgggtagactctggtgacccttgacttttgtgtgcttctcaggacctctctctctctctttctctctctctctctctgtctctctccctctcttctctccctcctctctctctcccctctcttctccacctctctcccctctctcccactctctctttctcttctctctctctcctgtctctctatctctgtctgtctgtctgtctttctctttgtgtgtgtgtgtgtgtgtgtgtgtgtgtgtgttttgcactcactcattttcttccagctgtatccatggaactctagataagaagtgagcattagcctctcgcattaggtgggcaccagcgctatcacactccaggggatcaacgccgagctaaccaagcggcaaggtgggtgaaggcaattgctgtcaagtctgagaaccagagttctagccctgagaactgaatggtgaagggtgaaggtagctgttccagagttgtcctctgatgtccactcaggaacatggcagggaccttcaccgcccccaacatacacataactaatctcatgtcccctgggattggctaccttcaaccttctcagtcacgctggccacgtgtggctctgtacagccctatatagaactacacacataagccgggcgtggtggcgcacgcctttaatcccagcacttgggaggcagaggcaggcagatttctgagttcgaggccagcctggtctacaaagtgagttccaggacagccagggctacacagagaaaccctgtctcgaaaaaccaaaaaaaaaaaaaaaaaaaaagaactacacacacagcctgacatccccctggtcgcctagccaacatggttcacaggcagcctgtggcagatgaatatccatctctagggctccaaaggctcctggcccagggcactcaacaggccatgtgaacagtaaagcagtgtctgagccctgtcactgtccacttcctactctgatacagactaccccaacatcccccacctagcccaccattcacctcttccttagattctcacgcctgctgtcttccccagaaaccatgggaggcaccaagttggtaccctctcagcttctcttctgctcaggagccctccatggctcccaccttagtctggattgaagccgacatcgcccctatggctgggcttgagtagcatcttttccttgttatcagttttggtgggggtgaggcatttgcttgcctcttcccagcaaggtctgtgtcaaggctgaggacacaggacgctggggatggcatcttaggacagaggagaagctggaaggcttctcttcctttcagccttctccattgaagcagacaacttgacagtctaaatatcaccttggagacgaatctctaggtgtgtctatgagggagtttccagattaggttcactgaggtaaaacatgccaccctgatgtgggtggctccatcccataaattgggttcctggtcggagagaaaggaaaaggtgacggagaagcagcagttacctcaccttcccaccatcatggcctctcatctctcccctcagcggtgagccagaatcttcctttaagtcacctttgtctgcatccaggcagaaagagtaccctcagctcgccccgccctccagctaaagctccctgacctcacagggcccaggaggactaccgggttcctgccccagtcctgtacccagagggggaagtgtccttatcgctacagaggcagaaatgcagaagaaagccaggcctctccctggcctgcctctgagtcacccatccccttagaactctgggaaaccaggccctccctcagcagctcacagccctgtttgtgtctgtgctccacagatggaggtgctgccatagccacataagtcttaggccatgagtgccatgagtttggtccctagaacacacatcaaaatggaaagagagaaggccccaactgcataaggttgtctccctttttttgttgttgttttttgtttttagagacagggtttctctgtatagccctggctgtcctggaactcactttgtagaccaggctggtctcaaactcagaaatcctcctgcctctgcctcccaagtgctgggattaaaggcgtgtgccaccaagcccggctcataaggttgcctcctgaccaccagaaacacccacaagaacaaccatgagcaacttgttacattgtcaccctagctgggcatgcacatgccctgtacaactagttcatcggtcagaagtctgaagcagaagtattggcctaggaggtcaaagccaggttggggtacatagtgcccactaaaaaaggctggaaagctggcacagcagttaagagcactggctgctcttccggaggacccaggtttaattcccagcacctacaatggcagctctcaactgtctccagctccagctccaggaggcttactgccctcctctgacctctgagggtaccaggcacacaccctggctctcctggaacttactctccagaccaggctagcctcccactcagatccactggcttctgcatgtgccaccactcctagcccaagaagaattttaaaacagagctgaacatggtgacacacctgttaccctagcactgggcaggctgaggcaggaggattatggattttgaggccaccttgagctacttaggaagaacctgtcttgagctaggtagatggctcagtgggacagagtgcatattgtgcagtcatggagatctgagttgaaatcctcaccaaccatgtgaaaagccagtcaccccctccatccctacccccctccttactggttaccaaggcaaatgtggaggctgaggcaggagagttgctgggacttgctggctgccagcctggctccaagttctgtctatggcacatgcctttaatctcagaacttgggaggcagaggcaggtgaatctcaaggccagcctggtctacagagtgagttcctgccctgccccccaccaaaaaaggaaaaaacaaaacaaaatctttaaaattttattttattttaaaattgtatttatttatttgtttaatttttttaagacagagtttcagccaggcgtggtgacctttaatcccagcacttgggaggcagaggcaggcagatttctgagtttgaggccagcctggtcttcaaagtgagttccaggacagccagggctacacagagaaacctgtctcaaaaaaaaaaaaaaaaaaaaaaaagacagagtttctcagtctgggaagtcactctgtagaccaggctggcctcaaaatcacagagatccacctgcctttccctcctgaattctggaattaaaggcatgtgtcacatcagcacccttctttaagtttttatttactgtgtgggtgtattgcagcatgtgtgtgtgtgcccatgaccatggaaaccacagcccctggaactggagttctaggcagttgtgagctgtcctgtgggcactggaaactgaaccagggtcctctgaagacgacgggcttgtctctccagcccatcatctctgttgtttatttttttgagacaatctctccatgcagtcctggttgatctggaactctctgtgtggacctggatggcctcagactcaagagatctgcctccctctgcctcccaactgtttagattaaatgtgtataccacccacacccctaacacacacacttgtttttcttccttccttccttccttccttcctttctttctttctttctttctttctttctttctttttttgattttgttttttgttttttgagacagggtttctctgtgtaactcaaaaattcgcctgccttcccccccccctccacccccacccccgtggggcttgtttttttttttttttttttttttatataaagtttctctatgttgccatggctgccctggaactcactctgtagatgtagaccaggcaagttttgaattcagagagcctcctgcttctgcctctgggtattgggttagaggcgagtgtctccacagcctggcttactttcagaattacacttatttaattgaggagggaggtgtagggttacagccacagtgtgtgtggaggtgagaattacttctctccgtccagtagctagcacctttacccacctgacccatcttacctgctcttttattactttgttaacctgttaggttccgagaaatatttcccagatcatatgaaccaaatctttgtcagtgacacccaaggtttgaacacatgtgttgtgctctttttttttttcaatgaaaaaataaaaaataaaataaataccgttttagcattaataattctttcaagcaggctgtgcacaggaagaggagctcgatgacttctgtgacctcagggacagggaagagagttttccgcagcctgtggaaacatggtttcaaaatcaaaaacaaaaaggagatataaaaggcctgaccgactggggctgggactcccgtggctagaggcttgtctagcttgctggacaccccaggttctatccctaacccccctagtaactgaagttggtggtacaagcctggcatcctggctccctggagggggaagcagaaacatccgtttaaggctagccttagatacagagttagtttgaggctagactaggttacattgtaaattcctgtcttaaaaaaaaaaatcagctgggccatgcctttaatcccagcaattgggaggcagaggcaggcggatttctgagttcaaggccagcctggtctacagagtgagttccaggacagccagggctacacacacacacacacacacacacacacacacacacacaaataaaaactggtccagcactcgggaggcagaggcgtggggatgtctgggagttccaggccagcctggttacatagagactctatttcaaaaaacaaacaaacaaggaaacaacaacaataacaacaaaaacccacaaaacaatcacacacaacaaaaaacaaacaaaaccccaggcagaggcagaggcaggcagatttctgagtttgaggccagcctggtctacagagtgagttccaggacagccagggctacacagagaaaccctgtctcgaaaaaccaaaaaaaaaaaaaaaaaaaaacacacacacacccccccccccccgggactagacagatgtgtcttggggttactattgctgtgttgaaacacgagaaacaaaaccagctttaggaggaagggtttatttggcttccatatccctagtcaggagccattgggggaagcccaagcaggagctcaaactgggtgggaacccagtcaggaagtgatgcagaggctctggtgaggagctgcttactgccttgctttgctcctcagggctcttatagaacccagaacccaagcccagggatggccccacccacggtgggctggaccatcccctatcagctgctaattaagaaaatgctttcccgatggatcttatggaggcattttcttaattaatgctctctcctctcagatggctttagcttgtgtccagttgacaaaactagccagccagcagcgatggctctgttggttggtatagtgtctgctgtgcaagcagggttcctgagctggacacacagcgccaagggggagaagccaggtgtggagggggtgggacgtgtgcacctgcaggcattgtgtgcaggcagctgcaggttgatcaggccattcctgtggcttgctagccagcccatttaatttatccagtcaatgagttctgggtttataccaactttaaagataaggtggacagataacaaggaaagcacttggtgtagaatccggctgcggcatgcacaagcatgtgcagatggacacacacaaacacacacaccacaaatttcgaacaaaataatttaaatccaagcaacttgtatgtcttgctttaggcaaaaaaagggcaggtattttctagagttgaaaaggagggaggagggacagccgggtgtggtgcaggcctttaatcccagcactcgggaggcagagacaggtggatttctgagtttgaggccagcctggtctacacagtgagttccaggacagccagggctacacagagaaaatgctttctcgatggatcttatggaggcgttttcttaattaatgctccctcctctcagatggctttagcttgtgtccagttgacaaaactagccagcaacgatggctcaaaaacctaaaaaaataaaaataaaaataaaaaaaaggagggaggagggaagaagaggaggaggaggggaatagggaggtaagaggagagggctggggtggaggagaaggaggtggaagaagtcagagactaagactgtctctggggtgactatgtccactcctggggtggctgctgggaggggagcagcacccaacattttcctggtcaagttccagaatcctctcaagctagtgagaggaaagcaagcagaggggaagaaacagggaagaaaccttctggagcaaagtctgtggcccagggccacacaggagccaacacgggtggcagctgaagaaggagtcagagaagcaggctccacccccaacaggctgtcatggctttattcctacagtgggcacatgaggatggtcagggacacacacacacacatacatatcacacatacacatacacataccatacacatacatacacacatacacacacatacatacatacatacacatatacacacacatacacacacaatacatacatacacatatacagaccacacaatacacaccatacacacatacataacacacacactcacataaaccatacaaatacactacacacaccatacacatacagcacatatacacacacatataccattcatgtacaccacatataccatacacatatgcacacacatacataccataaaacacacacacaatacatacacacactatacatatacaccacatacatagtgtacacacatacacacacacacacacacacaccatagccatcaagaagttacagctgccgggcatggtggcgcatgcctttaatcccagcacttgggaggcagaggcaggcagatttctgagtttgaggccagcctgatctacagagtgagttccaggacagccagggctatacagagaaaccctgtctcgaaaaacaaaaacaaacaaacaaaaagaagttacagctatttcaactgggagcagcgtggggtgttttcagtaactggcttagtatattatctctgttggtgaatagtcaaggctgggttaagccatttttttatggctagaggctattgcccagtacagcctgattcaattcctcatgacctgaggccattgcccaaccgcagggactggcagaggcttggagatatcacaggcaggtgtggatctgggcaaactggccagggacaagctggccagagcagagtgctgcagagaagcagcacccagacctacctcatggaaggccccggccactgtgaccagctcagcacacagcttgacttcagggaagagattccttcctggtgactctaaggaggcccagtggggagggcaaggcagaggagggggagtcccagctgttcaggagacagagaaaggggatcactgagcccaggagttacaggttatttatagtgagtctcctgttgccaagccagggagctgccatgtgtgaactgccatgtgtggcaggctgggacggagacccactcaggagaaaacggacttctgtaagctgttagctgacccccagcactcatgggcatgtgtgtacacacacaaaattcagtaataccatgagttttaattaggtgagaggcaaccaaggaggacacctgacgttgaactctggcctacatatacgtgtgagcacacgcataagcgcctcaaaactcaagggagaaaaagaaccaagctgttcgggcggtggcacatgtctttgacaggcagatggatctctctgagtttgaggccagcctggcctacatagtgggttccaggacagccagagccatgtaatagagagaccctgtctcaaaaacaaacaaacaaacaaacaaacaaaaaccgagagaaatcaactcacaaaagcagctttttacacctttctgtcttctggcttctactatctgtgtagctgaggctatcctcatggtcctcctgcctccctcggggagtgctgagaccacagattgtgacaacaggcttggtttacgtgatgctggggacgaagccaggtaccctaccaacccaatgcagtgtgtcccgttctctctcctgtctcacggttcagcttctggtagtttgttttgcattatgtattatttacttttttattactgcctgtgacacatcacaatatgaatgtgcaggtcacagggacgagttctctcctctcatgtgggtcctcggatttgaactcacatcaggtcagtcctggctgcatgcactaagccaacacactagccctggtttgttctgcagggagctaggcagggacagaatctgagtcccttttagaaaatccctaagcctttgattcatcaaaacttctctatccatggcagacagccttctggtttagccatccagtgtcaagaggggaaaaaggccacatgtggttggttttgcttcgagggaagagatgcccttctgtgtgttcaactccttgtaacaggataaagcggtaccagcaggtgcctaaggaaataaaccaaaaatcaacatttctgtcaacacaggaaggaacccattgattctcagatgaattatttaaaataatttcaactttagctttgaaacagggtctcttgacaggtggtagtggggtggtagtaaacactcaacatttaatcccagcactcaggagttagaggcaggcagatctctgagttctaggccagcctggtctacagagtccaggacaaccagggctacacagagaaaccttgtcttgaaaaacaaaacaaacagaaacagaaacaaaacaaaagaagaaaaggaaagaaaagaaagaaagaaggaaagaagaggaggaggaaacagaatctgtgtagcccaggctagtctggaacttgctgtccagaccagtttggactttgctcacagagatctgcctgccttcttcctagtttcagtgttaccatatcttgctatggaattcttccattaataattataattattctaactactgggtcctaccccccaaaccaagtaatgtttcttctttctaattaattaattagtacaggggagtgtgtgtggaagttagaggacaatttgctggagttggttctggttctctctccttccagtatgtggatccctgggatcaaactcaggtcttcaggcttgcaccctcacccactgagccaactcgctcacccgcacacgccgccgcgttttatatacatttctcgctgagtgtttgtgtttatggacggatccagataaaacctgcaactgtacttgggtcagaaatctatgtgcccattcctagacaggaaagcaaacttgctgcaagaagtgtaggggtcgggggtgggagggggcttcgcatacttctgttttgctttggaggtggaaaggaaagcgtcagaaggcgacccagggtgtggaagggcgtgggtcgtcccttgaacactcaaacagcaacgcgggcggctaagtgtccgggaagcggtgaaattctgtgggaggaatttgaggaacttcccactgctgcgggagcttcaggggttaaaagagacgatgtcacatcggccgttccaagctcctccccgctcagtgaggtgaagatttttgaaaatcaccccattgcagactcctcccccgcctggaaacctcgcccctagtactgggaatgactctgggcgtgcggcgtagtttgcagccgggacaccgtgaggcttgcgagcccagattcgcagccgagacaccgtggggcccgcgatccagtgtttgcagcgggaacatttcggggtctgtgatccgagtgaggacgcaacgcagaagctaaggatgagcaccgcggatctgatgcgtcgctgggtcatcgccctgctcctggctgctgccggagttgcaggtaaggctttgcgccaggagcctgcccggggtcaggggcagccgtcctgaactcggagagccccgagtggttttatttttggtcgagaaatacaaccattcgtgcgaacttgatgtgatgtccttcccacgtggctggagggaagtgttttggaaatagggtgccagagctgtagggggtcagagtgggtttggggagtccggtgggtgctctcccaagtcagaggtgtctttcagagctatgtgtgagggaatccaagaggaggggtcccatcattcgttttaagggctggggagacccaggcccagctgttcaactttggggtcgctagtcgtagttacaggacttgggggtctccacactgcactcaaacccggctactgccgcgtgccccaaaactccgccctaaccccacctcccaccgcacccccgagctcctattgggtgcagccggaacaggcgagcctcgagccactcccctcgcccaatggaggaagaggatgatgttcaggggcgtggcttgcacgaccctcccgggtggggtggggctacacatccgggccggctgggtcctccttgtgagccttcagtccctaccttgtccctacttccctggtttggtgcagatgtgcctcaggcaacccagacacccgtagctgagaccatcaggcagggagggccagggacctggcaaagacttttgcaggcctggttcgttcccactctctgaacgtgtaggattggacagatccataaagtggactttagttttaggagaggcgttggaatttggacaggaagggagatggtgttacaatctcaccaacaacttctttgcagcactgggaaaagtgctccacctctccctcactttatagacagggtctcatgtagcctaggctggcctataagtcactgtgtagtctctagcccctaattctcctgcctcagctcgggagtgttgggatgacaggcatgtgccaccatgcctggatttggggacaccatggatagaaccagggtccatgaatgcctgggttactgcttttcttgcagtcagcctggctggccaagaacattttaattgctttttcctcctcagaaccagcttcggttctgaccccacaggagcttggcaggagtgcccttcagttagctgtgagtagctgtcaactggacaatccctggggatgcttccttgagacagcctggctgagctgggcatcctggggcacacctgtagtctcagcacctggaaggcagaggcaggtggattcctgtgatttccagggcaggcagggctatacagtgaaccctggactaagagagagggagaggggagaggttgaacactgagacaaacacttagctatcctgttataattgtagacaaggctagaccagataccctgctcagcttgcgtttcacccatcattgccttctttaacaagaagaaagaaagaaaaccattttataaagtcttgagcaagagctgaggtttcccatctcaccggaaggccaagggccccggtgctggtctccccagactctcatgctcatagcaacgacggtgactacagcttgctctatgttagggttacatgtgttaactggacgatttgtctgttttaagattcgccatgcactagtcgggtggtggtggcgcatgcctttaatcccagcacttgggaggcagaggcaggcagatttctgagttcgaggccagcctggagcctggtctacaaaatgagttccaggacagccagggctatacagagaaaccctgtttagaaaaaccaaaaaaaaaaaaaaaaaagaaaggaaggaaggaaggaaaagattcgacatgcacacattatcttcgggttgctcaagagcagatctgggggctggggcggtggctcagttagtgacgtggggcagcctgaaatgacggcgctcagagggtcccagggcttgagggtgcgatctgggctcagtgagagaaggaggaaggctgaggaagccattcaactcggacctctggctacacacacacaaacgcagagccagcagtcggtgtgaggggtgtcagataagccacaggtctgtctaacacgggaggagtacgggtttgcaagcactgttagcatgccatgggcgcattcatttgtctctgttgcatttcttgctgagtaaaattggtaaaacactggataaggttggatttttttctcttgttcttttcatttctttttggggtatctccctctgaagcccaggctgtcctgcaattggaattctctatgtagtccaggctggcaattcatctgtgccagtgtctctctctctctctcatagttttcctttctttctggttttttttttttttctgtaggttctcagcgtacagctcaggctagccctgcttctgactcctcagctctgagaacctctcacttgagcatctctgagcttacaaacctggcgggcagtgctcctggctctgagcactcagggctcttatctccccgattgctccagataaggctctggcctcttcggttgcttggcttttggcgctcctctccctctgctttaattatatcagcagcatctgcaccctctgggcatgtggagcaaatgagctttggttgctaagagtggagttgatcaaccccatggagacggcaggagttggctgttcccagatggagctcatcttaggcttgaggctagcgagcacctttgctcctgagctaccttggtgcaggagaaccttgaagtaggaaaacggatgctgtggaggatttactaacaaacctgcttaggcgatactgttacgcacagtaaaatgggcacagtctatgccgggattggggtgaccgtatcctgaccaggcccgtcatcaggcccctgatgttcagggtgactgtgaaaacacttgtgtaaatgtttgttcaccagggttgacctccaattgggcttcgttcccataacaacaggagccagccctgacttagaaccagccattaaggcccctccccacatcaaaaaacatacctctgatgggcagctgaagggctcagggtgacagctatcattaagtcctggtcccattaaatctttatcaggagaagggtagttttggcaggtggtgagatgacccaggatgacagcctttagaaaagatcactgtatttaaaaacaattctgagcctggcagtggtggcgcatgcctgtaatcccagcacttgggaggcagaggcaggcggatttctgagttcaaggccagcctggtctacagagtgagttccaggacagccaggactgcacagagaaaccctgtcttgaaacaaaacaaaacaaaaaaaaaaaaaaacaaaaacatttctggcaatatctttgcttgtaattctctctgcccaagggactaggtttgcagtctcctgcctctgtttaaattgttcaaagtgtaacctggggccaagacctacgagagatgtaaggatgagtgctagtgtatgtgtgtgtgtgtgtaaaacctatgagcccaaggtctatacaaacttaatattctgttcgaggctgtttcccttttgtgattagccagatccagcactacctattagtagagggttttcctttcgttaatctctacatgctgaaagaaagttcccactaggaagcacccaggcgtggcctgcttttgtttgaggtctccctatatagcccagctggcttggaagttaccatgtagcccagactggtcttgaactcactgtaaccctcctgcctcagcaaccggaatgctgggattacaggcgaaagctaacacacctgtctatgggcttgctctttgttggtgcaggaggagcccaaagtaccctgtgtgttaggcaagcactttccctgacagtattttaacctcttttattttggtttattatcattttgttttgttttgttttgttttgttttgttgagacagggtttctctgtgtagccctggctatcgtggaactcactctgtagaccaggctggcctcgaactcacagagatcctcctgcctctgcttcccaagtgctgggattaaaagtgcacgccaccaatcacagcttattttggtttctctgcatgccatctgtcctcagtttgggaaagaaaacagtggtcaggtgttcagcacacccctgtcgttccatcagagagagagagagagagagagagagagagagagagagaggaacttagaaagcacttgtatgtgggaaagaggactgagtagttccttgtagctggcattgctactttgtggttcttctctcttctactctccactgttaaagcccctaacactagataggggggaaaagggggtgggtgacgttattcctaggctacttcctgctgattccgggcatcaagttccttgctgttagaatgtctaatttcttgtttcttctttgctcactacttaataaaccataaccaacagcaaacagtcaacaactcacgcccctctctgggccctagcattcacacatcctctgaaaagtccccaaaattccaaacgtcacacgatcacagaaactatctgccgctggcaaaatcacgcccctcctaaagtatgaaacaaatcccagtcagctgctgtggacagtctgaagtggccccgtcccacacctggggttaaagtgagaacattcatagactagttctgtgcttttcaaggaaatcacaactccagaactgtccttccccttttcagtttctgtggccttgttcatgcttcgtcattcgagacattggccatctgagggtcaaggctgcagaggtgtttgcgtgttgactggccttttacttgatttgatttgtccaccgccctggctgtcctggaactcactgtgaagatgaggctggtcacaaactcacttgcttcccaagtgctggggttaaaggtgtgcataccacacctggtttgcttttaaatatttacaatgatgtttgttgtttgtttgttcgttttgtgtgtgtgtgggtttcaggggacaggggcagaatgggttctctccttccgtcatccagctcagataggtggtggccagtcctttaccactgagccaccctgcaggccttctttatttcttctgtttgcctgagacagggtctctccttgtgtaactgaggctgtgccatttgcctaggttgtgctcaaacttgtagtagacttcttgcctctgccaaggggtccctgggatgacaggtgtgcaccctccaaacattactaattttttgtttagttggtttttgttcttgagacagggtcttgccatggaaccctggctgcctttagagtgatcctcctgcctccagttcctgagtgacagcatggcaggcttgtaccatcttgcctggttgatgcagggctggggatataacctggcgtggtgcatgctgggccgcctggcccccaccggcatagggtgtggctggtatttccacacccacatcccaatttatgtgtcattcagtgagagtgtggatcggtgacctgtcacctggctttgggggcaatggggtgacactcccctgttcttctctgccactgccccctcagaactcccttttgtaaggacccagccactcctggaattctagtggccttactcatcactatctgccatcagagagaagctgatgtgtcatttcctttgctggccagatgctgggtgagtgagtcacctgtcaggccagcagctgggcaagagagtattgtcggtctcatgagtgcagtgccgtgctgcatgcctttaatccaaatccttgagcgttgcaggccccccagaggtactcagtgccacactgtaagggaaccaaaccaaaacaaaaaaccagaaagaattacagtgtagcgagcagggtgctgggacttgagagaggtctcagggacagcaggggtgtgaaatatcagttactgaagcttccaccccatgaaggtggacagtggtaagtggcacactggagacagatgcaggtggatctctgagttcaaggccagcctggtcagtccaggacagccaaagagctacacagactctgtttccgaagaaaacaaaagcaggagaagatgctcctgatcctgcagagaattcatgcaccagggtgggtgggtggggccccaccctctcagagggaagccggtgggagacagactctggaaggagtgactgggaggggtagcatttgagatgtaagtaaataaataacattaaaaattttttaaagtggccgggcatggtgtgacccacacattactattttttgaattggaaatcatttttcccacgcagtaaattctgatcattggtttcctctccctcagtcctcccagatcctccgccccttcctattccccttttgctctctttagaaaccaaaccggccaaaacaaatacattaataatcaaataagaataaaacaaaacaaacagaaaaaaaagaaatgaaaagaaagggcaaaggaaacatgcacactcaggacgcacacatgcaaagtctataaaaacacatccttagtcggaaaccagaaaatacaagcaaaacaccaggggagaaaagcccaaagaaaacgtgtgataaatatctaaaaaccatcattgaattcattttgtggtgaccgtttactgctgtggggactgtactgagatgtggtttctgggctcagccatactcccctggagacaactaatttttcttttcaagtggttgacagttggagatagcttctgagttagggctggggtctcatgtccagttcccctcccagggctgggaccctggttgactgggacctgtgtagctcctgtgcatgctgccaccgtgtctgtgagttcatgtgtgccgttccagttgtgtccagaggccttgctttattggcctcgtacaaccattccgcctcctcattcctaggaaggattccctgagccctgagtgagagacttaatcctattccgtactgatgaatgttccaaggtctctcacttcctctgcaagtgagttaacacggggacatactttttcatagccaagaaatacaatagttgagggtcgtcccaacacaggtgtgagtctctgtgcgtgttcccatctgctgccggaggtctctggtgatggctgagtagggcactgatctgtgagtatagcagaatgtcattaggggacattttgttgtgttcctttagtgtacttgtttctgcccccaggtccacgccctttctaatgctcttggccgtggtagcagtgcagacttgggtttcatgtcatgaggatctgataactgttggttacttggcacaactttagtgccaatattgtaccagtatgttaggagatcaggtggcctgtactctaatctcaatacccaggaggcagaggcaggcaggtctcctctgtaagaccaaagccattctgttctatataaagttcaaggccagccaaagctacacagtgggaccttgtctcaaaataaatttaaaaaataattaactagcagggcgtggtggcgcacgcctttaatcccagcacttgggaggcagaggcaggcggatttctgagttcgaggccagcctggtctacaaagtgcattccaggacagccagggctggctacacagagaaaccctgtctcgagaaaaccaaaaaataaaaataaaagtaaaataataataataattaaccaattaaattcaatatgtttttagactttttgttcaatagccctgatgtcggtattaacgtctgacaggttgccctggctatgctgggtacatttgtcacctctgttgcgttctccggttagctgatgcagccatctttgagttctgctgttgacacaccttcctttccttctgctctcacagcagaagactcatgcagcaggaacgagttccagtgtagagacggaaaatgcatcgctagcaagtgggtgtgcgatggcagccccgagtgcccggatggctccgatgagtccccagagacatgcagtaagtcccctttatttgttggtggttgtagaagaacctatggcctgtgcgttctaggcaggggctcttcccgtgagtctcaaccctccctggggtgttactagacaaggggctctactgctgtgccaagaccctgcccaggaatggtaattccattcgtgagttagaagaaggctcagggtgaccatccccaatccaagtattcaaaccccaaggtattttgtatgctttgatgatggatttggaaggtttcatacctgacctcatgctgtggcttacagtcatactagtccactaacagggctgcatgggtgcttgtgaccagccttcacacacacacacacacacacacacacacacacacacacacacacacaggggagatggacctggtctcaccaaatcatattccttttgagtgacaactcctttttatccctagtgtctgtcacctgtcagtccaatcaattcagctgtggaggccgtgtcagccgatgcattcctgactcctggagatgtgatggacaggtagactgtgaaaatgactcagacgaacaaggctgtcgtaagtgttgctcagccccttgggtgtggcttgtgtgtgagtgagtgtgtatgtgagcatgtgtgctcatgtatgcatgtgcgtgcacgtgtgtaagcatttgtgtgtgtgtgtatgtgtgagcacatgtgctcatgtgtgtgtgcgttcgagagtgcctcagtgtatgtgtgagcgtgtgtgtgagtgtgtgcccaccttgcaacagggcactggggtgtgacagctgtgaggcttcattcctgtgtggactccacctgagttctggtgtgtggttgctcctgtggcttaaatccctccctgagagatgatgccacctctcatgaacatcagaagcatttattgtggtgggaagccccagtaactgtcaccaggcagcccatatgtaggaattgaaccagagctgactcactaggtgccagtgtgcttctcagcagtgtgtcctggtatcatactacttatgtgcagatccattcttaaggcccacagtggccgggcagtggtggtgcacgcctttaatcccagcactcgggaggcagaggcaggtagatttctgagttcgaggccagcctggtctacagagtgagttccgggatagccagggctacacagagaaaccctgtcttgaaaaaccaacaaccaaaacaaaacaaggcccacagtggatacttgggacacaagagtgcagaaccctgaatattatctctgtataatgtggtaatgtgggtctccctatatatacatgccctcactagagtataatttatacatttagcaagataagcagttcgcagcacaacctaaagcattaagatgtggctcaatacccaccccagtgaggggctcataggtacagaactggcttgatagttgaccatatggatgaggaaaccgaggcagaaaagggtgtgttgtagcttcctgagccctagtgtactaccacccatggctctgctaaatgggttgtgtgtttttgaagcacacggtcctgtctgcgaataggctggtgtaagccatagcctgacagggccctctcctccctgtgcacccctgcagcccccaagacgtgctcccaggatgacttccgatgccaggatggcaagtgcatctccccgcagtttgtgtgtgatggagaccgagattgcctagatggctctgatgaggcccactgccaggccaccacttgtggccccgcccacttccgctgcaactcatccatatgcatccccagtctttgggcctgcgacggggatgtcgactgtgttgacggctccgatgagtggccacagaactgccagggccgagacacggcctccaaaggcgttagcagcccctgctcctccctggagttccactgtggtagcagtgagtgtatccatcgcagctgggtctgtgacggcgaggcagactgcaaggacaagtcagatgaggagcactgcggtaaggccctggggaggagggatggatgattggctccccaggccctgctggggagctttggggcttagcaataaccagactgcccagaaaggaagttgattggttttgggtaaggggctggttgggtaggtagagcgtctgctgccagagcacgaagtcctgagttcaaatctccagcagcacagccatgctgtggagacaggggcatggctggagcttgttggctcccagcctggttcccgattcattgagagaccctgactcggagaaggaggagccggaggagcacatacctgcatgggccccatactgcacacacaccgtgtaataaaattttaaaaattaactagagataagggctggatatgatggcacacacctttagaaacaggtgggtctcttgagttgaaggccagcctggtctacacagtgaattccaggaaagtcaggccacggagacagaacctgtctcaaataccaaaggaaataaattttttagaaaaactcaacctgccgggcagtggtggcgcatgccttaatcccagcacttgggaggcagaggcaggtggatttctgagttcaaagccaagcctggcctcctacagagtgagtagttccaggaaagccagggctacatacatacatacatacatacataagcaatcaaccaaagatgggctagaaaatgtttttatttctttggaacaatgaatttctaagagggccaagtccgtaggtcacttaccaagtgtcttagttttttgtggctgtgggcagtgaccaaggcaacttatagaagagagagtttagtgaggtttacagtttcttgaccagcatggtggggagcacggtagcagacaggcaggcgtggtgctggagctataattgagagcttacatttgaaccacaagcatgagacagagactgctagctgggaagggcgagaaacctttgaaacctcaaagcctgctcacagcgatgtacctcctccaataaggccacacctcctaatccatcctcaacagttccaccaactgggggccaagtatttaaacttgtgagacattcgggccattctcattcaaaccaccacaccacacatgcatgagtcccaagttccaatcccctgcgtgatttagtggtgtgcgtgacacatgtgtgtgggactctgtatggaggtcagagggcagctcctgacagtgaggtctctccacccactgtgaagattccagggactgagctcaggcttagggcttgccggcaatcgcctttgcttgctgagccatcttgccagccctctaactgcaattaagcagaacggtgtattggtgcttcttgtgacgatcatcctgtcctccccagcggtggccacctgccgacctgatgaattccagtgtgcagatggctcctgcattcacggtagccgccagtgtgaccgtgaacatgactgcaaggacatgagcgacgagctcggctgcgtcaatggtaacctttgcccctcactgcttcagttcctggtcccacttctcagtgccttgcatttctgtaaagttagggtactgctgttccccggtgagggaggggggtcaggcacctaggaggcatatttctttttatttgtttgtttgtatgttttttgagacaagttttctctgtgtagccctggctgtcctgtcctggaactcactctgtagaccaggctgaccttgaattcagaaatccatcacccaagatcagctgtggtttttttttgtttgtttggtttttttgtttttttttgttttttttttttttttgagagttatttgccccctttgaacctccttccacttagctggattacaaaatggaattctctgcttcggtactttgatttgtttatttctgagatgggttctcatgcggtccaagagctgggatcatggatgtgcgatgctgtgctcagtttatgctggggaacaaacccagagcttcatgcgttctaccaagggagccgtaggtactcctggtagacgctgctttaggcttgaggtgctagtgacattcatacaattcagctccatgaaaagaacattccagaactgacgagagctgtttccttcctactaccatgagtgtcctgagatcaaactcacggcatctggcccagcgacacttcttccaccccactgacctgcaagttggaaaaaaaatatgcataacataaaaggatgtggttgggctggtgagatggctcagtgggtaggagcactgactgctcttctgaaggtcctgagttcaaatcccagcaaccacatggtggctcacaaccacccgtaatgagatctgccgccctcttctggcgtgtctgaagtcagctacagtgtacttacatataataataaataaatcttaaaaaaaacaaaaaacaaaaaacgatatggtctggggctgagccattggtagagtgctcgcctcacatgaacctgtgtggtgacacacgcctgtaaccccagcgttcgggaggtgcaggctggaggtcaaggccagccttgcttacactgaatctgagaacagctctcataaaaaaaaaaaaaaacaacaacaacaataaagcacatttctttttttttttctttttttaaatgttaggtttttgctgtttgttcttttgtgctgaactcagggcttcccattgctaggctgagttacttgttgcttttgcctgctcaatgccatgctgggcatggtggtagaggtctatagttccagcaatctggagcctgagataggaagcaaacacacttgcaccagcctggaccatggcgagacctctatataagaaacccaactcagccaaaaacagtctttgcagccgtctgtctgtcgctgagctctctctcatgcagagtctaaacaaactctcctcccattaaacattaacttcctgtctgcctgccaagcaagcagctcccagtaacccagggacctgtctcagtgacagagcacttgtctacccactcaaggccctgggtctcctgcagagaataaaaagcaaaacacccctgggaaattatttacagcaggcatggtgggacaaccctgtaatcccagggtttgggagctgaggcaggagggtctccttgatgtccagtattgtggactataattcaagaccagtaaggctacaaagtgagacttcgggcagggctacccaatggcaggcccccagcccctccctcactggggaactctaggcaggggttggagcactgagccacacactccagcgctgaagtgtaatcttaccgcgagcaggcaaaccctgtagctcaggccctcctgactgttctttgcctctcacagtgacacagtgtgatggccccaacaagttcaagtgtcacagtggggagtgcatcagcttggacaaggtgtgcgactccgcccgcgactgccaggactggtcggatgagcccatcaaggagtgcagtgagtgttggggagccggggatagcatcagtgtgtagtcactgtggggctgtgagcccagccagcgcccccgcagcatgtaaaaggctcgctgtgcatcatagatgtgacagagctttggctccagggcaggacaggcatgggaggcaggggtggctgggagatgcagcctggattcagatccctggcacttatataaatacattcttcgtctggagatggcttagcacctaagagcactggctgttcttccagaggactcaagtctggttcccagaacctaagtcaggtggctcagaatcgcctgtaactctagctacaggggggatccatctcttggcttccggtgcctctggcttctgaggtcatctgttctcacagtcacatgcagacacgcttatacacatgattaaaaataataaaaatgaatgatcttccaagtgttttgcgaaggcagtgcagtagcgtagtgttccccgtggaaagtgtacggcgctaggacagccagtctgctttctcaatcccacgcagagaccaacgagtgtttggacaacaatggtggctgttcccacatctgcaaggacctcaagattggctctgagtgcctgtgtcccagcggcttccggttggtggacctccacaggtgtgaaggtgagtctgcagcacattcagccacccagtgaacccgtgcctcagtttccccatgtgctcagtggccaggagtgcagtccccactgcttagggctcttaggagagttccaggggtgaacactgggtcctggcctgactgttaagagcaaagtgtatcaatggcaggtcctgcctttggggatcctcatcacgaatcgaggttccagctcgagcaagggctccgttgctagaactcttgccttacaggtagctctggattctgtccccagtgcatcgcaacctagcctggtggcccacacaggtagttctaatgcttgggatgtgtcagcaataggaacagaagttcaatgtcttctatgtagcaagttcaaggccagcttggactgtgtgaaatgtctcagaaaaaagagttcaaatgtggtgcaaaactcctttaaacccagcacttgagagacagaggcaagcagatttctgagttcacggatagggtggtctccatggtcagtttgggcccactagggctacatacaaagacaaacaataaaaaaaaataacagaaaaacaaccaaaaatggaaaaaaaataaagaagggaaggaaaggtggctggaagattcccactggaggtgagtgacagggtccaggtcctgtgagggtggtgtcccttagccactggaggtgagtgacagggtccaggtcctgtgagggtggtgtcccttagccattggaggtgagtgacagggtcttgtgagggtggcatcctttagccactggaggatacatgttttgttctcctgttgtcctgtagaaagggttcctctcccctagacgaaaccctttctctgtccccatgcacacacagatattgacgagtgtcaggagccagacacctgcagccagctctgtgtgaacctggaaggcagctacaagtgtgagtgccaggccggcttccacatggacccacacaccagggtctgcaaggctgtgggtgagtgctgggctgccggccaaggtgggctgggctgccagctgaggggggctgggctgccggccgaggggggtggctgggcagctcctccctggggctcagaactgccatgactttccctagttgggtatggcatctctctaggattctggctggtggcggaggtgtacagtagggacctgccttcacccatatctatccttcccagaactctacctgccctgcttcccatccagacagggtgggagataggaagaggcacaaagtgtgacctgagcccgttacctccctagttaagcttactagagaaatgggttccaggggctggggcttgtaggcagagttcttgcctggcatccatgaaaccctggcttccatctctcatcaccctgcgtggctttccaggctccataggctatctgctcttcaccaaccgccacgaggtccggaagatgaccctggaccgcagcgagtacaccagtctgctccccaacctgaagaatgtggtggctctcgacacggaggtgaccaacaatagaatctactggtccgacctgtcccaaaaaaagatctacaggtgagctgcagccccgtcacccttttgacagtctgtcccctagggaggccctgaccccaggctctattgtgacccctttcttctgcctcagcgccctgatggaccaggcccctaacttgtcctacgacaccatcatcagtgaggacctgcatgcccctgacgggctggcggtagactggatccaccgcaacatctactggacagattcagtcccaggcagcgtatctgtggctgacaccaagggcgtaaagaggaggacactgttccaagaggcagggtccagacccagagccatcgtagtggaccctgtgcatgggtgagtgtccaaagagctggacaaggggatgacccaaggtgggggatccagagctgggctcaggagaatgtgagatggtcctgagctcaggggagacggtggatagaggctggggtgtcggtgatagaccaagaaagcagcatggtggcttggacctgaaccccagtcctgagttacaggctagctcgggttgcaaagtgagctcctagttccaaaaaaaaaaaaaaaacaaaaaaacaaaacaatcaaactagaggcttagcaagggcccagggtatctgatgcctctggcctcatcaggcatggcaattaaaaatgatttttgtgtgtgtgtgtgtgtgtgtgtgtgtgtgtgtgtgtgtggtggtggtggtggggttgtcctgagacttgctttgtatagcaagctggccttgaactcagagatctgcctgcctcagcctcccaagttctgggttaaaagaatgcacgtggtcacgcattgtggtgaccagaggaggaggttaaagataaagtgtgctggaagccactgcggcctggcagaataaaatcttagaaacaaaaccaaacctggctcagtggacagagccctgaagtctgacaacctgtgtttaatctcagggacacatggagtcgaaggagagaaccgagcccccaaatgttgcatgagtacatgttcacgcgtgctcgtgcagtgggtgaatcagtgttgagtaaggtgctgggtgtgtgctgcattcggtagggagctttcgtaactgcgggaagccccgggttctgcctcagaaccccatgaagcaggcgtggtcacgcattgtggtgaccagaggaggaggttaaagataaagtgtgctggaagccaactaagactcggtcaaaaacagtgtcctagcctggcgatgggcacagtggtgcaggaggctctgcgttccacccccagtacaagaaagaaagagggggctggtaagatggctcagcggttaagagcactgactgctcttctgaaggtcctgagttcaaatcccagcaaccacatggtggctcacaaccatctgtaacaagatctgatgccctcttccagagtatctgaggacacctacagtgtactcacattaaataaataaatcttaaaaaaaaaaaaaaaaaaaaaaaaaaagccgggcggtggtggtgcaagcctttaatctcagcacttgggaggcagagacaggtggatttctgagttcgaggccagcctggtctacaaagtgagttccaggacagccaagactatacagagaaaccctgtctcggaaaaaaaaaaaaaaaagaaagaaagaaagagagaagctgggcttagtgatgcatggctttcgatgctaaccacttaattttgttgccaaatctcccaggctaggacaggcttctaaaggactttcaagaatgcgttctctcttccctccatgtgagttccagagtttgaactcaggtcgtcaggcttggcagcaagaacccttactggctaagtcatcttgctggccccatgaaggacatttctgagaccatgttctttttttttttttttggtttttcgagacagggtttctctttgtagccctggctgtcctggaactcactttgtagaccaggctggcctcgaactcagaaatccgcctggctctgcctcccaagtgctgggattaaaggtgtgcgccaccacgcccagcctgagaccatgttctaccatccacttggatcatgcacgtgcacacaacagtatacaggatcgctcttgctcccccactgtatcagaggtctctctgctgactgatcagggcctaacacagggcaactgacattatctgttgggaagtacgccccacccgcctctgcctccgccccagaggttctgtccccgtggggccatgtccgtgtccacattggagtggtttcatagtgtttgtctgcttcctgcataccttgcacttagcatgtgccagcacctctgaaagctctggggtgactagtgtgcatcaccacaccgggcttaaccctagacttccagatggcttccactgccatctgcggtggcagcccttgactgggagaaccctgaagaagctgtagttggtgttggtggaagggtggagtgctgaagggaagatgtggctgcggccttgcaggcatgaggctctgagttccatcctcatcagtcaaagagatgggtgtggttccaaactgagaactatttaaacagactcttgtcaacattagtgggagcctgccatctgagagccctcatctctcttctgtttggtctgttgtctttcccagcttcatgtactggacagattggggaacacccgccaagatcaagaaagggggtttgaatggtgtggacatccactcactggtgaccgaaaacatccagtggccaaatggcatcacactaggtatatctgaggggtggtctagcctgatgggggtgggcacactgaagaggacaaagtacatagttgagaataggtgataggtattaattaccctcttcccatgcagctggaagggtcactggattaaggcagaagccacaatgtagccctcagcttcctatgtagctagagagatcccccaaagctataccctttaccctaatctagtgacctgaattttttcctggcatgttttgaaactttctggaacattttagaatcttctaaagcatactagaatatttaggcaattgaataatcttatctcacctctggcctctccatattttcgtatgtgtttgtgcgttttagatctttccagtggccgtctctattgggttgattccaaactccactctatctccagcatcgatgtcaatgggggcaatcggaaaaccattttggaggatgagaaccggctggcccaccccttctccttggccatctatgaggtgaaccctgggaatgtgaggggtttgtcttatccattcaagccaagactgaggaaaagctcttgtctagagatttagaaagaagtattggaattacagctacttcatggagttgattgattgattgattgatgctaggagtggaacccagagttgattgattgattgatgctaggagtggaacccagagttcatcaagagacaggaaaatgccgggacgcaccagccagccagtgtagcctcagtgagctctaggttcagtgagacgctgtctcagaaattcaggttggggcagtgatggtgcccacctccaatcccagctctctgggaagcacatgcaggcaggcacatctctgaatttgaggccaacttggtctgcagagctaggtccagggctgttagccaaagaaaatctgcctcaaaaaaaagaaaaggggctggtgagatagctcagcggttaagagcactgactgctcttctgaaggtcctgagttcaaatcccagcaaccacatggtggttcacaaccatccataacgaaatctgacaccctcttctggagtgtctgaagacagctacagtgtacttacacataataaataaataaatcttaataaaaaaaaaaaaaaagaaaagaaaagaagggctggtgagatggctcagtgggtaagagcacctgactgctcttccgaaggtccgaagttcaaatcccagcaaccacatggtggctcacaaccacccgtaatgagatctgatgccctcttctggtgtgtctgaggacagctacagtgtacttacatataataaataaataaatctttaaaaaaaaaagaaaaaaaaaagaagttagggtggaaattgactgaaaagacacctgacatcaacctgtggcctccatacccccccccccccacatgcacaaagcacatgaacacgtgtatacaacacacaccgagaaaatggttagaatgggaggctttgtgtctgtttcactgcatttcgaccacagccagcactgcactgtttatgtttagagaattccagagatttggggggaggtggacagtggtgtgtgctgcgcagtggctaacacgctcggtcctcttccgtacataccacctgtgtaggacaaagtgtattggacagatgtcataaacgaagccattttcagtgccaatcgactcacgggttcagatgtgaatttggtggctgaaaacctcttgtccccggaggacattgtcctgttccacaaggtcacacagcctagaggtaagctcggccctgtcccagaactttttagattcttctggcttactctgaagatgggttcaatgcgcttcctgtacccaataataaaattgtcagccatttttcttgactctgcccgtcatcaaatgttgtcagtttattctccatgaacttctcttcctcccaggggtgaactggtgtgagacaacagccctcctccccaatggtggttgccagtacctgtgcctgcccgccccacagatcggtccccactcgcccaaattcacctgcgcctgccctgatggcatgctgctggccaaggacatgcggagctgcctcacaggtaggggcacaagtccccagaggtggacccgcatgagcctgcagaggctgaccagatgtccagctgtctggagactcatgagtgaggttctctgcctgtctcaaatgaaattactcttaggggttctagttgtctctaagctctgtgtggacgttgtctgacttcagaccagggtatctggtaagaagacccctttttgctgatgtcatctgagaagggctcagtttgaagttgtctctgtctgtgtcctgttgctgaagcagattccctgagactggatactttataaagcatagttcatgtagctcttgggtttggatacgagaggtcttagcatctggtagacataggggagggtgtcacacagtgactcagagcaaatattctcattttatttattcatttacttaaaggactttttttttgggggggggcgcatcttttgagacagggtttctctgtgtagctctggctgtcctggaactcactgtatagaccaagctggcctcgaactcagaaatctgcctgcctctgcctgagtgctgggcgtgtgtgcgccaccactgcccggcctgttgtgttttttaagacagtgttactcttcgtagccttggctgtcctggaacttgctctgtagaccaggctggccttgcacttagagatcctctgaagtgctgggaccactgcccggctcacctcattcactcttagtcacctctgtaaggtttcactgccaggcatcctacccacgaggggccacggagaagctcctgaagaaaggtgcctacctgcatttgatcccggagagcccacttgatagaaggagaaaacgaaataccagactctgctgtgacggccacatgaccttaaatccccagcactctggcaggcatatctctgagtctgaggccagcctggtctatattgtgagttccagggacagccagggctacatagtgtgactgtgtctcaaaaacaaacaaacaacaaagttttttttttttttttaaatctctcctcagtaagaatttggtggttaggtttccaacatagatttttggggtcacgctgatctcagggaccaaagtgcactcaccatttgcaggtcctattgtaagaacaggacaccaacactctggagactggggcagagggatgacaagtttgaggtccccctggaataatcctcaggaatgacacaagggacagtgtcaccagctatttacccatttagtttgctcaatttctgatgccatggaatttggtggcctgcgttccacccagagcagaggtgtcagtgtggcacccggcccctggccctcaggtcatgtttattgtcccatcagaagtcgacactgtactgaccacccaggggacatccgccgtccggcctgtggtcaccgcatcagctaccaggccaccgaagcacagtgaggatctctcagctcccagtactcctaggcagcctgtggacaccccagggctcagcacagtggcgtcagtgacagtgtcccaccaaggtaccggccaggcccagccttcatttcataagtactgcattttttaattacagtgatgtgatgtatttgtgggtttggggaattggccactctgcctgtggggtcagacacagcttgtgacagtatgttctgtcctccttccatgcggggcttaggatcaaactcaggttagcaagcttggcagcaagcttcgttactctctgagccatcttgctgtgttaagtgtctatgtgggtacagtttctgtgcaaatgtctggcatctctagggatcctagaactgtcccctgtgtacactggaggccagctgcctacagactaagtccacatgactttgtagggaccttagtaacattcccaggttcccctgaactttaacatggtgttagacatgtcctgccctgtcccctctctgatgtctttgagcctcctcaccttatcctttccctttttgcagtccagggtgacatggctggcagagggaatgaggagcagccacatggtatgaggttcctgtccatcttcttccctattggtaagtgttgcctgcagtgctaacctggccatgtcacctttctgacaaaaaatggaatacccctgcctgagggatgcccctgcctgcctcgaatcactgcccccttctcactcattacaaataagatggagtggagtgtccctggtggtggtgatgaaacacaacttgagttttctcagggccagcctggtctacatacagacttttagaccggcaagggagtggggtagacagtggatttctttctcaaaaaataattgtgatcctgtgtgaaaaaatcatggtggttcataccttgaatcttagcatccaggaagcagagacaggagtttgaggccagtctggtctacagagtgagtttcaggacagccagaactacacagtgagaccttgtctcaataaataaattaattaattaaaaagagcaaagttgacagagaatctcaaaagttagaaccagggtcaggctatggggcccaggctggctcagaagtcagcatcctcctgcctcattcccctgaagtgttagactcccagtgaatgctataccaacacacactcccttggtttttttctttgtatgataggtgagtataattttacattcaaaacatatcgctgtcacatgaaagggccaggatggacatgccggtagcttcactggcacggggtctcctgagagcccctgaccaagcccctctccccacagcactggttgccctccttgtccttggggccgtcctgctgtggaggaactggcggctgaagaacatcaacagcataaactttgacaacccagtctaccagaagaccacagaggacgagctccacatttgccgaagccaggatggctatacctacccctcagtgagtgtgccctttgtgggagagatgagacatcaaatgaggtgaaggacagaagttaggtggagtggaaggagaggaagcccaaaccaggggcatgcacagctcagtggtagaacctgcctaggcccccagtgagggcttagggtgtgcctcacagtagcaggaacatgctagagccagctgtatgtggaccggggaggaggtctcctctgagtgggggttgggaatagaggaatcagttcattgcaaagacctcaaattgtgataagattgggcacagtgtacttaagaagcataagggaagactggagagatggctctgtggttaagagtactggctgttcttccagaggacctgggttcaattcccatctcccacatggtggctcacaattatctataactccagttccagaggatctgataccttctggccttcacaggcatcaggcacatgtgtaactttaatgcagagaacacacacacacacacatacacacacatcccctcccaagggtggggggagagagagagagggagggagggagggagggagggagggaaggaaagagagagagagagaaagagagagagaggttttctaaaaaatcagaaagaaacacgggatatatctgtggtaagatccgagcctggaagtgagaggagagcattgtgagccttagttgacccagtcttaggtgttctggccacctctggtgactgcgcagggacagaaggtgagggacacgagcaggagagagaggtggattcctgccatgcttgtgtatagtcctgttagtctgattgtttcctgtgtttccgctttgctgacagagacagatggtcagcctggaggacgatgtggcatgagcagccgggagagccgtctctttccgggatccattgccaagcttaggcagaaaagacactctctccagacctccccatccagcactggtcctgccacctccctgggctctgtgttgctcaaagcaagataagagcaaagctgggctgggggccaagctcagctgcctgtctgccccaggttctgttttatatatttattgtctggggacagaaaaggctactggctgtgcttgaaattcgaattctgcctgggaatttttttttttctcccatcttcatttccttggaagccaaataggctgtcccagaagcttctgaattctactcttttcaacactaacacggaggaggaagagacccacccaggcagagagaagcctgctggacatgagacagcaggtactactgaccgggtcctgggtaccatagccagtccctaacctcaggacttcctgcattgaccttcatcccagagccttcctgcctgactctgccgcccccatcagaagccaggaaagtgactcgtgacattcggtactgatcttgctggatcttgaggccggcagctgccagtgatggatacccgctcatgcctttgccaaaacgtcacccgttcctggagggacaagcccaagtcgccattctcccttaatatttatcaagtgcctgagacaactggttgccttgctcaggagtcctggcctgctcagtgtcctgctgctcaggggtggccggcaggacccctgtcctgtgcccagcccccgagtctccgagtgaggcttgcacttctctctgcgcacttttcccgttctgtgctgggcacccacgtggtccacatttgtactcctaggttgcactgaccctggtgcattggatgggacctcaggccggaagtggccccgaatcattgaccacagaagataattgccaggctccaagcatccattgccttcttcagtactggggggaactcagggcctctgtctggtgtttagttagtctgtttgtttgtttgtttgtttgtttgtttggtggtttctggctctgcacagcagagttgtttagctcctctggtaacgtcatcctctctcacagagacatccagcctgctgaaggggagagatggggcgaggggagggatacacgcatggtttctcaggtgtggtggcacttggctttaatcctatgctcaagaggaagaggtgggcacatgtctgaggtccaagcctacatagtgagaccttatatatctaaaaaccaaaagaaatcccagactatttggtgggacttggaagaatacttagaaattgccacagatttgtcacatgggtaacctaagaagacagtggtggccttacttggattcctgggtagatccacctgtccactactcaagacacaagggcacactgcccagcccactgggacacttgtaaagagctctgtaatgtgccgatggcacctggctcggttttcattctgtatattcaaggatatcacacatatgtattaaatctatttatttttgcaaaccctgattgctgcacctctctgcaatttctccaggttaggctggggtgatactctgggatgctctgtatacaaagatgatttgaatgggctgatctcaggcctgtcctgtgcgttgctttgagtgggtgggaactgctttgaaacccttgttcagatgtttttataggctgaaaatatcatactgtgatggattaaattcttttttggaaactttgtcatccttatgtgtgtgaggtgtggggtgcagaggaggcatcgggaggcttggaggatagctttgtgaagccacttctctgtattcacccaggcttaggaacaggcttgtgtgtgtgtgggggggagggggtcacgcacctctctccgtgtgggtgtcctgaaactccaaattgttcctttgaggcaaagttcttccctgaacctggggccccctcagctatgtctaatgccaacaaggcccagcctggctctgctctgctcagagtcaggggttacaaggttcagagaactcccatcttgctaagctggtgctcgagtgtgcgccgtgcccctggtgacaaagtgagcgtccttagctgctgagtccaccatttcgctagctgtgccttctgtttgagttgcgtggttttggtagtttggagccaggatctcacaatgtagcctgtgttgggttgcagggccaggaagagtagctgaagtgcctattttaaataccaaagcagacctggcctacaagttctcccagtatcctgcagtccctacctgttgctgggcacataggtaggtacaccccacagtctaccctgaactttccagcccctgcagcccaggggcggggcttcctctccccaaggctctattaggtaatctagacattttggttctgtctcctctgcttgtatactttcttcctctgtcccagccgctgcctttctgtctgcacagcgacttccctgaccccctcctgggacatcagtgagcctgccatagaataacatccaaccaacctcattataaacttgaaaacccagactaaactcacctgcctcagccttcccagtgttagtgttgagctgtgtctctcaccggccgtcttttttaggacagaggcattattctctctgtctcacacatccacgaggggtattttttaagacagaggcattattctctgtctcacacatccacgagggatgatgaaggtgagcacactaaccaaagagcaagtcttttttttttttttaagatttatttatttatttatttatttatttatggtttttcgagacagggttttacaaccatcaggaatgagatttgacaccctgttctggtgtgtctgaagacaactacaatgtacttccatataataaataaatcttagccaggtgtggtggctcacgcctttaatcccagtacttgggaggcagaggtaggcggatttctgagttcgaggccagcctggtctacagagtgagttccaggacagccagggctacatagagaaaaccctgtctcgaactccctcccctccccctgaagggaaaaaagaaaagaaaaattcagggaaagagtcttggggaaacagaacaggaatggagatacactagacaaacaacctggctccgaccctggctctgctgtagttttctgtgtgaccctgtgcacttcagagcctcgttagcccagtaattccaccttctgccagactggtgggacctctacccaggcctgccatctcctctgaatccacggggtggcacatccgtccttccttctgccctttgtttggggcaagagccaaactgcctcagagagaaagtggagaagcaagtggcctggaaagcccgtggcttcacaggccttcaaggactgcctccctgagtcatggtgctggcatgtgtggctaacagcatggtggagcttccacgtcctgggagttaacagactggagagcaggtgtggggctcccacgggacatcatgcatggaaggtgatggactgactttcttcttctcaagacaagggtttctctgtgtggttctggctgttgtagaactccctctgtagaccaggctggccacgaactggagatctgcctgcctctgcctccagggtgtgggattaaagtggagtgccaccacccattggtgagcatttctgatcctgggcttcagcttttattttcaaggccctgcaaagccaagtgtcctcacccgtacctgtcaccctacccctggggaggtggaggcaggaagatcaggagttcaaggtcatcctcccctacatagtgagtttcagaccaacctggggcccatgactctgtcttaaaaacactttacttaccaacaggcactgaagggctggtgtttaactcactgtgcagtgcctacctagcgaggggaatgggaggtacttgggtcagggtccccttttctgctctcccgtcttctttgcctgcagttctctgggctcagaatagcaatcagtgaaagacctggatgtgtacccgtgtgtgcagtacctatctgacccagggtgggcaagtgatggtggtcttgcctgcctcgtctctgtggattcagttctgcccaggacaagaatggcaggcagcagctgatttctgacacacgaactgctgttccccgctgaccaccagccccccaggctgtggtcccttccaactcacagtgtctgagcccacagctgtgtgtggtgagccagcttggagccccagcgggaatggcacgggggagacagtgggaagggtgctctgctaggcagccagcattccccagcgcccgctgcggctccagctcccactgtggttttctgagattaagttctcaggaatatcactcctactcagcctgcctggggaaagtctccctagatttcctgtgtcttgtctgacacccctactcgaatctgcttcctgccctagaggagctctgtccttcccttgtcccgccctttggccaggccttgtagggagtgtgtgggagaagcttggagcttaattagatcagtctcttactcagcagagccactggctgtctggaaaatcttccccctatactgtggactgcaggcccagattgatcaagatgctttctgcggttgcctggtggcagtccttagcttgctcccagcttagcattattctgtgtcaccatctctaccctcccagcctccccccccccccccagcattttatcccctgtcacttccttattgccaggtgtgctgacctccttcctagcaggagattgagagtccccccacccccacccccaccccggagctcaaacacctaccaggtgtgaaacctgagacaaatctccagcctgggtttagtttccatttccagatgatgcgcgcagccaggcatacttccatagctccagccacttacaagtatggctgccacagaaccattcagccagcaggagcctgaatgtgcttgtggctcaaagggtaggtaagggcgcttgtcttccaagcctggtgatcgagtttgatctggtcgtaatccttgtaaaggtgagagaactgatcccttacctctcacaagcatgcctgcaccccggggcctgcacttacctccctacatactgtgactctccatacagacacacagtaaaaaggacctattaggaggtcccgagatccaggtgagagtggccccaacaacagaggtcacaggtagagtccaagtgtggtcatgcccataacagacaaccgatcctgtcccccacaccagcccagctttttttttttttttaaagatttacttattttacttatatgagtacactgtagctgtcttcagccacaccagaagagggcatcagatcccatgacagatggttgtgagccaccatgtggttgttgcgatttgaactcaggacctctggaagagcagtcagtgctcttaaccactgagccatctctccagcctccagcccagcccttgtgtcatgaggagacagccttcaaatctggctgcctggctcctcctgctcatttcctaggtctatgcatctttcctgcttaaggaaacagctcttaactgcagctaaccccaacagaaagagggagagactggagaaaggggctggccacctgctgggtgctcttaccactgtcctaaaaaaccacctagtcctggtgacacttcagaggaagacactatgtgccttagggattggtggcagtagaacacaggtgaatgggtcaacccctggacttcatataatgtcttgggacttaagggaaatggccagatggatccgtccctcagtttacctcatctgtaaattagattcaggactgctcctccttctggctggttctcttagaaggagcaagtcaggctgtgggtaggaatttgggcaggaggctgtggcctggccccaagatgtcccaggcagccagccagtgctgggcagtgactcagagcctaggcatgcagagctgggggctctccagggtgctgggccacagtcctcactcactggaccttggagtcagcccccagtgctcctccagggaagggagtgaggctcccctgccaccagagggtcaggagtttgagcagctgggcacttgcccttcttgtgcaaagcctcgttgttggttcctgctgctctgctgggttttttggtaagatttatgtattttatgagtggttcgcttacatgtgtctgcacactgtgtgtgcctggcacatgatgaagtcagaaggctccaatctcctgaactacagctaaagacatttaactctgtggatggtgggaatcgaacccagatcccttggaagagcagaaggtgctatttaggtgaagacaaatacgggcccttggatcctgtgaggcctcaggccatcagacttgatggcaagaaccttacccatgagccatctccctagccctccagcttggctatgttggcagccttgaactccatggctacgttctccaccaggcaccaggtctgcaggtcagcatgtacaaccgtgagttctctatcctgcaccgtctcacactggtatgaaaacacaagtccacagcagtgactccgcaggcaatgtggactaatgctagtcctgcagacgttagctgtattatgtgaccttcccaagggacactcagccatggctcagacacttcctgttgtcaggacactactggaatccagtgaggtcggggatggtgtccccaaaagctaagacatcatacagctgtcactaggtgaggtggagtgacctggctctggatgtggctcagcagttgggcacaacctgagaatcttccagtgacgagcttggcatcaggacctcataaaaagggggagagtgggccaaggtggctgctagccaactgcttacaatcgaagcaggaggacctgaggtcaaacccccaaacctgggccaactgctggggcagtgggagaaagcaaatccttggagttcaaaccctgcctcaaaaaaataaagtgtggaggggctggagagatgccgcagctgttaagagcactggctgctcttacagagtttgggtcccggtacccacgaggcggctcacaaccagctgtagcttcagtttcagaggatctgacaactctggcctcctcaggcaccaagcatactcatgcacatacccccacagaagaaccaactccagcaagctgttacacacatacacacccaccatgctgcacacacacttttttttaaaaagagtatttatttaatgtatgtgagtacactgtggctgtcttcagacacaccagaagagggcatcggatcccattacagatgggaattgaacccagaacctctggaagagcaatcagtgtgctcttaaccactgagccatctctccagccccaactgcacacatttttgtttttgtttttttgtttgtttgttttttttttttttttgttttttcaagacagggtttctctgtatagccctggctgtcctggaactcactctgtagaccaggctggcctcgaactcagaaatccgcctgcctctgcctcccaagtgctgggattaaaggcgtgcgccaccacgcccggctaggcacacattttttaaaattgtaattaaggggatggagagacagctcaacaattaagagcactggctgctcttctatagaatacaggttcgattcccagtagccacatggcagctcagaaccacccataactccagtttcagggggtctgaagccctctctaacctctcctggaatacacagctaacagacacacatgcagacaaaacattcatacagtaaatgtaattacaaataaaaaagaagctgcaggccagcctggactccatgctgtctcaaagcaagtagataaatcaatgaacgcactcacatacagacatttaattttagagtgatcccctccttggctccctcaaccccagttctgtgcaaggtatgaggtcaaggctctggctcccacgtggtgtccaccaggctccagaggtagtcactgatgaacttcggcgagagctgtgcactgtccaagtggatgggctgggccactgtggggccgtggtggactgaggacgagatgaaaggaaagtgttttcggtcctcccaggtccagtcgctaaccttgaactgtggtgactcctcctgcctcagcttcccaagtgctgggatgatatcaggctaatttctttttatgtttatttatctgggtgtgtgtgagtgcaaacatgccacagtgtccctgtggactcagatgacaacgtatatagctgttctcccaccagtgggtcccagggattgaattccagtcattaggctcggtgagacgtgcctagatggatcatttctttttaattaaaaatgatatatttgctggatgtgatggcaaacacccacagtcccagcacttgagagacagaaacgggaggttcaccaaggatttgcagctggtctggagaacatgtaggctccaggttacccgcaggctgagaaaacgatctactacatttttatcttctgtctacgatgccctcccctgatactattgtagcgcacagttaaattgtcttccctttacccatcatctatagacactgtctgcatctggatgtggagggtgacaccccatgaacatgatgcatcgctatctctgcaagagtccactttgtactcttgggcacagggtttctcagtgtagccctggctgtcctgaaacgtactctagctagttgacgaggctagcctcaaactccagtgagatccactgcctctgccttcacagtgcgagggcgggttgtgccaccacgcctgactgtgtctagtatgtgaagatgcacccatttcccccaggtgcctcctcccaccccaacatcgacttctcaaaggatactgcccttgatcatccctggctcgcattcataatcccactgtattttactaatttggtgatagagatgagccacatacctaggtagaacgaggggaagggagagaagacagttaccacagcatccatgtcaaccacgccacagggcaagagtaggcccagcctgcagaacctacactgcagaggggatggtgacggtgttgtcctcatctacatccctctcctggcgctggagctcttcctccatctccctgagctcctgcagctctgtgatgagctgagtgcactgggttaaggccaaggctcagacaggaaggaccatcacccacctcactgccccaccaggtcagagcaccaagtgctcaggccttttcttccttcagtgttagggacaaaagctaagacctgacacacgctaggcaggctctaccagagcacaagccagcccctcagtgggggattccaggcaggggctctaccactgagccacactcccacctctctctctggaggattctaggcaggaactctggcactgcactgagcggccaccggacatagcaaaggatatcgtagcctagcctgcacacaggtgtcctccttgctggtcctctggagctccacctccagctgctgcagctcggtgtccccctggcgcgtacattctttcagttcaagaaggctctgagccacttcctcctccacagccagagtctctgcaatgggacagaagcaggtgccctttcattctgtcttctgcccaggcgaactctgacggtgcctcatgccaccacccagtcagagttctgctacatctgagcacctcccaacatctgggccttgctcctgctctgccagaacacaggcgatactgagaatggcagtgtgtagctgtcatccattgctcaggaggcagaggcaggaggatgcagagttctactctggcttaggttaaactcaagagaccctacgctataagcactacaaaaatcctaatagccggatgagatgctaacaagtctgacggactgagttccatttctgggacccacttggtagaaggacagaagtgacgcccctaagttgtccaccatgcccatcctgtgtggtgctgggggtggaagccaagactttctgtgtgctgggcaggccttttacccactaagccgcacttggtatcttttgtttgggaagtagtcttatgtagctcaggttggcctctgatctctgaatgggggggggggggtgtcggtgtgcagctccctcgccagcttctgttataaactctatgatttggggggaggggatgttgaatgataagatgagggtctcactgtgctgtccaggttggccacaaactcctgggctcaaagaatccttctgtcttatcctcccaaattattctacagaagcaggtcacaaagtatagccatcaaattacttaattttaattatcttatggtattgggtttgaatttagagcctccatcacacatgctaggcaagcactgtactacctacgcagaacccacctcaaaaggcatgtggggtgggacctgggtgagggtgacagagggtttctctgtagctaattatgtaactgaggttagccttgaattctcagcagcctcctgcttcggtctcccaaattctaagagcacatgttcaagccgctaatgactcattcaaagaagaaacagcaggtttgcgtgtggaggtcagaggacaagctgcaggggtcagttctaccacctggctcccaggaatcaaacttaacatcgtcaggtaggcaccaagtgtctctacccagtgaaccatcctgccagccctcaggtttttacttcattactactgcttgctcccaaggcctcctgtagccacatgtgttctctctgagctacaatctcagagataaaacttctcattttacttttggtcttctgtcaatcaggctgctttgaattccttccagccttccattcctgaccctcctgcttgtctctggaacactggtctgacaggcccattctgccatgcctggcatggaacccagggtttcatgcatgccagtcaagtgtatccctgccccctcaacagtttcaggtttcccccaatatctttgcagaaacccctccccagtcccgcccatgttacccctcctaatgatagaaagcatttgtctcctcagcccatcactgcagtacaaatgttatcctgtctcctctccagtaggatgccagccaccaagggactccttccctgctgtcacccgaggtccagctcacggcaggctctgttcacaagtctattgggaaggcacgaaactttaaaaaatgttcccagggccggacgtggtggcgcatgccttaaatcccagcacttgggaggcagaggcaggcggatttgaattcgagaccagcctggtctacagagtgagttccaggacagccagggctacacagagaaaccctgtcttgaaacaaaacaaaacaaagttcaaacaaacctttgacagggaaggacactgagatgggagattgctcacacctgtgaccaaggcactgaggagctgaaaggttctttgaatttctcagctaagtagttctctactagtcagagctacatttaagcctgagtcctggaaagttaataaagggtcgtgccctgctaactctatatttaattacgcttaagtccctagatgacaaccgttgtcatgacaacggtttcaccggtggagaaatcaaggctcgggtgtgactgctctccctcggaagaccctcaagaacggcgagcaggagtggaggtgggggctggatcataaagacttccaaaggcgcctgagctacgaagtacgatcgtatagagtcgcgcattgtgagctatgacacttatctggacgcctctgagccatggcaattgtcagatggggaaactgaggcccaggagtaccagctccccccgagaagtcccccggggctggggcgcaggggaccggccctcaccccgaagctgccggtaggcgccgtcctgcatctccagcagccgctccatcatctgctcgtagctcccgagcagccgccgctgctgcgcctcggcgcggttggcccccagcaggctcagtagccagttgctcacctccaccatgtcgcggaaagccgccatgactgatcgcgccgagtccgaacccgcgcaaattcgtctcaccacgggccccgccccctccccagagcgcataagtctcattggatcgttcctacgtccgtctcctgcaggactcaatcagcgaggggacagagcgcttcggaaggagcggccattttgtggagatcctgtgcgaaatttcttctgtcactcaggtgtgaggatcaatcatcgtaggcgggggaggggggggggcggcggcgcggggggggggcgtgtcacacgtggccagtttgcgattggcctggtacgcgtgcgtcgattgtcgggctatgaactccggggagagtccagggcgttaggagtctgttgcgcatgcgtaaactggaaagctgcgcgactcttagagaaatttgcaggtatcagtcgctgcttgaagggcaatgtaacggatggtttattatttttgcttgttttttttttttagtttactttaggaatatattaattatacataaaactgggattcattgggtttatttttttcttggcgggggttgggatgtgtgagctgtgagatgttgagactatgtagaactggctgtccaggagctctttgttagagatccatctacctctgcctcctagtggttggattataggaacatgccaccacaatcattcaccagtctctattttttaggcttatttctctttctttaatgtgtatgggtaaacgttttgcctacatgtatgtatgtgtcagcagaggtcataaaagggcatctgaccacttggagctagatatggatggttgtgagccatcatgtggtgctgggagccaaaccctggttctctacaagagcatccaatgttctgggaaggcagaggcaggcagatcccagagtttgaggccagcctggtctacaaataaagctccaggagagccaggattatatagagaccttgtctcaaaaataaaataaaataaaatctttaagtaggagtctagcatgtatctagcatgtagcactcaggtgatgggagcttgaggatggaggtaaattccaggccagcctgggcaacaagagcagtgaaccccgaagctgagcatggtggctcaggaatcaggagcctaaggaagaggaattgccattcatgggactccagagtgctgagtgaattccagaccagcctgaactacaaagtgaaccctgtctccttaaatacctataccccagagctggagagatggctcagcggttaagagcactcactcactgctttcccagaggttctgagttcaatttccagcaaccacatggtggctcacaaccatctgtagtgagatccaatgtctttttttttttttttttggggggggggtttgagacagggtttctctgtatagccctggctgtcctggaactaacattgtagaccaggctggcctcgaactcagaacctgcctgcctctgcctcccaagtgctgggattaaaggtgtgtgccaccactgcccagctgatgccctcttctggtgtgtctgaagagagcaatggtgtactcctatacataaaataaataaataatctttttaaaaaatacaacccagacagacacagacactcacttctatcatattctctgacactcacttcta

SEQ ID NO: 60 - DNA, 50325 bp, Mus musculus
tagaagtgagtgtcagagaatatgatagaagtgagtgtctgtgtctgtctgggttgtattttttaaaaagattatttatttattttatgtataggagtacaccattgctctcttcagacacaccagaagagggcatcagctgggcagtggtggcacacacctttaatcccagcacttgggaggcagaggcaggcaggttctgagttcgaggccagcctggtctacaatgttagttccaggacagccagggctatacagagaaaccctgtctcaaaccccccccccaaaaaaaaaaaaaaaaagacattggatctcactacagatggttgtgagccaccatgtggttgctggaaattgaactcagaacctctgggaaagcagtgagtgagtgctcttaaccgctgagccatctctccagctctggggtataggtatttaaggagacagggttcactttgtagttcaggctggtctggaattcactcagcactctggagtcccatgaatggcaattcctcttccttaggctcctgattcctgagccaccatgctcagcttcggggttcactgctcttgttgcccaggctggcctggaatttacctccatcctcaagctcccatcacctgagtgctacatgctagatacatgctagactcctacttaaagattttattttattttatttttgagacaaggtctctatataatcctggctctcctggagctttatttgtagaccaggctggcctcaaactctgggatctgcctgcctctgccttcccagaacattggatgctcttgtagagaaccagggtttggctcccagcaccacatgatggctcacaaccatccatatctagctccaagtggtcagatgcccttttatgacctctgctgacacatacatacatgtaggcaaaacgtttacccatacacattaaagaaagagaaataagcctaaaaaatagagactggtgaatgattgtggtggcatgttcctataatccaaccactaggaggcagaggtagatggatctctaacaaagagctcctggacagccagttctacatagtctcaacatctcacagctcacacatcccaacccccgccaagaaaaaaataaacccaatgaatcccagttttatgtataattaatatattcctaaagtaaactaaaaaaaaaaaacaagcaaaaataataaaccatccgttacattgcccttcaagcagcgactgatacctgcaaatttctctaagagtcgcgcagctttccagtttacgcatgcgcaacagactcctaacgccctggactctccccggagttcatagcccgacaatcgacgcacgcgtaccaggccaatcgcaaactggccacgtgtgacacgccccccccccgcgccgccgcccccccccctcccccgcctacgatgattgatcctcacacctgagtgacagaagaaatttcgcacaggatctccacaaaatggccgctccttccgaagcgctctgtcccctcgctgattgagtcctgcaggagacggacgtaggaacgatccaatgagacttatgcgctctggggagggggcggggcccgtggtgagacgaatttgcgcgggttcggactcggcgcgatcagtcatggcggctttccgcgacatggtggaggtgagcaactggctactgagcctgctgggggccaaccgcgccgaggcgcagcagcggcggctgctcgggagctacgagcagatgatggagcggctgctggagatgcaggacggcgcctaccggcagcttcggggtgagggccggtcccctgcgccccagccccgggggacttctcggggggagctggtactcctgggcctcagtttccccatctgacaattgccatggctcagaggcgtccagataagtgtcatagctcacaatgcgcgactctatacgatcgtacttcgtagctcaggcgcctttggaagtctttatgatccagcccccacctccactcctgctcgccgttcttgagggtcttccgagggagagcagtcacacccgagccttgatttctccaccggtgaaaccgttgtcatgacaacggttgtcatctagggacttaagcgtaattaaatatagagttagcagggcacgaccctttattaactttccaggactcaggcttaaatgtagctctgactagtagagaactacttagctgagaaattcaaagaacctttcagctcctcagtgccttggtcacaggtgtgagcaatctcccatctcagtgtccttccctgtcaaaggtttgtttgaactttgttttgttttgtttcaagacagggtttctctgtgtagccctggctgtcctggaactcactctgtagaccaggctggtctcgaattcaaatccgcctgcctctgcctcccaagtgctgggatttaaggcatgcgccaccacgtccggccctgggaacattttttaaagtttcgtgccttcccaatagacttgtgaacagagcctgccgtgagctggacctcgggtgacagcagggaaggagtcccttggtggctggcatcctactggagaggagacaggataacatttgtactgcagtgatgggctgaggagacaaatgctttctatcattaggaggggtaacatgggcgggactggggaggggtttctgcaaagatattgggggaaacctgaaactgttgagggggcagggatacacttgactggcatgcatgaaaccctgggttccatgccaggcatggcagaatgggcctgtcagaccagtgttccagagacaagcaggagggtcaggaatggaaggctggaaggaattcaaagcagcctgattgacagaagaccaaaagtaaaatgagaagttttatctctgagattgtagctcagagagaacacatgtggctacaggaggccttgggagcaagcagtagtaatgaagtaaaaacctgagggctggcaggatggttcactgggtagagacacttggtgcctacctgacgatgttaagtttgattcctgggagccaggtggtagaactgacccctgcagcttgtcctctgacctccacacgcaaacctgctgtttcttctttgaatgagtcattagcggcttgaacatgtgctcttagaatttgggagaccgaagcaggaggctgctgagaattcaaggctaacctcagttacataattagctacagagaaaccctctgtcaccctcacccaggtcccaccccacatgccttttgaggtgggttctgcgtaggtagtacagtgcttgcctagcatgtgtgatggaggctctaaattcaaacccaataccataagataattaaaattaagtaatttgatggctatactttgtgacctgcttctgtagaataatttgggaggataagacagaaggattctttgagcccaggagtttgtggccaacctggacagcacagtgagaccctcatcttatcattcaacatcccctccccccaaatcatagagtttataacagaagctggcgagggagctgcacaccgacacccccccccccccattcagagatcagaggccaacctgagctacataagactacttcccaaacaaaagataccaagtgcggcttagtgggtaaaaggcctgcccagcacacagaaagtcttggcttccacccccagcaccacacaggatgggcatggtggacaacttaggggcgtcacttctgtccttctaccaagtgggtcccagaaatggaactcagtccgtcagacttgttagcatctcatccggctattaggatttttgtagtgcttatagcgtagggtctcttgagtttaacctaagccagagtagaactctgcatcctcctgcctctgcctcctgagcaatggatgacagctacacactgccattctcagtatcgcctgtgttctggcagagcaggagcaaggcccagatgttgggaggtgctcagatgtagcagaactctgactgggtggtggcatgaggcaccgtcagagttcgcctgggcagaagacagaatgaaagggcacctgcttctgtcccattgcagagactctggctgtggaggaggaagtggctcagagccttcttgaactgaaagaatgtacgcgccagggggacaccgagctgcagcagctggaggtggagctccagaggaccagcaaggaggacacctgtgtgcaggctaggctacgatatcctttgctatgtccggtggccgctcagtgcagtgccagagttcctgcctagaatcctccagagagagaggtgggagtgtggctcagtggtagagcccctgcctggaatcccccactgaggggctggcttgtgctctggtagagcctgcctagcgtgtgtcaggtcttagcttttgtccctaacactgaaggaagaaaaggcctgagcacttggtgctctgacctggtggggcagtgaggtgggtgatggtccttcctgtctgagccttggccttaacccagtgcactcagctcatcacagagctgcaggagctcagggagatggaggaagagctccagcgccaggagagggatgtagatgaggacaacaccgtcaccatcccctctgcagtgtaggttctgcaggctgggcctactcttgccctgtggcgtggttgacatggatgctgtggtaactgtcttctctcccttcccctcgttctacctaggtatgtggctcatctctatcaccaaattagtaaaatacagtgggattatgaatgcgagccagggatgatcaagggcagtatcctttgagaagtcgatgttggggtgggaggaggcacctgggggaaatgggtgcatcttcacatactagacacagtcaggcgtggtggcacaacccgccctcgcactgtgaaggcagaggcagtggatctcactggagtttgaggctagcctcgtcaactagctagagtacgtttcaggacagccagggctacactgagaaaccctgtgcccaagagtacaaagtggactcttgcagagatagcgatgcatcatgttcatggggtgtcaccctccacatccagatgcagacagtgtctatagatgatgggtaaagggaagacaatttaactgtgcgctacaatagtatcaggggagggcatcgtagacagaagataaaaatgtagtagatcgttttctcagcctgcgggtaacctggagcctacatgttctccagaccagctgcaaatccttggtgaacctcccgtttctgtctctcaagtgctgggactgtgggtgtttgccatcacatccagcaaatatatcatttttaattaaaaagaaatgatccatctaggcacgtctcaccgagcctaatgactggaattcaatccctgggacccactggtgggagaacagctatatacgttgtcatctgagtccacagggacactgtggcatgtttgcactcacacacacccagataaataaacataaaaagaaattagcctgatatcatcccagcacttgggaagctgaggcaggaggagtcaccacagttcaaggttagcgactggacctgggaggaccgaaaacactttcctttcatctcgtcctcagtccaccacggccccacagtggcccagcccatccacttggacagtgcacagctctcgccgaagttcatcagtgactacctctggagcctggtggacaccacgtgggagccagagccttgacctcataccttgcacagaactggggttgagggagccaaggaggggatcactctaaaattaaatgtctgtatgtgagtgcgttcattgatttatctacttgctttgagacagcatggagtccaggctggcctgcagcttcttttttatttgtaattacatttactgtatgaatgttttgtctgcatgtgtgtctgttagctgtgtattccaggagaggttagagagggcttcagaccccctgaaactggagttatgggtggttctgagctgccatgtggctactgggaatcgaacctgtattctatagaagagcagccagtgctcttaattgttgagctgtctctccatccccttaattacaattttaaaaaatgtgtgcctagccgggcgtggtggcgcacgcctttaatcccagcacttgggaggcagaggcaggcggatttctgagttcgaggccagcctggtctacagagtgagttccaggacagccagggctatacagagaaaccctgtcttgaaaaaacaaaaaaaaaaaaaaaacaaacaaacaaaaaaacaaaaacaaaaatgtgtgcagttggggctggagagatggctcagtggttaagagcacactgattgctcttccagaggttctgggttcaattcccatctgtaatgggatccgatgccctcttctggtgtgtctgaagacagccacagtgtactcacatacattaaataaatactctttttaaaaaaaagtgtgtgtgcagcatggtgggtgtgtatgtgtgtaacagcttgctggagttggttcttctgtgggggtatgtgcatgagtatgcttggtgcctgaggaggccagagttgtcagatcctctgaaactgaagctacagctggttgtgagccgcctcgtgggtaccgggacccaaactctgtaagagcagccagtgctcttaacagctgcggcatctctccagcccctccacactttatttttttgaggcagggtttgaactccaaggatttgctttctcccactgccccagcagttggcccaggtttgggggtttgacctcaggtcctcctgcttcgattgtaagcagttggctagcagccaccttggcccactctccccctttttatgaggtcctgatgccaagctcgtcactggaagattctcaggttgtgcccaactgctgagccacatccagagccaggtcactccacctcacctagtgacagctgtatgatgtcttagcttttggggacaccatccccgacctcactggattccagtagtgtcctgacaacaggaagtgtctgagccatggctgagtgtcccttgggaaggtcacataatacagctaacgtctgcaggactagcattagtccacattgcctgcggagtcactgctgtggacttgtgttttcataccagtgtgagacggtgcaggatagagaactcacggttgtacatgctgacctgcagacctggtgcctggtggagaacgtagccatggagttcaaggctgccaacatagccaagctggagggctagggagatggctcatgggtaaggttcttgccatcaagtctgatggcctgaggcctcacaggatccaagggcccgtatttgtcttcacctaaatagcaccttctgctcttccaagggatctgggttcgattcccaccatccacagagttaaatgtctttagctgtagttcaggagattggagccttctgacttcatcatgtgccaggcacacacagtgtgcagacacatgtaagcgaaccactcataaaatacataaatcttaccaaaaaacccagcagagcagcaggaaccaacaacgaggctttgcacaagaagggcaagtgcccagctgctcaaactcctgaccctctggtggcaggggagcctcactcccttccctggaggagcactgggggctgactccaaggtccagtgagtgaggactgtggcccagcaccctggagagcccccagctctgcatgcctaggctctgagtcactgcccagcactggctggctgcctgggacatcttggggccaggccacagcctcctgcccaaattcctacccacagcctgacttgctccttctaagagaaccagccagaaggaggagcagtcctgaatctaatttacagatgaggtaaactgagggacggatccatctggccatttcccttaagtcccaagacattatatgaagtccaggggttgacccattcacctgtgttctactgccaccaatccctaaggcacatagtgtcttcctctgaagtgtcaccaggactaggtggttttttaggacagtggtaagagcacccagcaggtggccagcccctttctccagtctctccctctttctgttggggttagctgcagttaagagctgtttccttaagcaggaaagatgcatagacctaggaaatgagcaggaggagccaggcagccagatttgaaggctgtctcctcatgacacaagggctgggctggaggctggagagatggctcagtggttaagagcactgactgctcttccagaggtcctgagttcaaatcgcaacaaccacatggtggctcacaaccatctgtcatgggatctgatgccctcttctggtgtggctgaagacagctacagtgtactcatataagtaaaataagtaaatctttaaaaaaaaaaaaaaagctgggctggtgtgggggacaggatcggttgtctgttatgggcatgaccacacttggactctacctgtgacctctgttgttggggccactctcacctggatctcgggacctcctaataggtcctttttactgtgtgtctgtatggagagtcacagtatgtagggaggtaagtgcaggccccggggtgcaggcatgcttgtgagaggtaagggatcagttctctcacctttacaaggattacgaccagatcaaactcgatcaccaggcttggaagacaagcgcccttacctaccctttgagccacaagcacattcaggctcctgctggctgaatggttctgtggcagccatacttgtaagtggctggagctatggaagtatgcctggctgcgcgcatcatctggaaatggaaactaaacccaggctggagatttgtctcaggtttcacacctggtaggtgtttgagctccggggtgggggtgggggtggggggactctcaatctcctgctaggaaggaggtcagcacacctggcaataaggaagtgacaggggataaaatgctggggggggggggggaggctgggagggtagagatggtgacacagaataatgctaagctgggagcaagctaaggactgccaccaggcaaccgcagaaagcatcttgatcaatctgggcctgcagtccacagtatagggggaagattttccagacagccagtggctctgctgagtaagagactgatctaattaagctccaagcttctcccacacactccctacaaggcctggccaaagggcgggacaagggaaggacagagctcctctagggcaggaagcagattcgagtaggggtgtcagacaagacacaggaaatctagggagactttccccaggcaggctgagtaggagtgatattcctgagaacttaatctcagaaaaccacagtgggagctggagccgcagcgggcgctggggaatgctggctgcctagcagagcacccttcccactgtctcccccgtgccattcccgctggggctccaagctggctcaccacacacagctgtgggctcagacactgtgagttggaagggaccacagcctggggggctggtggtcagcggggaacagcagttcgtgtgtcagaaatcagctgctgcctgccattcttgtcctgggcagaactgaatccacagagacgaggcaggcaagaccaccatcacttgcccaccctgggtcagataggtactgcacacacgggtacacatccaggtctttcactgattgctattctgagcccagagaactgcaggcaaagaagacgggagagcagaaaaggggaccctgacccaagtacctcccattcccctcgctaggtaggcactgcacagtgagttaaacaccagcccttcagtgcctgttggtaagtaaagtgtttttaagacagagtcatgggccccaggttggtctgaaactcactatgtaggggaggatgaccttgaactcctgatcttcctgcctccacctccccaggggtagggtgacaggtacgggtgaggacacttggctttgcagggccttgaaaataaaagctgaagcccaggatcagaaatgctcaccaatgggtggtggcactccactttaatcccacaccctggaggcagaggcaggcagatctccagttcgtggccagcctggtctacagagggagttctacaacagccagaaccacacagagaaacccttgtcttgagaagaagaaagtcagtccatcaccttccatgcatgatgtcccgtgggagccccacacctgctctccagtctgttaactcccaggacgtggaagctccaccatgctgttagccacacatgccagcaccatgactcagggaggcagtccttgaaggcctgtgaagccacgggctttccaggccacttgcttctccactttctctctgaggcagtttggctcttgccccaaacaaagggcagaaggaaggacggatgtgccaccccgtggattcagaggagatggcaggcctgggtagaggtcccaccagtctggcagaaggtggaattactgggctaacgaggctctgaagtgcacagggtcacacagaaaactacagcagagccagggtcggagccaggttgtttgtctagtgtatctccattcctgttctgtttccccaagactctttccctgaatttttcttttcttttttcccttcagggggaggggagggagttcgagacagggttttctctatgtagccctggctgtcctggaactcactctgtagaccaggctggcctcgaactcagaaatccgcctacctctgcctcccaagtactgggattaaaggcgtgagccaccacacctggctaagatttatttattatatggaagtacattgtagttgtcttcagacacaccagaacagggtgtcaaatctcattcctgatggttgtaaaaccctgtctcgaaaaaccataaataaataaataaataaataaataaatcttaaaaaaaaaaaaaagacttgctctttggttagtgtgctcaccttcatcatccctcgtggatgtgtgagacagagaataatgcctctgtcttaaaaaatacccctcgtggatgtgtgagacagagagaataatgcctctgtcctaaaaaagacggccggtgagagacacagctcaacactaacactgggaaggctgaggcaggtgagtttagtctgggttttcaagtttataatgaggttggttggatgttattctatggcaggctcactgatgtcccaggagggggtcagggaagtcgctgtgcagacagaaaggcagcggctgggacagaggaagaaagtatacaagcagaggagacagaaccaaaatgtctagattacctaatagagccttggggagaggaagccccgcccctgggctgcaggggctggaaagttcagggtagactgtggggtgtacctacctatgtgcccagcaacaggtagggactgcaggatactgggagaacttgtaggccaggtctgctttggtatttaaaataggcacttcagctactcttcctggccctgcaacccaacacaggctacattgtgagatcctggctccaaactaccaaaaccacgcaactcaaacagaaggcacagctagcgaaatggtggactcagcagctaaggacgctcactttgtcaccaggggcacggcgcacactcgagcaccagcttagcaagatgggagttctctgaaccttgtaacccctgactctgagcagagcagagccaggctgggccttgttggcattagacatagctgagggggccccaggttcagggaagaactttgcctcaaaggaacaatttggagtttcaggacacccacacggagagaggtgcgtgaccccctcccccccacacacacacaagcctgttcctaagcctgggtgaatacagagaagtggcttcacaaagctatcctccaagcctcccgatgcctcctctgcaccccacacctcacacacataaggatgacaaagtttccaaaaaagaatttaatccatcacagtatgatattttcagcctataaaaacatctgaacaagggtttcaaagcagttcccacccactcaaagcaacgcacaggacaggcctgagatcagcccattcaaatcatctttgtatacagagcatcccagagtatcaccccagcctaacctggagaaattgcagagaggtgcagcaatcagggtttgcaaaaataaatagatttaatacatatgtgtgatatccttgaatatacagaatgaaaaccgagccaggtgccatcggcacattacagagctctttacaagtgtcccagtgggctgggcagtgtgcccttgtgtcttgagtagtggacaggtggatctacccaggaatccaagtaaggccaccactgtcttcttaggttacccatgtgacaaatctgtggcaatttctaagtattcttccaagtcccaccaaatagtctgggatttcttttggtttttagatatataaggtctcactatgtaggcttggacctcagacatgtgcccacctcttcctcttgagcataggattaaagccaagtgccaccacacctgagaaaccatgcgtgtatccctcccctcgccccatctctccccttcagcaggctggatgtctctgtgagagaggatgacgttaccagaggagctaaacaactctgctgtgcagagccagaaaccaccaaacaaacaaacaaacaaacaaacaaacagactaactaaacaccagacagaggccctgagttccccccagtactgaagaaggcaatggatgcttggagcctggcaattatcttctgtggtcaatgattcggggccacttccggcctgaggtcccatccaatgcaccagggtcagtgcaacctaggagtacaaatgtggaccacgtgggtgcccagcacagaacgggaaaagtgcgcagagagaagtgcaagcctcactcggagactcgggggctgggcacaggacaggggtcctgccggccacccctgagcagcaggacactgagcaggccaggactcctgagcaaggcaaccagttgtctcaggcacttgataaatattaagggagaatggcgacttgggcttgtccctccaggaacgggtgacgttttggcaaaggcatgagcgggtatccatcactggcagctgccggcctcaagatccagcaagatcagtaccgaatgtcacgagtcactttcctggcttctgatgggggcggcagagtcaggcaggaaggctctgggatgaaggtcaatgcaggaagtcctgaggttagggactggctatggtacccaggacccggtcagtagtacctgctgtctcatgtccagcaggcttctctctgcctgggtgggtctcttcctcctccgtgttagtgttgaaaagagtagaattcagaagcttctgggacagcctatttggcttccaaggaaatgaagatgggagaaaaaaaaaaattcccaggcagaattcgaatttcaagcacagccagtagccttttctgtccccagacaataaatatataaaacagaacctggggcagacaggcagctgagcttggcccccagcccagctttgctcttatcttgctttgagcaacacagagcccagggaggtggcaggaccagtgctggatggggaggtctggagagagtgtcttttctgcctaagcttggcaatggatcccggaaagagacggctctcccggctgctcatgccacatcgtcctccaggctgaccatctgtctctgtcagcaaagcggaaacacaggaaacaatcagactaacaggactatacacaagcatggcaggaatccacctctctctcctgctcgtgtccctcaccttctgtccctgcgcagtcaccagaggtggccagaacacctaagactgggtcaactaaggctcacaatgctctcctctcacttccaggctcggatcttaccacagatatatcccgtgtttctttctgattttttagaaaacctctctctctctttctctctctctctctttccttccctccctccctccctccctccctccctctctctctctccccccacccttgggaggggatgtgtgtgtatgtgtgtgtgtgtgtgttctctgcattaaagttacacatgtgcctgatgcctgtgaaggccagaaggtatcagatcctctggaactggagttatagataattgtgagccaccatgtgggagatgggaattgaacccaggtcctctggaagaacagccagtactcttaaccacagagccatctctccagtcttcccttatgcttcttaagtacactgtgcccaatcttatcacaatttgaggtctttgcaatgaactgattcctctattcccaacccccactcagaggagacctcctccccggtccacatacagctggctctagcatgttcctgctactgtgaggcacaccctaagccctcactgggggcctaggcaggttctaccactgagctgtgcatgcccctggtttgggcttcctctccttccactccacctaacttctgtccttcacctcatttgatgtctcatctctcccacaaagggcacactcactgaggggtaggtatagccatcctggcttcggcaaatgtggagctcgtcctctgtggtcttctggtagactgggttgtcaaagtttatgctgttgatgttcttcagccgccagttcctccacagcaggacggccccaaggacaaggagggcaaccagtgctgtggggagaggggcttggtcaggggctctcaggagaccccgtgccagtgaagctaccggcatgtccatcctggccctttcatgtgacagcgatatgttttgaatgtaaaattatactcacctatcatacaaagaaaaaaaccaagggagtgtgtgttggtatagcattcactgggagtctaacacttcaggggaatgaggcaggaggatgctgacttctgagccagcctgggccccatagcctgaccctggttctaacttttgagattctctgtcaactttgctctttttaattaattaatttatttattgagacaaggtctcactgtgtagttctggctgtcctgaaactcactctgtagaccagactggcctcaaactcctgtctctgcttcctggatgctaagattcaaggtatgaaccaccatgattttttcacacaggatcacaattattttttgagaaagaaatccactgtctaccccactcccttgccggtctaaaagtctgtatgtagaccaggctggccctgagaaaactcaagttgtgtttcatcaccaccaccagggacactccactccatcttatttgtaatgagtgagaagggggcagtgattcgaggcaggcaggggcatccctcaggcaggggtattccattttttgtcagaaaggtgacatggccaggttagcactgcaggcaacacttaccaatagggaagaagatggacaggaacctcataccatgtggctgctcctcattccctctgccagccatgtcaccctggactgcaaaaagggaaaggataaggtgaggaggctcaaagacatcagagaggggacagggcaggacatgtctaacaccatgttaaagttcaggggaacctgggaatgttactaaggtccctacaaagtcatgtggacttagtctgtaggcagctggcctccagtgtacacaggggacagttctaggatccctagagatgccagacatttgcacagaaactgtacccacatagacacttaacacagcaagatggctcagagagtaacgaagcttgctgccaagcttgctaacctgagtttgatcctaagccccgcatggaaggaggacagaacatactgtcacaagctgtgtctgaccccacaggcagagtggccaattccccaaacccacaaatacatcacatcactgtaattaaaaaatgcagtacttatgaaatgaaggctgggcctggccggtaccttggtgggacactgtcactgacgccactgtgctgagccctggggtgtccacaggctgcctaggagtactgggagctgagagatcctcactgtgcttcggtggcctggtagctgatgcggtgaccacaggccggacggcggatgtcccctgggtggtcagtacagtgtcgacttctgatgggacaataaacatgacctgagggccaggggccgggtgccacactgacacctctgctctgggtggaacgcaggccaccaaattccatggcatcagaaattgagcaaactaaatgggtaaatagctggtgacactgtcccttgtgtcattcctgaggattattccagggggacctcaaacttgtcatccctctgccccagtctccagagtgttggtgtcctgttcttacaataggacctgcaaatggtgagtgcactttggtccctgagatcagcgtgaccccaaaaatctatgttggaaacctaaccaccaaattcttactgaggagagatttaaaaaaaaaaaaaaaactttgttgtttgtttgtttttgagacacagtcacactatgtagccctggctgtccctggaactcacaatatagaccaggctggcctcagactcagagatatgcctgccagagtgctggggatttaaggtcatgtggccgtcacagcagagtctggtatttcgttttctccttctatcaagtgggctctccgggatcaaatgcaggtaggcacctttcttcaggagcttctccgtggcccctcgtgggtaggatgcctggcagtgaaaccttacagaggtgactaagagtgaatgaggtgagccgggcagtggtcccagcacttcagaggatctctaagtgcaaggccagcctggtctacagagcaagttccaggacagccaaggctacgaagagtaacactgtcttaaaaaacacaacaggccgggcagtggtggcgcacacacgcccagcactcaggcagaggcaggcagatttctgagttcgaggccagcttggtctatacagtgagttccaggacagccagagctacacagagaaaccctgtctcaaaagatgcgcccccccccaaaaaaaaagtcctttaagtaaatgaataaataaaatgagaatatttgctctgagtcactgtgtgacaccctcccctatgtctaccagatgctaagacctctcgtatccaaacccaagagctacatgaactatgctttataaagtatccagtctcagggaatctgcttcagcaacaggacacagacagagacaacttcaaactgagcccttctcagatgacatcagcaaaaaggggtcttcttaccagataccctggtctgaagtcagacaacgtccacacagagcttagagacaactagaacccctaagagtaatttcatttgagacaggcagagaacctcactcatgagtctccagacagctggacatctggtcagcctctgcaggctcatgcgggtccacctctggggacttgtgcccctacctgtgaggcagctccgcatgtccttggccagcagcatgccatcagggcaggcgcaggtgaatttgggcgagtggggaccgatctgtggggcgggcaggcacaggtactggcaaccaccattggggaggagggctgttgtctcacaccagttcacccctgggaggaagagaagttcatggagaataaactgacaacatttgatgacgggcagagtcaagaaaaatggctgacaattttattattgggtacaggaagcgcattgaacccatcttcagagtaagccagaagaatctaaaaagttctgggacagggccgagcttacctctaggctgtgtgaccttgtggaacaggacaatgtcctccggggacaagaggttttcagccaccaaattcacatctgaacccgtgagtcgattggcactgaaaatggcttcgtttatgacatctgtccaatacactttgtcctacacaggtggtatgtacggaagaggaccgagcgtgttagccactgcgcagcacacaccactgtccacctccccccaaatctctggaattctctaaacataaacagtgcagtgctggctgtggtcgaaatgcagtgaaacagacacaaagcctcccattctaaccattttctcggtgtgtgttgtatacacgtgttcatgtgctttgtgcatgtgggggggggggggtatggaggccacaggttgatgtcaggtgtcttttcagtcaatttccaccctaacttcttttttttttcttttttttttaaagatttatttatttattatatgtaagtacactgtagctgtcctcagacacaccagaagagggcatcagatctcattacgggtggttgtgagccaccatgtggttgctgggatttgaacttcggaccttcggaagagcagtcaggtgctcttacccactgagccatctcaccagcccttcttttcttttctttttttttttttttattaagatttatttatttattatgtgtaagtacactgtagctgtcttcagacactccagaagagggtgtcagatttcgttatggatggttgtgaaccaccatgtggttgctgggatttgaactcaggaccttcagaagagcagtcagtgctcttaaccgctgagctatctcaccagccccttttcttttttttgaggcagattttctttggctaacagccctggacctagctctgcagaccaagttggcctcaaattcagagatgtgcctgcctgcatgtgcttcccagagagctgggattggaggtgggcaccatcactgccccaacctgaatttctgagacagcgtctcactgaacctagagctcactgaggctacactggctggctggtgcgtcccggcattttcctgtctcttgatgaactctgggttccactcctagcatcaatcaatcaatcaactctgggttccactcctagcatcaatcaatcaatcaatcaactccatgaagtagctgtaattccaatacttctttctaaatctctagacaagagcttttcctcagtcttggcttgaatggataagacaaacccctcacattcccagggttcacctcatagatggccaaggagaaggggtgggccagccggttctcatcctccaaaatggttttccgattgcccccattgacatcgatgctggagatagagtggagtttggaatcaacccaatagagacggccactggaaagatctaaaacgcacaaacacatacgaaaatatggagaggccagaggtgagataagattattcaattgcctaaatattctagtatgctttagaagattctaaaatgttccagaaagtttcaaaacatgccaggaaaaaattcaggtcactagattagggtaaagggtatagctttgggggatctctctagctacataggaagctgagggctacattgtggcttctgccttaatccagtgacccttccagctgcatgggaagagggtaattaatacctatcacctattctcaactatgtactttgtcctcttcagtgtgcccacccccatcaggctagaccacccctcagatatacctagtgtgatgccatttggccactggatgttttcggtcaccagtgagtggatgtccacaccattcaaaccccctttcttgatcttggcgggtgttccccaatctgtccagtacatgaagctgggaaagacaacagaccaaacagaagagagatgagggctctcagatggcaggctcccactaatgttgacaagagtctgtttaaatagttctcagtttggaaccacacccatctctttgactgatgaggatggaactcagagcctcatgcctgcaaggccgcagccacatcttcccttcagcactccacccttccaccaacaccaactacagcttcttcagggttctcccagtcaagggctgccaccgcagatggcagtggaagccatctggaagtctagggttaagcccggtgtggtgatgcacactagtcaccccagagctttcagaggtgctggcacatgctaagtgcaaggtatgcaggaagcagacaaacactatgaaaccactccaatgtggacacggacatggccccacggggacagaacctctggggcggaggcagaggcgggtggggcgtacttcccaacagataatgtcagttgccctgtgttaggccctgatcagtcagcagagagacctctgatacagtgggggagcaagagcgatcctgtatactgttgtgtgcacgtgcatgatccaagtggatggtagaacatggtctcaggctgggcgtggtggcgcacacctttaatcccagcacttgggaggcagagccaggcggatttctgagttcgaggccagcctggtctacaaagtgagttccaggacagccagggctacaaagagaaaccctgtctcgaaaaaccaaaaaaaaaaaaaaagaacatggtctcagaaatgtccttcatggggccagcaagatgacttagccagtaagggttcttgctgccaagcctgacgacctgagttcaaactctggaactcacatggagggaagagagaacgcattcttgaaagtcctttagaagcctgtcctagcctgggagatttggcaacaaaattaagtggttagcatcgaaagccatgcatcactaagcccagcttctctctttctttctttcttttttttttttttttccgagacagggtttctctgtatagtcttggctgtcctggaactcactttgtagaccaggctggcctcgaactcagaaatccacctgtctctgcctcccaagtgctgagattaaaggcttgcaccaccaccgcccggctttttttttttttttttttttttttttaagatttatttatttaatgtgagtacactgtaggtgtcctcagatactctggaagagggcatcagatcttgttacagatggttgtgagccaccatgtggttgctgggatttgaactcaggaccttcagaagagcagtcagtgctcttaaccgctgagccatcttaccagccccctctttctttcttgtactgggggtggaacgcagagcctcctgcaccactgtgcccatcgccaggctaggacactgtttttgaccgagtcttagttggcttccagcacactttatctttaacctcctcctctggtcaccacaatgcgtgaccacgcctgcttcatggggttctgaggcagaacccggggcttcccgcagttacgaaagctccctaccgaatgcagcacacacccagcaccttactcaacactgattcacccactgcacgagcacgcgtgaacatgtactcatgcaacatttgggggctcggttctctccttcgactccatgtgtccctgagattaaacacaggttgtcagacttcagggctctgtccactgagccaggtttggttttgtttctaagattttattctgccaggccgcagtggcttccagcacactttatctttaacctcctcctctggtcaccacaatgcgtgaccacgtgcattcttttaacccagaacttgggaggctgaggcaggcagatctctgagttcaaggccagcttgctatacaaagcaagtctcaggacaaccccaccaccaccaccacacacacacacacacacacacacacacacacacacacaaaaatcatttttaattgccatgcctgatgaggccagaggcatcagataccctgggcccttgctaagcctctagtttgattgttttgtttttttgttttttttttttttttggaactaggagctcactttgcaacccgagctagcctgtaactcaggactggggttcaggtccaagccaccatgctgctttcttggtctatcaccgacaccccagcctctatccaccgtctcccctgagctcaggaccatctcacattctcctgagcccagctctggatcccccaccttgggtcatccccttgtccagctctttggacactcacccatgcacagggtccactacgatggctctgggtctggaccctgcctcttggaacagtgtcctcctctttacgcccttggtgtcagccacagatacgctgcctgggactgaatctgtccagtagatgttgcggtggatccagtctaccgccagcccgtcaggggcatgcaggtcctcactgatgatggtgtcgtaggacaagttaggggcctggtccatcagggcgctgaggcagaagaaaggggtcacaatagagcctggggtcagggcctccctaggggacagactgtcaaaagggtgacggggctgcagctcacctgtagatctttttttgggacaggtcggaccagtagattctattgttggtcacctccgtgtcgagagccaccacattcttcaggttggggagcagactggtgtactcgctgcggtccagggtcatcttccggacctcgtggcggttggtgaagagcagatagcctatggagcctggaaagccacgcagggtgatgagagatggaagccagggtttcatggatgccaggcaagaactctgcctacaagccccagcccctggaacccatttctctagtaagcttaactagggaggtaacgggctcaggtcacactttgtgcctcttcctatctcccaccctgtctggatgggaagcagggcaggtagagttctgggaaggatagatatgggtgaaggcaggtccctactgtacacctccgccaccagccagaatcctagagagatgccatacccaactagggaaagtcatggcagttctgagccccagggaggagctgcccagccacccccctcggccggcagcccagcccccctcagctggcagcccagcccaccttggccggcagcccagcactcacccacagccttgcagaccctggtgtgtgggtccatgtggaagccggcctggcactcacacttgtagctgccttccaggttcacacagagctggctgcaggtgtctggctcctgacactcgtcaatatctgtgtgtgcatggggacagagaaagggtttcgtctaggggagaggaaccctttctacaggacaacaggagaacaaaacatgtatcctccagtggctaaaggatgccaccctcacaagaccctgtcactcacctccaatggctaagggacaccaccctcacaggacctggaccctgtcactcacctccagtggctaagggacaccaccctcacaggacctggaccctgtcactcacctccagtgggaatcttccagccacctttccttcccttctttattttttttccatttttggttgtttttctgttatttttttttattgtttgtctttgtatgtagccctagtgggcccaaactgaccatggagaccaccctatccgtgaactcagaaatctgcttgcctctgtctctcaagtgctgggtttaaaggagttttgcaccacatttgaactcttttttctgagacatttcacacagtccaagctggccttgaacttgctacatagaagacattgaacttctgttcctattgctgacacatcccaagcattagaactacctgtgtgggccaccaggctaggttgcgatgcactggggacagaatccagagctacctgtaaggcaagagttctagcaacggagcccttgctcgagctggaacctcgattcgtgatgaggatccccaaaggcaggacctgccattgatacactttgctcttaacagtcaggccaggacccagtgttcacccctggaactctcctaagagccctaagcagtggggactgcactcctggccactgagcacatggggaaactgaggcacgggttcactgggtggctgaatgtgctgcagactcaccttcacacctgtggaggtccaccaaccggaagccgctgggacacaggcactcagagccaatcttgaggtccttgcagatgtgggaacagccaccattgttgtccaaacactcgttggtctctgcgtgggattgagaaagcagactggctgtcctagcgccgtacactttccacggggaacactacgctactgcactgccttcgcaaaacacttggaagatcattcatttttattatttttaatcatgtgtataagcgtgtctgcatgtgactgtgagaacagatgacctcagaagccagaggcaccggaagccaagagatggatcccccctgtagctagagttacaggcgattctgagccacctgacttaggttctgggaaccagacttgagtcctctggaagaacagccagtgctcttaggtgctaagccatctccagacgaagaatgtatttatataagtgccagggatctgaatccaggctgcatctcccagccacccctgcctcccatgcctgtcctgccctggagccaaagctctgtcacatctatgatgcacagcgagccttttacatgctgcgggggcgctggctgggctcacagccccacagtgactacacactgatgctatccccggctccccaacactcactgcactccttgatgggctcatccgaccagtcctggcagtcgcgggcggagtcgcacaccttgtccaagctgatgcactccccactgtgacacttgaacttgttggggccatcacactgtgtcactgtgagaggcaaagaacagtcaggagggcctgagctacagggtttgcctgctcgcggtaagattacacttcagcgctggagtgtgtggctcagtgctccaacccctgcctagagttccccagtgagggaggggctgggggcctgccattgggtagccctgcccgaagtctcactttgtagccttactggtcttgaattatagtccacaatactggacatcaaggagaccctcctgcctcagctcccaaaccctgggattacagggttgtcccaccatgcctgctgtaaataatttcccaggggtgttttgctttttattctctgcaggagacccagggccttgagtgggtagacaagtgctctgtcactgagacaggtccctgggttactgggagctgcttgcttggcaggcagacaggaagttaatgtttaatgggaggagagtttgtttagactctgcatgagagagagctcagcgacagacagacggctgcaaagactgtttttggctgagttgggtttcttatatagaggtctcgccatggtccaggctggtgcaagtgtgtttgcttcctatctcaggctccagattgctggaactatagacctctaccaccatgcccagcatggcattgagcaggcaaaagcaacaagtaactcagcctagcaatgggaagccctgagttcagcacaaaagaacaaacagcaaaaacctaacatttaaaaaaagaaaaaaaaaaagaaatgtgctttattgttgttgttgtttttttttttttttatgagagctgttctcagattcagtgtaagcaaggctggccttgacctccagcctgcacctcccgaacgctggggttacaggcgtgtgtcaccacacaggttcatgtgaggcgagcactctaccaatggctcagccccagaccatatcgttttttgttttttgttttttttaagatttatttattattatatgtaagtacactgtagctgacttcagacacgccagaagagggcggcagatctcattacgggtggttgtgagccaccatgtggttgctgggatttgaactcaggaccttcagaagagcagtcagtgctcctacccactgagccatctcaccagcccaaccacatccttttatgttatgcatattttttttccaacttgcaggtcagtggggtggaagaagtgtcgctgggccagatgccgtgagtttgatctcaggacactcatggtagtaggaaggaaacagctctcgtcagttctggaatgttcttttcatggagctgaattgtatgaatgtcactagcacctcaagcctaaagcagcgtctaccaggagtacctacggctcccttggtagaacgcatgaagctctgggtttgttccccagcataaactgagcacagcatcgcacatccatgatcccagctcttggaccgcatgagaacccatctcagaaataaacaaatcaaagtaccgaagcagagaattccattttgtaatccagctaagtggaaggaggttcaaagggggcaaataactctcaaaaaaaaaaaaaaaacaaaaaaaaacaaaaaaaccaaacaaacaaaaaaaaaccacagctgatcttgggtgatggatttctgaattcaaggtcagcctggtctacagagtgagttccaggacaggacagccagggctacacagagaaaacttgtctcaaaaaacatacaaacaaacaaataaaaagaaatatgcctcctaggtgcctgacccccctccctcaccggggaacagcagtaccctaactttacagaaatgcaaggcactgagaagtgggaccaggaactgaagcagtgaggggcaaaggttaccattgacgcagccgagctcgtcgctcatgtccttgcagtcatgttcacggtcacactggcggctaccgtgaatgcaggagccatctgcacactggaattcatcaggtcggcaggtggccaccgctggggaggacaggatgatcgtcacaagaagcaccaatacaccgttctgcttaattgcagttagagggctggcaagatggctcagcaagcaaaggcgattgccggcaagccctaagcctgagctcagtccctggaatcttcacagtgggtggagagacctcactgtcaggagctgccctctgacctccatacagagtcccacacacatgtgtcacgcacaccactaaatcacgcaggggattggaacttgggactcatgcatgtgtggtgtggtggtttgaatgagaatggcccgaatgtctcacaagtttaaatacttggcccccagttggtggaactgttgaggatggattaggaggtgtggccttattggaggaggtacatcgctgtgagcaggctttgaggtttcaaaggtttctcgcccttcccagctagcagtctctgtctcatgcttgtggttcaaatgtaagctctcaattatagctccagcaccacgcctgcctgtctgctaccgtgctccccaccatgctggtcaagaaactgtaaacctcactaaactctctcttctataagttgccttggtcactgcccacagccacaaaaaactaagacacttggtaagtgacctacggacttggccctcttagaaattcattgttccaaagaaataaaaacattttctagcccatctttggttgattgcttatgtatgtatgtatgtatgtatgtagccctggctttcctggaactactcactctgtaggaggccaggcttggctttgaactcagaaatccacctgcctctgcctcccaagtgctgggattaaggcatgcgccaccactgcccggcaggttgagtttttctaaaaaatttatttcctttggtatttgagacaggttctgtctccgtggcctgactttcctggaattcactgtgtagaccaggctggccttcaactcaagagacccacctgtttctaaaggtgtgtgccatcatatccagcccttatctctagttaatttttaaaattttattacacggtgtgtgtgcagtatggggcccatgcaggtatgtgctcctccggctcctccttctccgagtcagggtctctcaatgaatcgggaaccaggctgggagccaacaagctccagccatgcccctgtctccacagcatggctgtgctgctggagatttgaactcaggacttcgtgctctggcagcagacgctctacctacccaaccagccccttacccaaaaccaatcaacttcctttctgggcagtctggttattgctaagccccaaagctccccagcagggcctggggagccaatcatccatccctcctccccagggccttaccgcagtgctcctcatctgacttgtccttgcagtctgcctcgccgtcacagacccagctgcgatggatacactcactgctaccacagtggaactccagggaggagcaggggctgctaacgcctttggaggccgtgtctcggccctggcagttctgtggccactcatcggagccgtcaacacagtcgacatccccgtcgcaggcccaaagactggggatgcatatggatgagttgcagcggaagtgggcggggccacaagtggtggcctggcagtgggcctcatcagagccatctaggcaatctcggtctccatcacacacaaactgcggggagatgcacttgccatcctggcatcggaagtcatcctgggagcacgtcttgggggctgcaggggtgcacagggaggagagggccctgtcaggctatggcttacaccagcctattcgcagacaggaccgtgtgcttcaaaaacacacaacccatttagcagagccatgggtggtagtacactagggctcaggaagctacaacacacccttttctgcctcggtttcctcatccatatggtcaactatcaagccagttctgtacctatgagcccctcactggggtgggtattgagccacatcttaatgctttaggttgtgctgcgaactgcttatcttgctaaatgtataaattatactctagtgagggcatgtatatatagggagacccacattaccacattatacagagataatattcagggttctgcactcttgtgtcccaagtatccactgtgggccttgttttgttttggttgttggtttttcaagacagggtttctctgtgtagccctggctatcccggaactcactctgtagaccaggctggcctcgaactcagaaatctacctgcctctgcctcccgagtgctgggattaaaggcgtgcaccaccactgcccggccactgtgggccttaagaatggatctgcacataagtagtatgataccaggacacactgctgagaagcacactggcacctagtgagtcagctctggttcaattcctacatatgggctgcctggtgacagttactggggcttcccaccacaataaatgcttctgatgttcatgagaggtggcatcatctctcagggagggatttaagccacaggagcaaccacacaccagaactcaggtggagtccacacaggaatgaagcctcacagctgtcacaccccagtgccctgttgcaaggtgggcacacactcacacacacgctcacacatacactgaggcactctcgaacgcacacacacatgagcacatgtgctcacacatacacacacacacaaatgcttacacacgtgcacgcacatgcatacatgagcacacatgctcacatacacactcactcacacacaagccacacccaaggggctgagcaacacttacgacagccttgttcgtctgagtcattttcacagtctacctgtccatcacatctccaggagtcaggaatgcatcggctgacacggcctccacagctgaattgattggactgacaggtgacagacactagggataaaaaggagttgtcactcaaaaggaatatgatttggtgagaccaggtccatctcccctgtgtgtgtgtgtgtgtgtgtgtgtgtgtgtgtgtgtgtgtgtgtgtgaaggctggtcacaagcacccatgcagccctgttagtggactagtatgactgtaagccacagcatgaggtcaggtatgaaaccttccaaatccatcatcaaagcatacaaaataccttggggtttgaatacttggattggggatggtcaccctgagccttcttctaactcacgaatggaattaccattcctgggcagggtcttggcacagcagtagagccccttgtctagtaacaccccagggagggttgagactcacgggaagagcccctgcctagaacgcacaggccataggttcttctacaaccaccaacaaataaaggggacttactgcatgtctctggggactcatcggagccatccgggcactcggggctgccatcgcacacccacttgctagcgatgcattttccgtctctacactggaactcgttcctgctgcatgagtcttctgctgtgagagcagaaggaaaggaaggtgtgtcaacagcagaactcaaagatggctgcatcagctaaccggagaacgcaacagaggtgacaaatgtacccagcatagccagggcaacctgtcagacgttaataccgacatcagggctattgaacaaaaagtctaaaaacatattgaatttaattggttaattattattattattttacttttatttttattttttggttttctcgagacagggtttctctgtgtagccagccctggctgtcctggaatgcactttgtagaccaggctggcctcgaactcagaaatccgcctgcctctgcctcccaagtgctgggattaaaggcgtgcgccaccacgccctgctagttaattattttttaaatttattttgagacaaggtcccactgtgtagctttggctggccttgaactttatatagaacagaatggctttggtcttacagaggagacctgcctgcctctgcctcctgggtattgagattagagtacaggccacctgatctcctaacatactggtacaatattggcactaaagttgtgccaagtaaccaacagttatcagatcctcatgacatgaaacccaagtctgcactgctaccacggccaagagcattagaaagggcgtggacctgggggcagaaacaagtacactaaaggaacacaacaaaatgtcccctaatgacattctgctatactcacagatcagtgccctactcagccatcaccagagacctccggcagcagatgggaacacgcacagagactcacacctgtgttgggacgaccctcaactattgtatttcttggctatgaaaaagtatgtccccgtgttaactcacttgcagaggaagtgagagaccttggaacattcatcagtacggaataggattaagtctctcactcagggctcagggaatccttcctaggaatgaggaggcggaatggttgtacgaggccaataaagcaaggcctctggacacaactggaacggcacacatgaactcacagacacggtggcagcatgcacaggagctacacaggtcccagtcaaccagggtcccagccctgggaggggaactggacatgagaccccagccctaactcagaagctatctccaactgtcaaccacttgaaaagaaaaattagttgtctccaggggagtatggctgagcccagaaaccacatctcagtacagtccccacagcagtaaacggtcaccacaaaatgaattcaatgatggtttttagatatttatcacacgttttctttgggcttttctcccctggtgttttgcttgtattttctggtttccgactaaggatgtgtttttatagactttgcatgtgtgcgtcctgagtgtgcatgtttcctttgccctttcttttcatttcttttttttctgtttgttttgttttattcttatttgattattaatgtatttgttttggccggtttggtttctaaagagagcaaaaggggaataggaaggggcggaggatctgggaggactgagggagaggaaaccaatgatcagaatttactgcgtgggaaaaatgatttccaattcaaaaaatagtaatgtgtgggtcacaccatgcccggccactttaaaaaatttttaatgttatttatttacttacatctcaaatgctacccctcccagtcactccttccagagtctgtctcccaccggcttccctctgagagggtggggccccacccacccaccctggtgcatgaattctctgcaggatcaggagcatcttctcctgcttttgttttcttcggaaacagagtctgtgtagctctttggctgtcctggactgaccaggctggccttgaactcagagatccacctgcatctgtctccagtgtgccacttaccactgtccaccttcatggggtggaagcttcagtaactgatatttcacacccctgctgtccctgagacctctctcaagtcccagcaccctgctcgctacactgtaattctttctggttttttgttttggtttggttcccttacagtgtggcactgagtacctctggggggcctgcaacgctcaaggatttggattaaaggcatgcagcacggcactgcactcatgagaccgacaatactctcttgcccagctgctggcctgacaggtgactcactcacccagcatctggccagcaaaggaaatgacacatcagcttctctctgatggcagatagtgatgagtaaggccactagaattccaggagtggctgggtccttacaaaagggagttctgagggggcagtggcagagaagaacaggggagtgtcaccccattgcccccaaagccaggtgacaggtcaccgatccacactctcactgaatgacacataaattgggatgtgggtgtggaaataccagccacaccctatgccggtgggggccaggcggcccagcatgcaccacgccaggttatatccccagccctgcatcaaccaggcaagatggtacaagcctgccatgctgtcactcaggaactggaggcaggaggatcactctaaaggcagccagggttccatggcaagaccctgtctcaagaacaaaaaccaactaaacaaaaaattagtaatgtttggagggtgcacacctgtcatcccagggaccccttggcagaggcaagaagtctactacaagtttgagcacaacctaggcaaatggcacagcctcagttacacaaggagagaccctgtctcaggcaaacagaagaaataaagaaggcctgcagggtggctcagtggtaaaggactggccaccacctatctgagctggatgacggaaggagagaacccattctgcccctgtcccctgaaacccacacacacacaaaacgaacaaacaaacaacaaacatcattgtaaatatttaaaagcaaaccaggtgtggtatgcacacctttaaccccagcacttgggaagcaagtgagtttgtgaccagcctcatcttcacagtgagttccaggacagccagggcggtggacaaatcaaatcaagtaaaaggccagtcaacacgcaaacacctctgcagccttgaccctcagatggccaatgtctcgaatgacgaagcatgaacaaggccacagaaactgaaaaggggaaggacagttctggagttgtgatttccttgaaaagcacagaactagtctatgaatgttctcactttaaccccaggtgtgggacggggccacttcagactgtccacagcagctgactgggatttgtttcatactttaggaggggcgtgattttgccagcggcagatagtttctgtgatcgtgtgacgtttggaattttggggacttttcagaggatgtgtgaatgctagggcccagagaggggcgtgagttgttgactgtttgctgttggttatggtttattaagtagtgagcaaagaagaaacaagaaattagacattctaacagcaaggaacttgatgcccggaatcagcaggaagtagcctaggaataacgtcacccacccccttttcccccctatctagtgttaggggctttaacagtggagagtagaagagagaagaaccacaaagtagcaatgccagctacaaggaactactcagtcctctttcccacatacaagtgctttctaagttcctctctctctctctctctctctctctctctctctctctctgatggaacgacaggggtgtgctgaacacctgaccactgttttctttcccaaactgaggacagatggcatgcagagaaaccaaaataagctgtgattggtggcgtgcacttttaatcccagcacttgggaagcagaggcaggaggatctctgtgagttcgaggccagcctggtctacagagtgagttccacgatagccagggctacacagagaaaccctgtctcaacaaaacaaaacaaaacaaaacaaaacaaaatgataataaaccaaaataaaagaggttaaaatactgtcagggaaagtgcttgcctaacacacagggtactttgggctcctcctgcaccaacaaagagcaagcccatagacaggtgtgttagctttcgcctgtaatcccagcattccggttgctgaggcaggagggttacagtgagttcaagaccagtctgggctacatggtaacttccaagccagctgggctatatagggagacctcaaacaaaagcaggccacgcctgggtgcttcctagtgggaactttctttcagcatgtagagattaacgaaaggaaaaccctctactaataggtagtgctggatctggctaatcacaaaagggaaacagcctcgaacagaatattaagtttgtatagaccttgggctcataggttttacacacacacacacatacactagcactcatccttacatctctcgtaggtcttggccccaggttacactttgaacaatttaaacagaggcaggagactgcaaacctagtcccttgggcagagagaattacaagcaaagatattgccagaaatgtttttgtttttttttttttttgttttgttttgtttcaagacagggtttctctgtgcagtcctggctgtcctggaactcactctgtagaccaggctggccttgaactcagaaatccgcctgcctctgcctcccaagtgctgggattacaggcatgcgccaccactgccaggctcagaattgtttttaaatacagtgatcttttctaaaggctgtcatcctgggtcatctcaccacctgccaaaactacccttctcctgataaagatttaatgggaccaggacttaatgatagctgtcaccctgagcccttcagctgcccatcagaggtatgttttttgatgtggggaggggccttaatggctggttctaagtcagggctggctcctgttgttatgggaacgaagcccaattggaggtcaaccctggtgaacaaacatttacacaagtgttttcacagtcaccctgaacatcaggggcctgatgacgggcctggtcaggatacggtcaccccaatcccggcatagactgtgcccattttactgtgcgtaacagtatcgcctaagcaggtttgttagtaaatcctccacagcatccgttttcctacttcaaggttctcctgcaccaaggtagctcaggagcaaaggtgctcgctagcctcaagcctaagatgagctccatctgggaacagccaactcctgccgtctccatggggttgatcaactccactcttagcaaccaaagctcatttgctccacatgcccagagggtgcagatgctgctgatataattaaagcagagggagaggagcgccaaaagccaagcaaccgaagaggccagagccttatctggagcaatcggggagataagagccctgagtgctcagagccaggagcactgcccgccaggtttgtaagctcagagatgctcaagtgagaggttctcagagctgaggagtcagaagcagggctagcctgagctgtacgctgagaacctacagaaaaaaaaaaaaaaccagaaagaaaggaaaactatgagagagagagagagacactggcacagatgaattgccagcctggactacatagagaattccaattgcaggacagcctgggcttcagagggagataccccaaaaagaaatgaaaagaacaagagaaaaaaatccaaccttatccagtgttttaccaattttactcagcaagaaatgcaacagagacaaatgaatgcgcccatggcatgctaacagtgcttgcaaacccgtactcctcccgtgttagacagacctgtggcttatctgacacccctcacaccgactgctggctctgcgtttgtgtgtgtgtagccagaggtccgagttgaatggcttcctcagccttcctccttctctcactgagcccagatcgcaccctcaagccctgggaccctctgagcgccgtcatttcaggctgccccacgtcactaactgagccaccgccccagcccccagatctgctcttgagcaacccgaagataatgtgtgcatgtcgaatcttttccttccttccttcctttcttttttttttttttttttggtttttctaaacagggtttctctgtatagccctggctgtcctggaactcattttgtagaccaggctccaggctggcctcgaactcagaaatctgcctgcctctgcctcccaagtgctgggattaaaggcatgcgccaccaccacccgactagtgcatggcgaatcttaaaacagacaaatcgtccagttaacacatgtaaccctaacatagagcaagctgtagtcaccgtcgttgctatgagcatgagagtctggggagaccagcaccggggcccttggccttccggtgagatgggaaacctcagctcttgctcaagactttataaaatggttttctttctttcttcttgttaaagaaggcaatgatgggtgaaacgcaagctgagcagggtatctggtctagccttgtctacaattataacaggatagctaagtgtttgtctcagtgttcaacctctcccctctccctctctcttagtccagggttcactgtatagccctgcctgccctggaaatcacaggaatccacctgcctctgccttccaggtgctgagactacaggtgtgccccaggatgcccagctcagccaggctgtctcaaggaagcatccccagggattgtccagttgacagctactcacagctaactgaagggcactcctgccaagctcctgtggggtcagaaccgaagctggttctgaggaggaaaaagcaattaaaatgttcttggccagccaggctgactgcaagaaaagcagtaacccaggcattcatggaccctggttctatccatggtgtccccaaatccaggcatggtggcacatgcctgtcatcccaacactcccgagctgaggcaggagaattaggggctagagactacacagtgacttataggccagcctaggctacatgagaccctgtctataaagtgagggagaggtggagcacttttcccagtgctgcaaagaagttgttggtgagattgtaacaccatctcccttcctgtccaaattccaacgcctctcctaaaactaaagtccactttatggatctgtccaatcctacacgttcagagagtgggaacgaaccaggcctgcaaaagtctttgccaggtccctggccctccctgcctgatggtctcagctacgggtgtctgggttgcctgaggcacatctgcaccaaaccagggaagtagggacaaggtagggactgaaggctcacaaggaggacccagccggcccggatgtgtagccccaccccacccgggagggtcgtgcaagccacgcccctgaacatcatcctcttcctccattgggcgaggggagtggctcgaggctcgcctgttccggctgcacccaataggagctcgggggtgcggtgggaggtggggttagggcggagttttggggcacgcggcagtagccgggtttgagtgcagtgtggagacccccaagtcctgtaactacgactagcgaccccaaagttgaacagctgggcctgggtctccccagcccttaaaacgaatgatgggacccctcctcttggattccctcacacatagctctgaaagacacctctgacttgggagagcacccaccggactccccaaacccactctgaccccctacagctctggcaccctatttccaaaacacttccctccagccacgtgggaaggacatcacatcaagttcgcacgaatggttgtatttctcgaccaaaaataaaaccactcggggctctccgagttcaggacggctgcccctgaccccgggcaggctcctggcgcaaagccttacctgcaactccggcagcagccaggagcagggcgatgacccagcgacgcatcagatccgcggtgctcatccttagcttctgcgttgcgtcctcactcggatcacagaccccgaaatgttcccgctgcaaacactggatcgcgggccccacggtgtctcggctgcgaatctgggctcgcaagcctcacggtgtcccggctgcaaactacgccgcacgcccagagtcattcccagtactaggggcgaggtttccaggcgggggaggagtctgcaatggggtgattttcaaaaatcttcacctcactgagcggggaggagcttggaacggccgatgtgacatcgtctcttttaacccctgaagctcccgcagcagtgggaagttcctcaaattcctcccacagaatttcaccgcttcccggacacttagccgcccgcgttgctgtttgagtgttcaagggacgacccacgcccttccacaccctgggtcgccttctgacgctttcctttccacctccaaagcaaaacagaagtatgcgaagccccctcccacccccgacccctacacttcttgcagcaagtttgctttcctgtctaggaatgggcacatagatttctgacccaagtacagttgcaggttttatctggatccgtccataaacacaaacactcagcgagaaatgtatataaaacgcggcggcgtgtgcgggtgagcgagttggctcagtgggtgagggtgcaagcctgaagacctgagtttgatcccagggatccacatactggaaggagagagaaccagaaccaactccagcaaattgtcctctaacttccacacacactcccctgtactaattaattaattagaaagaagaaacattacttggtttggggggtaggacccagtagttagaataattataattattaatggaagaattccatagcaagatatggtaacactgaaactaggaagaaggcaggcagatctctgtgagcaaagtccaaactggtctggacagcaagttccagactagcctgggctacacagattctgtttcctcctcctcttctttccttctttctttcttttctttccttttcttcttttgttttgtttctgtttctgtttgttttgtttttcaagacaaggtttctctgtgtagccctggttgtcctggactctgtagaccaggctggcctagaactcagagatctgcctgcctctaactcctgagtgctgggattaaatgttgagtgtttactaccaccccactaccacctgtcaagagaccctgtttcaaagctaaagttgaaattattttaaataattcatctgagaatcaatgggttccttcctgtgttgacagaaatgttgatttttggtttatttccttaggcacctgctggtaccgctttatcctgttacaaggagttgaacacacagaagggcatctcttccctcgaagcaaaaccaaccacatgtggcctttttcccctcttgacactggatggctaaaccagaaggctgtctgccatggatagagaagttttgatgaatcaaaggcttagggattttctaaaagggactcagattctgtccctgcctagctccctgcagaacaaaccagggctagtgtgttggcttagtgcatgcagccaggactgacctgatgtgagttcaaatccgaggacccacatgagaggagagaactcgtccctgtgacctgcacattcatattgtgatgtgtcacaggcagtaataaaaaagtaaataatacataatgcaaaacaaactaccagaagctgaaccgtgagacaggagagagaacgggacacactgcattgggttggtagggtacctggcttcgtccccagcatcacgtaaaccaagcctgttgtcacaatctgtggtctcagcactccccgagggaggcaggaggaccatgaggatagcctcagctacacagatagtagaagccagaagacagaaaggtgtaaaaagctgcttttgtgagttgatttctctcggtttttgtttgtttgtttgtttgtttgtttttgagacagggtctctctattacatggctctggctgtcctggaacccactatgtaggccaggctggcctcaaactcagagagatccatctgcctgtcaaagacatgtgccaccgcccgaacagcttggttctttttctcccttgagttttgaggcgcttatgcgtgtgctcacacgtatatgtaggccagagttcaacgtcaggtgtcctccttggttgcctctcacctaattaaaactcatggtattactgaattttgtgtgtgtacacacatgcccatgagtgctgggggtcagctaacagcttacagaagtccgttttctcctgagtgggtctccgtcccagcctgccacacatggcagttcacacatggcagctccctggcttggcaacaggagactcactataaataacctgtaactcctgggctcagtgatcccctttctctgtctcctgaacagctgggactccccctcctctgccttgccctccccactgggcctccttagagtcaccaggaaggaatctcttccctgaagtcaagctgtgtgctgagctggtcacagtggccggggccttccatgaggtaggtctgggtgctgcttctctgcagcactctgctctggccagcttgtccctggccagtttgcccagatccacacctgcctgtgatatctccaagcctctgccagtccctgcggttgggcaatggcctcaggtcatgaggaattgaatcaggctgtactgggcaatagcctctagccataaaaaaatggcttaacccagccttgactattcaccaacagagataatatactaagccagttactgaaaacaccccacgctgctcccagttgaaatagctgtaacttctttttgtttgtttgtttttgtttttcgagacagggtttctctgtatagccctggctgtcctggaactcactctgtagatcaggctggcctcaaactcagaaatctgcctgcctctgcctcccaagtgctgggattaaaggcatgcgccaccatgcccggcagctgtaacttcttgatggctatggtgtgtgtgtgtgtgtgtgtgtatgtgtgtacactatgtatgtggtgtatatgtatagtgtgtgtatgtattgtgtgtgtgttttatggtatgtatgtgtgtgcatatgtgtatggtatatgtggtgtacatgaatggtatatgtgtgtgtatatgtgctgtatgtgtatggtgtgtgtagtgtatttgtatggtttatgtgagtgtgtgtgttatgtatgtgtgtatggtgtgtattgtgtggtctgtatatgtgtatgtatgtattgtgtgtgtatgtgtgtgtatatgtgtatgtatgtatgtatgtgtgtgtatgtgtgtatgtatgtgtatggtatgtgtatgtgtatgtgtgatatgtatgtgtgtgtgtgtgtccctgaccatcctcatgtgcccactgtaggaataaagccatgacagcctgttgggggtggagcctgcttctctgactccttcttcagctgccacccgtgttggctcctgtgtggccctgggccacagactttgctccagaaggtttcttccctgtttcttcccctctgcttgctttcctctcactagcttgagaggattctggaacttgaccaggaaaatgttgggtgctgctcccctcccagcagccaccccaggagtggacatagtcaccccagagacagtcttagtctctgacttcttccacctccttctcctccaccccagccctctcctcttacctccctattcccctcctcctcctcttcttccctcctccctccttttttttatttttatttttatttttttaggtttttgagccatcgttgctggctagttttgtcaactggacacaagctaaagccatctgagaggagggagcattaattaagaaaacgcctccataagatccatcgagaaagcattttctctgtgtagccctggctgtcctggaactcactgtgtagaccaggctggcctcaaactcagaaatccacctgtctctgcctcccgagtgctgggattaaaggcctgcaccacacccggctgtccctcctccctccttttcaactctagaaaatacctgccctttttttgcctaaagcaagacatacaagttgcttggatttaaattattttgttcgaaatttgtggtgtgtgtgtttgtgtgtgtccatctgcacatgcttgtgcatgccgcagccggattctacaccaagtgctttccttgttatctgtccaccttatctttaaagttggtataaacccagaactcattgactggataaattaaatgggctggctagcaagccacaggaatggcctgatcaacctgcagctgcctgcacacaatgcctgcaggtgcacacgtcccaccccctccacacctggcttctcccccttggcgctgtgtgtccagctcaggaaccctgcttgcacagcagacactataccaaccaacagagccatcgctgctggctggctagttttgtcaactggacacaagctaaagccatctgagaggagagagcattaattaagaaaatgcctccataagatccatcgggaaagcattttcttaattagcagctgataggggatggtccagcccaccgtgggtggggccatccctgggcttgggttctgggttctataagagccctgaggagcaaagcaaggcagtaagcagctcctcaccagagcctctgcatcacttcctgactgggttcccacccagtttgagctcctgcttgggcttcccccaatggctcctgactagggatatggaagccaaataaacccttcctcctaaagctggttttgtttctcgtgtttcaacacagcaatagtaaccccaagacacatctgtctagtcccgggggggggggggtgtgtgtgtgtttttttttttttttttttttggtttttcgagacagggtttctctgtgtagccctggctgtcctggaactcactctgtagaccaggctggcctcaaactcagaaatctgcctgcctctgcctctgcctggggttttgtttgttttttgttgtgtgtgattgttttgtgggtttttgttgttattgttgttgtttccttgtttgtttgttttttgaaatagagtctctatgtaaccaggctggcctggaactcccagacatccccacgcctctgcctcccgagtgctggaccagtttttatttgtgtgtgtgtgtgtgtgtgtgtgtgtgtgtgtgtgtgtagccctggctgtcctggaactcactctgtagaccaggctggccttgaactcagaaatccgcctgcctctgcctcccaattgctgggattaaaggcatggcccagctgatttttttttttaagacaggaatttacaatgtaacctagtctagcctcaaactaactctgtatctaaggctagccttaaacggatgtttctgcttccccctccagggagccaggatgccaggcttgtaccaccaacttcagttactaggggggttagggatagaacctggggtgtccagcaagctagacaagcctctagccacgggagtcccagccccagtcggtcaggccttttatatctcctttttgtttttgattttgaaaccatgtttccacaggctgcggaaaactctcttccctgtccctgaggtcacagaagtcatcgagctcctcttcctgtgcacagcctgcttgaaagaattattaatgctaaaacggtatttattttattttttattttttcattgaaaaaaaaaaagagcacaacacatgtgttcaaaccttgggtgtcactgacaaagatttggttcatatgatctgggaaatatttctcggaacctaacaggttaacaaagtaataaaagagcaggtaagatgggtcaggtgggtaaaggtgctagctactggacggagagaagtaattctcacctccacacacactgtggctgtaaccctacacctccctcctcaattaaataagtgtaattctgaaagtaagccaggctgtggagacactcgcctctaacccaatacccagaggcagaagcaggaggctctctgaattcaaaacttgcctggtctacatctacagagtgagttccagggcagccatggcaacatagagaaactttatataaaaaaaaaaaaaaaaaaaaaaacaagccccacgggggtgggggtggaggggggggggaaggcaggcgaatttttgagttacacagagaaaccctgtctcaaaaaacaaaaaacaaaatcaaaaaaagaaagaaagaaagaaagaaagaaagaaagaaaggaaggaaggaaggaaggaaggaagaaaaacaagtgtgtgtgttaggggtgtgggtggtatacacatttaatctaaacagttgggaggcagagggaggcagatctcttgagtctgaggccatccaggtccacacagagagttccagatcaaccaggactgcatggagagattgtctcaaaaaaataaacaacagagatgatgggctggagagacaagcccgtcgtcttcagaggaccctggttcagtttccagtgcccacaggacagctcacaactgcctagaactccagttccaggggctgtggtttccatggtcatgggcacacacacacatgctgcaatacacccacacagtaaataaaaacttaaagaagggtgctgatgtgacacatgcctttaattccagaattcaggagggaaaggcaggtggatctctgtgattttgaggccagcctggtctacagagtgacttcccagactgagaaactctgtcttttttttttttttttttttttttgagacaggtttctctgtgtagccctggctgtcctggaactcactttgaagaccaggctggcctcaaactcagaaatctgcctgcctctgcctcccaagtgctgggattaaaggtcaccacgcctggctgaaactctgtcttaaaaaaattaaacaaataaataaatacaattttaaaataaaataaaattttaaagattttgttttgttttttccttttttggtggggggcagggcaggaactcactctgtagaccaggctggccttgagattcacctgcctctgcctcccaagttctgagattaaaggcatgtgccatagacagaacttggagccaggctggcagccagcaagtcccagcaactctcctgcctcagcctccacatttgccttggtaaccagtaaggaggggggtagggatggagggggtgactggcttttcacatggttggtgaggatttcaactcagatctccatgactgcacaatatgcactctgtcccactgagccatctacctagctcaagacaggttcttcctaagtagctcaaggtggcctcaaaatccataatcctcctgcctcagcctgcccagtgctagggtaacaggtgtgtcaccatgttcagctctgttttaaaattcttcttgggctaggagtggtggcacatgcagaagccagtggatctgagtgggaggctagcctggtctggagagtaagttccaggagagccagggtgtgtgcctggtaccctcagaggtcagaggagggcagtaagcctcctggagctggagctggagacagttgagagctgccattgtaggtgctgggaattaaacctgggtcctccggaagagcagccagtgctcttaactgctgtgccagctttccagccttttttagtgggcactatgtaccccaacctggctttgacctcctaggccaatacttctgcttcagacttctgaccgatgaactagttgtacagggcatgtgcatgcccagctagggtgacaatgtaacaagttgctcatggttgttcttgtgggtgtttctggtggtcaggaggcaaccttatgagccgggcttggtggcacacgcctttaatcccagcacttgggaggcagaggcaggaggatttctgagtttgagaccagcctggtctacaaagtgagttccaggacagccagggctatacagagaaaccctgtctctaaaaacaaaaaacaacaacaaaaaaagggagacaaccttatgcagttggggccttctctctttccattttgatgtgtgttctagggaccaaactcatggcactcatggcctaagacttatgtggctatggcagcacctccatctgtggagcacagacacaaacagggctgtgagctgctgagggagggcctggtttcccagagttctaaggggatgggtgactcagaggcaggccagggagaggcctggctttcttctgcatttctgcctctgtagcgataaggacacttccccctctgggtacaggactggggcaggaacccggtagtcctcctgggccctgtgaggtcagggagctttagctggagggcggggcgagctgagggtactctttctgcctggatgcagacaaaggtgacttaaaggaagattctggctcaccgctgaggggagagatgagaggccatgatggtgggaaggtgaggtaactgctgcttctccgtcaccttttcctttctctccgaccaggaacccaatttatgggatggagccacccacatcagggtggcatgttttacctcagtgaacctaatctggaaactccctcatagacacacctagagattcgtctccaaggtgatatttagactgtcaagttgtctgcttcaatggagaaggctgaaaggaagagaagccttccagcttctcctctgtcctaagatgccatccccagcgtcctgtgtcctcagccttgacacagaccttgctgggaagaggcaagcaaatgcctcacccccaccaaaactgataacaaggaaaagatgctactcaagcccagccataggggcgatgtcggcttcaatccagactaaggtgggagccatggagggctcctgagcagaagagaagctgagagggtaccaacttggtgcctcccatggtttctggggaagacagcaggcgtgagaatctaaggaagaggtgaatggtgggctaggtgggggatgttggggtagtctgtatcagagtaggaagtggacagtgacagggctcagacactgctttactgttcacatggcctgttgagtgccctgggccaggagcctttggagccctagagatggatattcatctgccacaggctgcctgtgaaccatgttggctaggcgaccagggggatgtcaggctgtgtgtgtagttctttttttttttttttttttttggtttttcgagacagggtttctctgtgtagccctggctgtcctggaactcactttgtagaccaggctggcctcgaactcagaaatctgcctgcctctgcctcccaagtgctgggattaaaggcgtgcgccaccacgcccggcttatgtgtgtagttctatatagggctgtacagagccacacgtggccagcgtgactgagaaggttgaaggtagccaatcccaggggacatgagattagttatgtgtatgttgggggcggtgaaggtccctgccatgttcctgagtggacatcagaggacaactctggaacagctaccttcacccttcaccattcagttctcagggctagaactctggttctcagacttgacagcaattgccttcacccaccttgccgcttggttagctcggcgttgatcccctggagtgtgatagcgctggtgcccacctaatgcgagaggctaatgctcacttcttatctagagttccatggatacagctggaagaaaatgagtgagtgcaaaacacacacacacacacacacacacacacacacaaagagaaagacagacagacagacagagatagagagacaggagagagagagaagagaaagagagagtgggagagaggggagagaggtggagaagagaggggagagagagaggagggagagaagagagggagagagacagagagagagagagagaaagagagagagagaggtcctgagaagcacacaaaagtcaagggtcaccagagtctacccagagtcccataatcccatggctgggttgccattttctctgtttttgttcccctcgacataggttttctctggttgtccttggaataattcactctgtagaccaggctggcctcaaactcagatcttcctgcttctgcctcctaagtgctgggattaaaggggtgtgctactaccacctggcatgctggggtttttaaacacttattttactctctctgtctctgtctctctctgtagtgtgtgtgtgtgtgtgtgtgtgtgtccttgagcacatgcagataaatgctggtagaaaccagacagaagagagcatctcattccttggagttggacttgcccagaggatgtgtgtgggaagccgttgcagagtggcagttacagagtggcagttgcagagtggcagttggctactgctggccaccacacatacatagccagtaaaggttcttttgccaaggtgaggttttgagaattgacaaaagttaaccaatcagatgagagacaagttaaccaatcagatgagagacaagttaaccaatcagatgagagagaatgcctgtcctaggcctataaaagcagcaccagttctgggctcgaggtcttttcgcctctacaatcaagctctcccaataaacgtgtgcagaaggatcctgttgcagcattgttcttcctggccagtcgagcgcgcgcaagaagtggtgccgaaacccgggacaagaaacatcttcaggcactagcgaagaccccctgctacagggaggattcagaactgcatcacggggaaggagctgttaataaaggttcccgtaaaacagactgctgagaaggatccagcgtggattcagaactcttcggctggggaacggtggtaataaagtgttcctataaaacagactgctgagggctggtgagatggctcagtgggtaagagcacccgactgctcttccaaaggtccggagttcaaatcccagcaaccacatggtggctcacaaccatctgtaatgaaatctgactccctcttctggtgtgtctgaagacagctacagtgtacttacatataataataaataaatctttaaaaaaaaaaaaaaaacagactgctgagaaggatccagcgtggattcagaactcttcagctgaggaacggtggtactggtaagtctcccaaattgatccccgggttaaagggggataaaaaggaaaagaaaagggaggaaaaataaaaggaatcagtgataaagaaaaggaaatagtgaagaaaaggaaaggggaaaggaaaaaaaaaaagggaaaggaaaggaaggaaagaaaggattgagacaataaggttcccggctttgggacaagttaaggttcccggttttgggacaagttaaggttcatgagttatgcttttttttcctattgaccctttgtgggtaggtctgataattttggtcttgtttgttctgatatatggactctgttactgtttgaaacgtgtgtagaggcagtcaactcaggtcagaaaatccttacagagcaacaagaaagtatgtcggaagaggagaagggcttaaaaagaaaaaggaaaaagaaaggagacacagtgttatcaggtggacagaaaggacaaaatgaaagagccaaggcagaggaggaggaaggcatgcctttcacctgggcagtatttagattggaaagccttccttattgaatttacagtgaacaggcagtggctaactctgctgcaggaaatccagcatgggatagggatatgctgcttggtcaaggtcgctttgcacagcaacagacaagatatccagtgcaggtgtttgagcaggtgaatcagattgccataagggcgtggaaatcattgtccaccggtgttgacggtgttgacgtgggcgagagggtctgtttgtttgtttccccaggatcattgacaacagctgtgggtcccagaacgactgacaaggactgtgaaagatcaagatgaatcccaagatgatcctgctcctgatgattgagaccgggataagtatacctttgtgggccatagtaagatcatggccagtacctttaccggtacattccaattcttctacctagcctttgttttttgcaaaggaatgttttttggatgtgccttatgcacga

SEQ ID NO: 61 - DNA, 30661 bp, Homo sapiens
aatttagttatttttagtagagatgggttttctccatgttggtcaggctggtctccaactcctgacctcaggtgatccacccccctcggcctcccaaagtgttgggataacaggcgtgagccactgcgcctggccggctcatttcttttgatcacttactaatatttcattgtgtagatggaccacagtttatccattcaccctactgaaggacatcttggtaaattttagcaactgtgaataaaaccgctccagccgggcacgatggctcacggctgtaatcccaccacttagggaggccgaggtagatggatccccgaggtcaggagtaagagaccagcctggccaatatggtgaaaccctgtctctaataaacatacaaaaattagccgggtgtggtggcgggagcctgtaatgccagctactccagaggctgaggaggagaatggcttgaacccaggaagcggaggttgcagtgagccaagatcgagccactgcactccagtttggacgacagagctagactccatctaaaaaaaaatttcctaacccccattgtgatgataataggagatagggcctttgggaggtgattaggcagtaagagtggcatcttataaatgagattagtgtacttataaaagagacagtgtagagctctctccccgattttagtcacctgtgaaccaggaagcatgccctccccagacagtgaatttgctggagccttgatcttggacttcccagtcacccagaacacgtgttggtgaggatgtggagaaaagagaaagtttttacattgatgggaagctaagttggtgcagtcattatggaaagcagtatggagattcctcaaaaaattaaaaacagaactactgtataatccagcaattccaattctgggtatatacccaaaggaaatgaagccagccccttgtaaaaataactgcatcctggctgggtgtgttgggagtccaaggtgggtggatcatctgaggtcaggagttggagaccagcctggacatcatggtaaaaccctgtctctactaaaaatacaaaaaaattggctgggtgcggtggcttatgcctataatctcaacaatttgggaggctgaggtgagaggatcagctgaggtcaggagttcgagactagcctggccaacatggtgaaaactccatctctactaataatacaaaaataagccgggcgtggtggtgcacatctgtaatcccagctactccggaggctgagacaggagaattgcttgaacccaggaggcggaggtagcagtgagctgagttcaggccactgcactccagcctgggcaacagagtgaggctctgtctccaaaagaaaaaaatacaaaaaaattactcgagcgtggtggcgggcgcctgtaatcccagctactacggagactgaggcaggagaatcgcttgaacttgggaggtggaggttgcagtgagctgaaatcacaccattgcactccagcctgggcaacacaagcaaccctaactgcttctacatcccatatataagagagatcagccaggtgcagtggttcatgcctgtaatcccagcactttgggaggccaaggcaggaagatcacctgaagtcaggagtttgagatcagcctgacaaatgaagaaacctcatctctactaaaaaaaaaaaaatacaaaattagctgggcgtggtggtgggtgtctgtaatctcagctactcgggaggctgaggcggaagaatcacttgaacctgggaagcagaggttgcagtgagccgagctcgcgccattgcactccagcctgggcaacaagagcaaaactccgtctcaaaacaaacaaacaaatacaaacaaaaaacattatgttgtataccttaaatttaaacaataattaaaacaattttttaatttggaacaaatactagaaaaaatagtgatgtaagactgttccttatttttattttctttatctatttatttttgagacaaggtctcactctgttacccaggctgaagtgcagtggcctcatcttggctcactgcaacctccaactcccaggttcaagtgattctcctgcctcagcctcccaagtaactgggattacaggcgctcatcaacacgcccagctaatgttttggaattttagtagagacggggtttcaccatgttggccaggctggtttcgaactcctgacctcaagtgatttgctctcctaggcctcccaaagtgctgggattatagtcgtgagccacggttcccagctagttttaaagatttttagatggttaagggccaggcgccgtggctcacgcctgtaattccagcactttgggaggccaaagcaggcggatcacgaggtcaggagatcgagaccatcctggctaacatggtgaaaccgcgtctaccaaaaaacaaaaaattagccagggctggtggcacgcacctgtaatcccagctgctcgggaggctgagccaggagaatcccttgaacctgggaggcggaggttgcagtgagctgagatcacgccactgcattccagcctgggcaacagagtgagactctgtctcaaaataaataaataaataaataaaaatatttatacatggttaaagtatgtattgtgggtgtatatttttattcttgctaacattttaccagaaataaattaaaacatagttaattatctttcttaagtaaattgaatgtattaatatggaaattggatcaggaaaaaaaatcaattcccaataccttacagttcccagtaatactcggtatgaataaagacagattagagcacaggacatttgaggatttggtaatttacttgggaatttactcagaaccatgtattttaaacgtctctaagtccaggcatggtggctcacatctgtaatcacaacactttgggaggcccaggagggaggatcgcttgaagccaggagttccagaccatcctggaaaacctagcaatacctcatctctacagaaaaaaaaaagttgcactccagactgaatgacagagcaaggcctgtctcaaaaacaaaaaatgaaaaacaaaataaagaaaaccctcacatcaaccacgttggatagtaatatagctgttcaacagataatggaactaagaaaattagacaagttaaattaattcacccaagattcaagtagttggattaatggtaaatctggaatttaaacccaggtctgactaaccttatcactagaggctgccttttcagattccccaaaaccatatcatcctatttataatttgtaagcgctacagtagaagaatgggattaatctgagagaattttgcaggaggaaaatagaatacaaaaaattccatctactctgaccttagaattctcacttttcttagttataaaaaaaacaaagatcttaaggaaagacaataatgcttttaaaagcagtgggtatgaaacaaattatgtcttcagagggtaggcaataagtacagatagaggaaaagggaacaaataggagaccaaacgcgagaataggtgaggccgtgggtgaaatgggagttcttacgatacagtagagcaaccgtcatagccgagaggagccaaaggagacataatgagtaaatagaagatatcctggacgcgattctagaacataaaaagaacaagtttttaggccgggcacagtggctcacacctgtaatcccagcactttgggagggcaaggagggaggatcacttgagctcaggagttcaagaccagcctggccaacatggtgaaaccctagctctactaaaaatacaaaaaattagcctggcgtggtggctcgtgcctgtaatcccagctgctcgggagactgaggcaggagaatctcttgaatctgggaggtggaggtggcagtgagccgagatcgcaccattgcactccagcctagctacagagtgacctctcaaaaaaaaaaaaaaaaaaagcacacattaaaaaaacaagtttttaatctatggtctttttatgttccagaatcctaaacattaatcaatattaataacaggattccatcaagattaatattgattaatcaaaattaatcaatattgattacccaatattgattaattaattgtgacaaatgtaccatgcctaggtaaatgttaataatggcagaacttggccaggcatggtggctcgcacctgtaatcccagcatttgggaggccaaggtgggtggatcacaaggtcagtagatcaagaccatcctgggcaacatggtgaaaccccgtctctactaaaaatacaaaaattagctgggtgtggtggcacatgcctgtaatcccagctacttgggaggcctgagaattgcctgaacccgggaggtggaggttgcagtcagcagagatcacgccactgcactccggcctggcaacagagcgagactttgtctcaaaaaataataataataataatggcagaactaggccaggcgcggtggttcacacctgtaatccccatcactttgggtggccgaggtcggtggatcacttgaggtcaggggttcgagaccagcctggccaacatggtgaaaccccgtctctattaaaaatacaaaaatttagctgggcgtggtggcaggtgtctgtagtcccagcaactcaggaggctaaagcaggagaattgcttgaacctgggagatggaagttgcagtgagcccagatcacatcactgcactccagcctgggcgacaagagtgaaactctgtctttaaaaaaaaaaattatcaactgggtacagtgggtcatgcctgtaatcccaacactttcggaggccaaggtgggaggatcgcttgaacccaggagtttgaaaccagcctgggctgggcaacatagcaagaccccatctttacaaaacataaaaaaattagccagggcacgtgcctgtggtcccaccgcactccagcctgggcgacagagcaagattccatcttaaaaaaacaacaaaaaaagactcatcacttttgtgtagcaccagggtcagcaaactatctccaaagggccaagtagtcaacacataataatttgcaggccaggcacggtggctcacgcctgtgatcccaacattttggataacatagtgagacccattctctacaagtgtttttttgtttttgttttttaattagccaggggtggtggcacacacctgtagccctagggactagggaggctggggcaggagaattgcttcagaccaggagtttgagactgcagtgacttatgacagcatcactgcactcaagcctgggtgacagagcaaaaccctgtttcttttttttttttttttttttttttttgagacggagtcttcctctgtcgcccaggccggagtgcagtggcaccatcttggctcactgcatcatccgcctcccaggttcagagattctcatgcctcagcctctagagcaggtgggattataggtgtaggccaccatgcccagctaatttttgtatttttagtagagatagagtttcaccatgttggccaggctggtcttcaactcctgacctcaggtgatcctcctacctcagcctcccaaattgctgggattacaggcgggagacaccttgcctggccaaaaccctgtttccttaaaagaaaagaaaagaaaaaaaaaacaaaaaagacacagaaatttgaattttgtatacttttcacaagttataaaatattattttgatttttcccctaatcatttaaagatgtgaaaatcatccttagttggctgggcgtggtggctcacgcctgtaatcccaacactttgggaggccgaggcaggcggatcacctgaggtcgggagttcaagatcagcctgaccaacatggagaaaccccgtcgctactaaaaatacaaaattagccggggtggtggcgcatgcctgtaatcccagctactcgggaggctgaggcaggagaatcgcttgaacctgggagacggaggttgcagtgagccaagattgcgccactgcactccagcccaggcgacagatcgagactctgtctcaaaaaaaaaaaaagaaagaaagaaaaatgtggtacttaaattcagccttaaaagatgagcagaggccgggctccgtggctcatgggcccggcctttccttccttccttccttctctctccctctctttctttctttctttcttccttccttcctttcttttctttctttccttctttctttctttctctttcttctttctctctctctttcttctttctttctttcttttctttcctttctttctttctttcgatggagtctcgctctgtcacacaggctggagtgcagtggtgcgatctcagctcaccacaacctccgcctcccagtttcaagcgattctcctgccttagcctcccaagtagctgaactacaggtgccaccatgcccggctaattattgtatttttggtagagatggggtttcaccatgctgtccaggctggtttcaaactcctgacctctcgatcctcccgcctccgcctcccaaagtactgggattatatgcgtgagtcactgcgcctggccggtgatataattaatttttttcctagctgaatagcaatctctgctcactgcaacctctgcctcacgggtttcaagcaattctcctgcctcagcctcctgagtagctgggattacaggcaagcgccaccatgcctggctaatttttgtattttttttttttttagcagagacggggtttcaccatgttggtcaggctagactcgaactcctaacctcgtgatccacccacctcagcctcccaaagtgctgggattacaggcaggagccacagcacctggctgaactctttcttttacataattaaacttatttgctcctggtggcagggacctcttgccccctcttcctccaacccctttacaataactgaaatactctgatgtcctgcaatattcttactatttatttattttttgtaaaaagcttttaatactactcaactgcagtagtgagggggggggggaagtagagcaaggagtatgatctgtaactgatcctgaacaatcaattgggataactcactgcctagataattcactatttagatgctgtattattagggtcaacagctaactggagcaacagctaaagtcaagataagagaattgtcataggtgctggacttttctctcctcaacatcatcacttcaccttcctgaactccgcccacatgttcttcttcctccttctctaacacctactgagaaattgagaaggcgattctcttctggccaataatattatactatttcagagcaaggttctatatgctaaactttggaaggcattcttagatattcctcctccctgcgggctagacttactaggggttaaaaagaaatccctttttacattgggtcaaaggtcccctgagggtagggtgggaaggaggaagtcataaataccctggcaacaatagtgttggtcaaggtcaggaccatttttttttcctcctatttttcaggaaccaaaaaatggtcaggactatttttgacaattcggcttgatggtttagtcttctgaactctccagtagaccttagaacttggtatacatagtaattcagtccttgaatattaaaagcctttagttagagtaagatctgacaaattcaaagctgagccgtgagtcagaaatttttttctcagcaccataggaaaaaaatcataataaaaaaattaagagaagaaatgtgttgttttgttttgggttatttttttgagacggaatttcgctcttgttgcccaggctggagggcaatggcgtgatcttggctcaccgcaacctctgcctcctgggttcaagcgattctcctgcctcagcctcctgagtagctggaattacaaacacatgccaccatccttggctaatttttgtatttttagtagagacaggattttaccatgttggtcaggctggtctcgaactcctgacctcgtgatccgcccgcctcggcctcccaaagtgctgggattacaggcgtgagccactgcacctagctgcttgtgtttttataggtataacaggcaaaataagtgaagaatatgctgtataattccatctgtaatcttcaaactagcagtttccgtagctgtggtgttcatcttcccatcattggtaattggagagtaactctacctcccagaggaaggaggactgttgtaaattaaaggctcattgttcaagcctcattgaattgtcagtgtaggggacctgaggcaaagagcattgttgttttcaagagttattctgtatatcacattgatgtgcagttcaatatttaaatgtaaggaaatgactcctactctctatttgtttacaaaaccctagttctcatttatgcccattccttcatcaacaaataatgattttctactttttgcctggttctctctagaagagtagttcttaaacaatagcattcagaaaaatcacctggtttcaatggtaggctgtcatgaaaaaaaaaaaaaaatcacagggagaattttaaaacacagattcctggtcccaaccaccaaagattcctattcagtggtgaagcccatcaatcagcatctctaacaagcttccaagtggtgctgaggatgctggtgaatgatccattcatactcttctagggctgtagataataaattaaacaggcaaaaataaaaataggctggcgcggtggcttacacctgtaatcccagcactttgggaggccaaggtgggtggaccacctgaggtcaggagttctagaccagcctggccaacatggtgaaccccgtctctactaaaaatacaaaaaaattagctaggcatggtggtgtgtgcctgtaatcccagctactctggaggctgaggcagaagaatcgcttgaacccagaaggcggaggttgcggtgagccgagattgcgccattacactgtagcctgggcaacaagagggaaactccatctcaaaaaaaaaaaaaaaaaaattgccctcacagagcttatattctagtggtagtagggggataaatcagataggtagctagctagctagctagataaatagatagatagacagatagtatattacctgtgtcgcctggccaaagggtaggttcacatttggcatgtgtgtcaactcaagctgcacttgacctttcctaatcatctccaacactacctattgccctatccaaatcctatcacttgaattattcaaaaagtctcccatcttcattttggtgggatttggtcagctcctttactgcaacctgttttatcaggaaggtctttatgacctgtattttgtgctgacctcctatctcatcctatgacttagaacaccttaaccatctgggaatgcagcccagtaggtttcagcctcattttacccagctcctattgaagatggagtcgttctggttcacacagctctgatagtaatctgctcactaagtgttagttgccgtgttctctcccacaactccctcctgttgcacccctgcctttgagtcctgctaaacaacagtattggaacccatcattttctctcatgcctttacccaaactgttagttttctggtattcccttctctccacatttttccttctcagatcactgaggatcgtccaatcttccctgcccatccctcccctaccccaacctccattatttgtactctcttagcatccagtgcactttttttccttacttattacacaactttacacttacaattaacattataattgtctttttggtctatttgatctactctactaaatctttttttttttttttttgagacaaggtctcactgtgcctcctcggctggagtgcagtggcgtgatctcggctcgctgcaacctccgcctctggagttcaagtgattctcctgtctcagcctccctagtagatgggattacaggcgtgcaccaccacgcccagcccagttaatttttgtatttttagtacagacagggtttcaccatgttggtcaggctggtcttgaactcctgatctcagatgatgcacctggctcggcctcgcaaagtgctgggattacaggtgtgagccaccgtgcccagccgttagctcattttaacacatccttagtccagcctgttccaaaaaatctaaagtcagatagcttcctaaacctcaactttattccaattgctttccttggcgaagaatgtagtaagtcggccttccagccaccagccccttccctttggtctttcactccggaggctcttaccctagacacaatgggacagggagcgggggatgggggaattcagctcaggcttttatgcaaagacccccttctgcaaagaacaaagcttctggtacctgccctttggagagctgcgggcaagctcagcctcggtgagtcttggtggccttgacagcccccacttaacaaactgtgctgattaagagagacaggagggcaagtttttcccttcttttaaagaaatcatcctatttcctacgagacatagactatctgcctgaagcatgatgtactagccccactcaccggctccctgatgcccctatgcttaatcttctccggaatggtagtctgagaagaaaaaagattacgcccaatttcatttccttgtttcacatcaagcaatacttttcgagtctttgcattgtgaacaaaagtcagcttgtgtgggagcaaagccagctgctctgggtgcagacccaggagcagagtgcagaggagaatgagtcaaagagttttgtcttcaaaaattacataatcgggatttgctaagagtttacttttcggtatggaagactggaaaagagaaagaaatcttaggtttcttgaatgttgggtttgggaataggaaggaaaatcgaaaactgtagactttgtccataaatgttagtgctggaaccccactctaaaaactttgttcctttggaaaacacctcccttcccccagaaacacacacacccacacgagatgggcacggagtagtcttgaaagacatgacaaatcaccagacctgggaagaagctaaagagccagagggaaaaagccagaagtcgactacctgggaggagggatagacaagaaaccaaactaaaggaaactaaggtaggtgctgaaaacaagtaccattttcaacattaactgatgccttggcttcatgctataatgccatgttgtgtttcactataacctcagagtgaatgaaagaggaaaatggagctagttgaaatttctgcctaaactagccagattttgagacactaagttatctcaaatcaagaaatcaccctaatgagaatttcaataacctcaggaatttaaggtgcatgcatcccccaccccccccttttttttttgagacgtagtcccgctctgttgcccaggctggagtacagtggcgcgatatcggctcaccacaacctctgcctcccaggttcaagggattctcccgcctcagcttccagagtagctgggactacagacacccaccaccatgcgtggctaatttttgtatttttagtagagagggggtttcgccatgttggccaggctggtttcaaactcctgacttcaggtgatccgcctgccacggcctcccaatttactgggattacaggggtgggccaccgcgcccggcctttttcttaatttttaaaaatattaaagttttatcccattcctgttgaaccatattcctgatttaaaagttggaaacgtggtgaacctagaagtatttgttgctgggtttgtcttcaggttctgttgctcggttttctagttccccacctagtctgggttactctgcagctacttttgcattacaatggccttggtgagactggtagacgggattaactgagaattcacaagggtgggtcagtagggggtgtgcccgccaggaggggtgggtctaaggtgatagagccttcattataaatctagagactccaggattttaacgttctgctggactgagctggttgcctcatgttattatgcaggcaactcactttatcccaatttcttgatacttttccttctggaggtcctatttctctaacatcttccagaaaagtcttaaagctgccttaaccttttttccagtccacctcttaaattttttcctcctcttcctctatactaacatgagtgtggatccagcttgtccccaaagcttgccttgctttgaagcatccgactgtaaagaatcttcacctatgcctgtgatttgtgggcctgaagaaaactatccatccttgcaaatgtcttctgctgagatgcctcacacggagactggtaagaaagaaatttatccttgaaaggccaagttccttaagggaaaagagagaaggagagagggttaagggatcatttccctcttgagcaatgatggaccattactataaagaagtgttattatcaactaatcctctggaaacccctttttccattataacttggtggcacctgccctttgaactatgtcccaggtctcaggagtgtgcattgagttgaaggacacagaattcggcagttgaacagtgtgcagtaagtttgagaacctatgggcttaggcatggtggaaacaaaaatgtatcgttatagttaaatgaaggtgatgtgtacatcttcacatagtgctggacacatgtgaataaatagcagatttattgctaattagccagaagacctaacgtcatagctcagggatgagcatgattttgttttgccaaaaatggcatggcaaatcacgatgagatttctgtaatacataatttgggtaattctttctatgtcagtaacggctgtctcttctccattctctgggtttgtggatgttactgggcagctctgagtttgggagcacctcccatgtctaattctcctaagtcctgggaagcgttgacccaactttatggtaaagataattccagaaagtttaatctactgacagtcaaacagaatgtagctagaagtccagtttggcttcaaaacctgtgctagtactcatgcttctgactggtagctgcaaggggtgggggatactcgggatactcataaagccgctaccacttttttgaaaatcaatttttcagtagttttcaaaaacttgagaatgaaccaactttaccaagaatgccattggtaacactgaacgctgtaaaatagcttaaaaagcgcatttacattatgactacagttgtaaagagtaggttgtggaaaaggaataagtaaacatgattgctatatttgagcctcagatttgaatgtcaccctgcttttcctcttttttagaatcagggactcactttgtcacataggctggagtgcaatggtgtgatcatggatcaccgcagcctcaaccctgagatcaagtgatcctcttgcctcagcctcccaactactaggacaagaggcgtgtgtcactatgcccagctaattaaaaaattatttttgtagagacagggtctcactttgcagctcgggctggtcttgaactcctgacctcaagtgatcctccaccctcagcttcccaagtcgctgggattacaggcgctgacccactctgcatggctattcacccagtttttctaaactatgcattaatgttcttgcctttataatttctttctttctttctttctttttttttttttgagacagggtctcattctgttgcccacgcgggagtgcagtggcgtgatcttggctcactgcaacctccgcctcctaggttcaggtgatttctcctgtctcagtctctcgagtagcaggtattacagatgtatgccaccacgcctagctaatttttgtagttcttagtagagaaggggtttcggtgtgttggccaggctggtctcaaactcctgacctcaagtgattcacctgccttggctgggcaccgcgcctggccacctttataatttcaaatgttaaaaatacattgctgggtttgggaatgagcaagtggggatgtgttttctttagcacacatcaagtgacagtttatataggtagctaatatttaggattttccccaattctaatcattagttgaaaggcttcctctgcttttcagatctacttgcaagagagaagagattgttaatttttgctgttttagagcctgtccctttgttatgtgactgcaggggtagaattgagagttgaacactgggaaaaccgcagagcaattaggtatataagtgatgactaaatctagatattcatttctagttacaaaatcagtaaatgccaggccctatgctagagaatttcaattggttacctcattttaattaataaaaaaataattttagagatgaggtcagagctagtaaagggaaggcctggattgaaacagaagcttatccggattcacatatcctgctggtcctagcattgagaactgggcagtcagttgctggttttgttttttatttttttgagacagtctcactctgtcacccaggctggagtgcagtggcactctcggcttactgcaatcacggcctcctgggttcaagtgattctcctgcctcagtctccccagtagctgggattacaggcatgcgccaccactcctggctaatttttgtaatttttagtagagatggggtttcaccatgttggcacgctggttttgaactcttgacctcaagtgatctgcccaccttggcctcccaaagtgttgggattacaggcatgagccatcccacctagctgaggtgctggttttatagaatccccagaatcatggcatttaagcaatcatgtaggtgttgatgaagatcataaacaaagtgatttagggtgagatgcaatacgtgaaaattggtgaatctccattctgacctattaacacccagtgtgggagcttttgagcatcagtttaaagcaaaaggtggtagcgccggcctgatgaggtggctcacacctgtaatctcagtacttcgggaggccgaggcaggcggatcacgaggtcaggagttcgagaccagcctcaccaacattgagaaaccctgtctctactaaaaatacaaaattagccaggcgtgatggtgcctgcctgtaatcccagctactcaggaggctgaggcaggagaatcgcttgaacccaggagatggaggttgcagtgagccgagattgcaccatcgcacttcagcctgggcaacaagagtgaacctccatcctaattttaaaaaaaaggggtagcgccgctcagcaatgcattggccaccattatagatctctcccaacgcagtctattatgtacaaaatggagatactgataagacttcttggagtaatactatataaagcttgccaaagtgccagggctgcttaagaaattgcttcttattacttagatctggggttctgggaattatcaaagtactttgaaaacaatttttttaaaggatattttaatatttgaaaaattttagacaaaagtgtccttttatttgttcccaacagtctctcctcttccttcctccatggatctgcttattcaggacagccctgattcttccaccagtcccaaaggcaaacaacccacttctgcagagaagagtgtcgcaaaaaaggaagacaaggtcccggtcaagaaacagaagaccagaactgtgttctcttccacccagctgtgtgtactcaatgatagatttcagagacagaaatacctcagcctccagcagatgcaagaactctccaacatcctgaacctcagctacaaacaggtaggcttgttttgtccttggaataaggtgaacaaaaattggactaatttgcatggctaagacctctgtggatgcatgtagatgtgtgtactatgtgtccgtacatcgcctcttgcaaataatttatgaagatgaaatgcttttgtaacttccttcacctctttctttccttaaatattctattatgtgaataattatgtcataatttaaccactttcttgcacagaccaatattgtgaaaatctttccaacgtttccttaataaaaaagaagtatctaactccacttaccagggtaggagaaaccctaactcacactggttctcattaaaataaaaactttttttttcctttttttctttctgccagcaactccagcttgttttgttttttatctgtgtgcattcaataaggccaatcattgtttattacttgttggccattttccttcattaattggcttatcctcttctaggctttatttccttcttttcttttgtttatttttgagacggagtctcactctgtctcccaggctggagtgcagtggcctcataatgagacatcataatgacattagcattacttggtttaagtacaaatggatgaaacctccacctcctgggttcaagggattctcctgcctcagcctcccaagtagctgggattacaggcgcccgccactacacctggctaattttactgtattttttagtagagatggggcttcaccatgttggccaggctggttttcaactcctgacctcaagtgatccacgtgcctctgcctcctaaagtgctaggattacaggtgtgaactaccacacccggcccttgcctttattttctatccaaaatgttcatttctctctttttttctgagacagtctggttctgttgtcacgcagctggagtgcagtgatgcaatcttggctcactgcagccttcacttcccaggtgcaagcgatcctcccgtctcagcctcctgagaagctgggaccacagacgtgcagcattacacccggctaattttttgtatttttgtagacacggtgtttcctcatgttggctagcctgtagcgaactcctgggctcaagcaatctgcccgccttggccttccaaagtgttgggattacaggcatgagatatggcacctggccaggaataaaagttagcaatatactttgattcaaagtacctctgtattatgaatattttacaatttctatcattttttcctgcaggtgaagacctggttccagaaccagagaatgaaatctaagaggtggcagaaaaacaactggccgaagaatagcaatggtgtgacgcaggtaacaggaaacttcattctgttctttcctttcagtgatctttcaatcttgtccatccctgaaacacacaactccagtcacagacagttctggttgtccttgtaccctttctgttaatccctccttctctttcagaaggcctcagcacctacctaccccagcctttactcttcctaccaccagggatgcctggtgaacccgactgggaaccttccaatgtggagcaaccagacctggaacaattcaacctggagcaaccagacccagaacatccagtcctggagcaaccactcctggaacactcagacctggtgcacccaatcctggaacaatcaggcctggaacagtcccttctataactgtggagaggaatctctgcagtcctgcatgcagttccagccaaattctcctgccagtgacttggaggctgccttggaagctgctggggaaggccttaatgtaatacagcagaccactaggtattttagtactccacaaaccatggatttattcctaaactactccatgaacatgcaacctgaagacgtgtgaagatgagtgaaactgatattactcaatttcagtctggacactggctgaatccttcctctcccctcctcccatccctcataggatttttcttgtttggaaaccacgtgttctggtttccatgatgcccatccagtcaatctcatggagggtggagtatggttggagcctaatcagcgaggtttctttttttttttttttcctattggatcttcctggagaaaatactttttttttttttttttttgaaacggagtcttgctctgtcgcccaggctggagtgcagtggcgcggtcttggctcactgcaagctccgtctcccgggttcacgccattctcctgcctcagcctcccgagcagctgggactacaggcgcccgccacctcgcccggctaatattttgtatttttagtagagacggggtttcactgtgttagccaggatggtctcgatctcctgaccttgtgatccacccgcctcggcctccctaacagctgggatttacaggcgtgagccaccgcgccctgcctagaaaagacattttaataaccttggctgccgtctctggctatagataagtagatctaatactagtttggatatctttagggtttagaatctaacctcaagaataagaaatacaagtacaaattggtgatgaagatgtattcgtattgtttgggattgggaggctttgcttattttttaaaaactattgaggtaaagggttaagctgtaacatacttaattgatttcttaccgtttttggctctgttttgctatatcccctaatttgttggttgtgctaatctttgtagaaagaggtctcgtatttgctgcatcgtaatgacatgagtactgctttagttggtttaagttcaaatgaatgaaacaactatttttcctttagttgattttaccctgatttcaccgagtgtttcaatgagtaaatatacagcttaaacataaatctttgttaaatttttggttggggtggagaaggaaattagctgaggacactgctatcttagaaatgcatagaaatagctgagcgtggtggcctatgcctgtagtcccagctatttgggaggctgaggcaggagaatcgcttgaacctggtaggtggaggttgtagtgagccaatatcacaccactgcactccagcttgggcgacaagagcaaaactcccatctcaaaaataaataaataaataagtaaataaatgaataataaataaatatgccagttttagaatgaatgaataataaatatgccagttttagaaaaaagggcacttacgtgcattgtacatgtgcatctacaaatgtaatgggttatttccgtgtatgaatctgtaattgatgctaacatttaaagtttcatcagaggcctatatgtaagtaaattctaaggctagttgaaacagatttatgttctcaccttaagagcagctacgcaggcatctgtgaattatactaataatcctttactgtccttttcccatcttgtgcctgccctaaatgtatctgatctgagagcacgtcccttcactctgaagcagcatgatgcaggttatcagagtggttttttccagtcttttctctcattatttccccaattgtccaatgttactaagactatccagtctaattccaagtgttttttttttgttttattttgtttttttttaagactggagtcttactctgttgcccaggctggagtgtagtggagcgatctcggctcaccgcaacctccgcctcccgagttcaagtgattctcctgcctcagcctcccaagtagctgggactacaggggtgagccaccatgcccagctaattgtatttttagtagagacagggtttcactatgttggccaggctggtcttgaactcctgacctcatgatccaccagccttggcctcccaaagtgttgggattacaggcgtgagccactgcgcctggcctatcgtttgtttttttagacagtctctctctattgcccaggctggagtgcagtggcacaatcttggctcactgcaacctccgcctcctgggttcgagcaattctcctgcgtcagcctcctaagtagctgggattacaggcacccaacattacacccggctaatttttggtatttttagtagagatggggtttcaccatgttggccagcctggtctcgaactcctgacctcaggtgatccacctgactcggcctcccaaagtggtgggattataggtgtgagccaccgtgtctgggcaatttttttttttttttttgagatggaacttcacttttgttactcaggctggagcacaatgatgcaatctctactcactgcaacctgcacctcccaggttcaagtgattctcttgcctcagcctttcgagtggctggtattacagggatttgccactatgcccagctaattctttgtatttagtagagatggggtttcaccgtattgaccaggctggtctcgaactcctgacctcaggtaatccaccctcctcggtctcccaaagtgctaggattacaggcatgagccacagtgcccagccttcttttttatttttttaagacgggcttattctgctgctcagactggggcttagtggcaccatttcacctcactgtagcctcgacttcccggattcaagcaatcctcctgcctgagtctctcaaatagcccagactataggtgcacaccaccatgccagctaacttttgtgtttttaggagagacggggtttccccatgttggcctggctagtctcaaactcctgagctcaagcagtctaccagccttggcctcccgaagtgctgagattacaggcatgagtcaccagcctagccctgtattatgttttctgaacttttttttttttaatcacccagtattaatcttcaacctcttggcaggtaagaatttagagatctatttggaataatctttaaagtaacaataataactacagtcaaaagcagtaagattagtgggccaggtgccgtggctcacacctgtaatcccagcacttcgggagaccaaggcaggtggatcacctgaggtcaggagttcaagtttagcatggccaatatggcgaaaccctgtctctactaaaaatacagaaatttgccagaggtcttggtttgcgcctgtaatctcagctacttggaaggcggaggcaggataatcacttgaacccgggaggttgcagtgaccccagataatgccaccccactccagcctgggcgacagagcgtcactgtctcaaaaataaacaaaaataataggagattaggcaaaaaggatagtacaaggctctctgtttaacatttcttcctttctctagaaaattttcctttcttttcccaaaaggaggtgtgtgttacttccaatgctatattttagtagctttaccatattttagtttttaaaattcattattttgatttctcagctttcattttcatttcagtttgtacctgaaggagagaagcatggattgaatttgcctgggttttccgaatttcataatataaatttaaaactcagaagtgggaggaatacaggccttgattagtgaatttcaagctcagttctcggggtgaaggacaaggttaattctactctgagtaattctaccgttcagaaaacctggtgtgtctacaggaaaaaatacaggctgtgactacaaacctaaaagtaaaggcaaacaactgccagacagaggcaggaaagtgggggagagcccttggtaaatattgcatgcctcctggggcccccatgggctttgactcaagggggagatgaagggaatttgttaaagaaagaagtcactgggacagacaaaagcttccggcacaggaagttagttcgactaaggataccgaaatgtaggaatttgaatgggttcctgggtgtgaggttgaagtgaaacttgattgaaaagaagctgctggtggtgagtctctccttaagctattcctggcttctgggtagttggtgtaaactctgtggtccttgaataaagtgtgcttgagaattttagaaggttaagcatctgagaaattacttcaatgcagtggtagcactacctctgatgatactaccaagcaaactattaagaaacagaaaagctcacagatcaaattaagatgctagaatcgtattaaatcaattaaatacatggaacaaaacaggcaaaaagatgggatacattaatccatttaggataaggtgcatgtggagtagaaagggtagcagtgtttacatgtcctctgataacactggcgtagtcacaagagctaaggacaagaaccaagggtgagaatttgagattcaattagggccagggatctgcagaacagatgtacctggaacatgggtgtcaatgtgctcttatcagagagacaaaggggcagttattcctggccacgaaagtagttcttggctcattgagcagctatgaaatctatttgcaggccaggcatggtgtctcaagcttataatcttaacactttgggaggccaaggtgggtggatcacctgaggacaggagttcaagaccagcctggccaacgtggcgaaaccccgtctcctaaataaaaagtagccgggcatgatggcaggggcctataatcccggctactcaggaggctgaggcagaattgcttgaacctgggaggcggaggttgcagtaagccgagatcgcaccattgcactccagcctgtgagacagagcaagaccccgtctccaaaaaaaaaaaccaaaaaaacaaaaaaactgaaattaaaatgagttccgtttggaggtaaatacctttaagagtactttagatttacatagcactgggctgggcacggtggctcacgcctgtaatcccagcactttgggaggctgaggctggtggatcacaagctcaggggtttgagatcagcctgaccaacatgataaaaccttgtctccactaaaaatataaaaattagctgggcatggtggcacatgcctgtaatcttaactactcagaagtctgaggcaggagaatcacttgaacccgtaggtggaggttgcagtgagccgagagcgccactgcactcccgcctgggcaacagagcgagactccatctcaaaaaaaaaaaaagatttacacagcactcaacaacataggaaaatatttataaactgtattacacttgaaccttaagctatactctgaggttaactaccatttgtgggttaagaagctaaagctctgtttttctttaagacaagtgcagtagtgagaagtggggaagagtagaacaaggagttcgatctgtaattcactgtgaacaaacaattgaggtaactgactaccttcagacgaggctggaagtttttatttatttagtgaccgacttttggtcttgtttcccaggttggagtgcaatggcacgatcttggctcactgcaacctccaccttccgggttcaagtgattctcttccctcagcctcctgagtagctggaactacaggcacccaccagcatgcccggctaatttttatatttttagtagagacggtgtttcaccatggtggccaggctggtctggaactcctcctgaccacaggtgatccacgtgcctcggcctctgaaagtgttggagttacaggcatgagccaccccacccagccacattatatgtttaaattttgatttaaatttaaaatttgaattttaacttttaaactaaaatttaaattaaaaattaaattttaaatttaaattaaaaaaattaaaaaccctgttacccagactggagtgcagtggtgcattcatggctcactgcagcctcaatctcctaggctcaaatgatccttccgcctcaacctcctcagtagctggggctataggtgcacactgccacactcagccaatttttaaaatcttttttgtagagacagggctcttgctatgttgcccaggctagtcttgaattcctgggctcaagtgaccctctcgcctgggcctctcaaagtgctgagattacaagcatgagccactgcatctggcctcggtaataatttttatagaagaaaaaagctaaaagcttaagcaacatgccaaaggtggtactggttgtatgtggtaaaatctggattcaagcccttaattgcttgactccaaagccccagatgttgctctctgttgcattatgttatatagctttgcaataaccccagaaagttacatagtttgatgtggaatgaactcccctcttccttcgagtctgatgtcttatcagacaccatatgtgagaacttgggagtgaactcaagcttccctcaagaatgttaacatcaaattcgatcagatccaaccccaaaggtgggtgttttgacctcaactactgaacttcaaaaatacatataaactcaagagtttgacagacactttgagagcttaggcagtagcagggttaaactttgttgatcgtttctcagaaaatcaagagtgcatgctataggcggggtgtggcagctcgcacctgtaatcccaacactttgggaagctgagacaggtggattgcttgagcccaggagtttgagaccagcctgggcagcatagtgagaccccagctctagaaaaaatacaaaaaaaaaaaaaagtagccagttatgctcgtgcacacctgtagttctagctactttggaggctgaggcagggtgatcccttgagcccatgattttgagactgcagtgagcctgtgtgacagatgaagactcttgtttgtttgttttttgttcttttgtttttgttttcttaatgagtgtgctctctaatatgctgcactctgcactcaagccctcttctagcttctgagagctcaggctacaataggaagatactctgttagccttgaagctaatctttatttttctttattttattttattttttgagacagagtctcgctgtgtcacccaggctggagtgcagtggcgcaatctcggctcactgcaacctctgcctcccaggttcaagcaattctgcctcagactcccaagtagctgggactacaggcacacgccaccatgcctggctaatttttgtattttcagtagaggcagggtttcaccgtgttggtcaggctggtctccaactcctgatttcgtgatctgcctgcctcagcctcccaaagtgctgggattgcaggaatgagccaccatgcccagcttttttttttttttttttgagatggactctttttctgtctctcaggctggagtgtagtggctcactgcaacctctgcctcctgggttcaagcaattctacctcagcctcccgagtagctgggattacaggtatgtgccaccacacccagctaatttttgtatttttagtagagatggggtctcaaaaaaaaaaagggagaaaggatggtagcataagacggtatactagagaaacactaaaataggataggcaaaatatgagcctttaaaagctttaaggagtaacatacttagatttgcattttagattgttctccctgtactacgggaaggtattggaagggagcaagaccagagattagtctattttaatgattatgcctatttataagggcctagattaggattcattgggaaacagtgtgttacatatgacagaagtaaggagatgatcaaagaatgatttcatagccggatgtggtggctcatgtctgtaatcctagaactttgggaggtcaaggtgggtggatcacttgaggtcagggagtccaggaccaacctggcctatgtggtgaaaccccttctctactaaaaacacaaaaaaattagctgggcatggtggcgggcgcctgtaatcccagctggcttcaagcaatccacctgccttggcctcccaaagttttgagattacagacataagccactgttcctggctcaagtataccaccctaatcaaaattatttttggagtttttttttccttcttcaacagttatgttagagattatggatttttttgtttgcttttgtttgtttgtttgttttgcgacggagtctggctctgttgcccaggctggagtgcagtggcgtgatctctgctcactgcaacctccaccttccaggttcaagtgattctcctgcctcagcctcctgagtagctggaattataggcatgcaccaccacacctggctaattttttgtatttttagtagagacggggtttcaccatgttagccaggatggtctcaatctcctgacctcgtgatctgcccgcctcggcctcccaaagtgctgggattacaggcgtgagccactggcccggcttttttttctttttagatggagtctcgctcctgtctggaaggctggagtgcagtggtgtaatctcggctcactgcaacctctgtctcccaggttcaagtgattctcctgccttagcctcccaagtagctgggattacaggtgcccgccaccacgcccagctaattttgtttttgttgttgtttttgtgcaattggttgtcagcccattttacacattcttctagaattggccatttctccaagaagcattagttacttttagcaaggaataatatttagagatcagaactgatcgctggtattgctataattaagggtagttgcagatattgactttatgtgcagacaattgaaaatccagaaaaatctcagaagtctttctgtgacttctcctcacatattatccaaaattgacataagcccatgattaaactaacaatttggcaaagcgaatgagatcattacaatttgcctcccaccgctgggtatagtggcatacatctgttatcccagtattttgggggccgaggctgaaggaacacttgaggccaggagtttgacaccagcctggtcaacatagtaaaactccatgtctacagaaaaatttaaaaacttagccaggtgtgatggtgcgtgcctttggtcctagccagtcaggaggctgaagctagaggattgcctgagctcaggagtttgaggctgcaatgagctatgaccgcaccactgcactccagcctgggtgacagagggagaccctgtctctaaaaaaatagtaataaaataaaataaaaagatttacctcctaactaaaagacatggccttcagaagaagttaagataattgtatgtgaatggaaaacgaatagtttctgctacagcaaccagtgtatatctgctctagtacagctacaactaaatcaattttacaaggtagagagtccaggaagactaccaaatatatatagaaactgcatatttgattaagaattctagtttagatcactatattattagttagaaaaacaggccgggagcagtggctcacgcctgtaatcccagcactttgggaggctaagctgggcagatcgcgaggtcaggagttcaagaccagcctggccaacatggcgaaaccctgtctctattaaaaatacaaaaagtagccgggcgtggtggtgggcacctgtaatcccagctacttgggaggctgaggcaggagaatcgcttcaatccaggaggtggaggttgtagtgagcagaaaccaagccactacactcactccagcctagatgacaagagcaaggttctgtctcaaaaaaaaaaaaaaaaaaaaagaaaaacaaggcacaaaaccatatgaatgatttattctatttgaattaaaaaatataagtcacatagatacaaacattttctgggaggataaaaacatacgcccaaaatttacatttcagatgaatagataaataataaattatttaggaaataaaagtaacaattctcagtttgggggaaagttgatagagtcctgcttcattctaggttacatgaaagctgggtgccatggctcacacctgtagtcccagcaatttgagaggctgaggtgggaagatcacttgagcccgggagttctagacaaggctgggcaacatagcaaattcccatctctacaaaaaataaaacaaattagctggacacagtggtgcttgcctgtagtcccagctgcttgggaagctgaggagggagaatcaattgagcctgatggttgaggctgcagcgagctgtgattgtgccactgcactccagcctgagcgacagagaaagacgctgtctcaaaaaacaaacaatcaaaaaacaataggccgtgagaggttgctcacacctgtagtcccagcattttgggaggcctaggcgggtggatcacttgaggccagaagttcaagaccagcctggccaacatggcaaaatccaatctctacaaaaaaatacaaacattagccgggcgtggtggtgcatgcctgtggtctcagctattcgggaagctgagtcagaagaatcacttgattgaacccaggaggcagaggctgcaatcagcctagatcatgccactgcattccagccagggagataggtgtgaaactctgtttcaaaaaaaagaaaaaagaaaagaaaatacacacattaaaatctcagctccaccattatgaccttgggcaaattattttgcaggcttttaggtcttcccttttgtgtaaatagaaataatacttgaagtgatttctgtcatctaatatgtattttgtctagctcatagaacatatacaattaatgtcagttacctgcatggcaatgtaaaatgtgatcatcctttgatacaccccctaggactgtatgccaaggcattaatcaaacaaccacataaagatactcattacagcactgttggtaatagctaaacaattttttatttttatttttatttatttattatttttgaggcgaagtctcaatctgtcaccaggctggagtgcagtggcacgatctcggctcactgcaacctccacctcccgggctcaagcaattctgcctcagcttcgtgagtagctgggactacagttgcgcaccaccaaagccagctaatttttgtatttttagtagagacggggtttcactgtgttggccaggatggtctcgatctcttgacctggtgatttgcccacctcggcctcccaaagtgctggaattataggtgtgagccactgcgcccggccaaaaatatttttttaaatctaaatgtatatcaataggactttccttaaatgtgttatgatatattggagtacttatgtagccataaaaaacaaaaaagatggccaagtgcagtggttcatgcctgtcatcccagcactttgggagtctgagtctggtggatcacaaagtcaggagtttgagaccagcctgaccaacatggcaaaaccccgtctctactaaaaatacaaaaataagctcggcatgctggccgagtgcctgtatctcagctacttggcaggctgaggcaggaaaattgcttgaacccgggagacggaggttgcagtgagctgagattgagccactgcactccagtctgggcaacagagtgagaccctgtctcaaaacaaaacaaaacaaaaacaaaaaggatgaagcagatttaaatgtatgggaaaattccattattaaggtaaaagagcagattcgtttataggttgtgatcccattcatgtcatatatggagataaattaagtgtggaaagatagatacagatatagaaataaaagtaatagttatctctaggaaataaaattaggaggcattttttgcttttcctctatttttagaacatatctgacaaaaataatagataaatctatttggaaagcataagagtagcctctatggaactaaataattgctagtaaaagtaacatttccgtgaacatttttgaaatatgaaaataactcaagtacttgtactgatacctttaggacatgctagaatactggaactcttgcttttgaaacacagattagactgtccctctttgggcaaagccattaagtcaatgttaagctcactgagagagtcacacccccctctagtggtctaccgtggcactgggctcaccaatctcccaactgttttacaatgatagggaactttccttaaccatcacatgttcagggacaagggaatggatgcccagacatattcttcaattacatgtggttcaagatagaaatcaattgagaatgatggatcagatatactcagatgtacttgatgaagtagaagttcctctaaatggaataaactggaggccctagggaaaaaaaaatggattgaaaaccttagcagaataagtgacactgcttttacaagtgattcatagtggttataaactaagccagcaggcagacatggaaatgttcttggaagagtgtgtttagatattgtaatgaagatacaaatttgctgaggacattggaaaaaagaaatctgttgctgtggagtttaactaaaagtgtatcagtctctttcatctttttttttttttttttgagacagagtcttgctcagtcgctgaggctggagtgcaatggtgtgatcttggctcactgcaacctccgtctcccgggttcaagcgattctcctgcctcagcctcctgagtagctgggaagtagctgggattataggcgccgccaccatgcccagctaatttttaatttttgtattttttagtagagacggggtttcaccatgttggccaggatggtctcaatctcctgacctcgtgatccgcccacctcgccctcccagagtgctgggattacaggcgtgagccactgtgcccggcctctctttctcttttgtcacctatttagctttagaaaattgggtagcaagcccgcaggtgtgtatgaacagggccacggttgaacaaagactaacagaaggcaagctgaacagagtgtcggagtcataggattggcttcagcttccctcacagtttataagagatccttgtggagattcatggtcaagatcatgcgttagctgaggaaaattcagagtttattagaatcagaacatctagcacagc

SEQ ID NO: 62 - DNA, 30661 bp, Homo sapiens
gctgtgctagatgttctgattctaataaactctgaattttcctcagctaacgcatgatcttgaccatgaatctccacaaggatctcttataaactgtgagggaagctgaagccaatcctatgactccgacactctgttcagcttgccttctgttagtctttgttcaaccgtggccctgttcatacacacctgcgggcttgctacccaattttctaaagctaaataggtgacaaaagagaaagagaggccgggcacagtggctcacgcctgtaatcccagcactctgggagggcgaggtgggcggatcacgaggtcaggagattgagaccatcctggccaacatggtgaaaccccgtctctactaaaaaatacaaaaattaaaaattagctgggcatggtggcggcgcctataatcccagctacttcccagctactcaggaggctgaggcaggagaatcgcttgaacccgggagacggaggttgcagtgagccaagatcacaccattgcactccagcctcagcgactgagcaagactctgtctcaaaaaaaaaaaaaaaaagatgaaagagactgatacacttttagttaaactccacagcaacagatttcttttttccaatgtcctcagcaaatttgtatcttcattacaatatctaaacacactcttccaagaacatttccatgtctgcctgctggcttagtttataaccactatgaatcacttgtaaaagcagtgtcacttattctgctaaggttttcaatccatttttttttccctagggcctccagtttattccatttagaggaacttctacttcatcaagtacatctgagtatatctgatccatcattctcaattgatttctatcttgaaccacatgtaattgaagaatatgtctgggcatccattcccttgtccctgaacatgtgatggttaaggaaagttccctatcattgtaaaacagttgggagattggtgagcccagtgccacggtagaccactagaggggggtgtgactctctcagtgagcttaacattgacttaatggctttgcccaaagagggacagtctaatctgtgtttcaaaagcaagagttccagtattctagcatgtcctaaaggtatcagtacaagtacttgagttattttcatatttcaaaaatgttcacggaaatgttacttttactagcaattatttagttccatagaggctactcttatgctttccaaatagatttatctattatttttgtcagatatgttctaaaaatagaggaaaagcaaaaaatgcctcctaattttatttcctagagataactattacttttatttctatatctgtatctatctttccacacttaatttatctccatatatgacatgaatgggatcacaacctataaacgaatctgctcttttaccttaataatggaattttcccatacatttaaatctgcttcatcctttttgtttttgttttgttttgttttgagacagggtctcactctgttgcccagactggagtgcagtggctcaatctcagctcactgcaacctccgtctcccgggttcaagcaattttcctgcctcagcctgccaagtagctgagatacaggcactcggccagcatgccgagcttatttttgtatttttagtagagacggggttttgccatgttggtcaggctggtctcaaactcctgactttgtgatccaccagactcagactcccaaagtgctgggatgacaggcatgaaccactgcacttggccatcttttttgttttttatggctacataagtactccaatatatcataacacatttaaggaaagtcctattgatatacatttagatttaaaaaaatatttttggccgggcgcagtggctcacacctataattccagcactttgggaggccgaggtgggcaaatcaccaggtcaagagatcgagaccatcctggccaacacagtgaaaccccgtctctactaaaaatacaaaaattagctggctttggtggtgcgcaactgtagtcccagctactcacgaagctgaggcagaattgcttgagcccgggaggtggaggttgcagtgagccgagatcgtgccactgcactccagcctggtgacagattgagacttcgcctcaaaaataataaataaataaaaataaaaataaaaaattgtttagctattaccaacagtgctgtaatgagtatctttatgtggttgtttgattaatgccttggcatacagtcctagggggtgtatcaaaggatgatcacattttacattgccatgcaggtaactgacattaattgtatatgttctatgagctagacaaaatacatattagatgacagaaatcacttcaagtattatttctatttacacaaaagggaagacctaaaagcctgcaaaataatttgcccaaggtcataatggtggagctgagattttaatgtgtgtattttcttttcttttttcttttttttgaaacagagtttcacacctatctccctggctggaatgcagtggcatgatctaggctgattgcagcctctgcctcctgggttcaatcaagtgattcttctgactcagcttcccgaatagctgagaccacaggcatgcaccaccacgcccggctaatgtttgtatttttttgtagagattggattttgccatgttggccaggctggtcttgaacttctggcctcaagtgatccacccgcctaggcctcccaaaatgctgggactacaggtgtgagcaacctctcacggcctattgttttttgattgtttgttttttgagacagcgtctttctctgtcgctcaggctggagtgcagtggcacaatcacagctcgctgcagcctcaaccatcaggctcaattgattctccctcctcagcttcccaagcagctgggactacaggcaagcaccactgtgtccagctaatttgttttattttttgtagagatgggaatttgctatgttgcccagccttgtctagaactcccgggctcaagtgatcttcccacctcagcctctcaaattgctgggactacaggtgtgagccatggcacccagctttcatgtaacctagaatgaagcaggactctatcaactttcccccaaactgagaattgttacttttatttcctaaataatttattatttatctattcatctgaaatgtaaattttgggcgtatgtttttatcctcccagaaaatgtttgtatctatgtgacttatattttttaattcaaatagaataaatcattcatatggttttgtgccttgtttttctttttttttttttttttttttgagacagaaccttgctcttgtcatctaggctggagtgagtgtagtggcttggtttctgctcactacaacctccacctcctggattgaagcgattctcctgcctcagcctcccaagtagctgggattacaggtgcccaccaccacgcccggctactttttgtatttttaatagagacagggtttcgccatgttggccaggctggtcttgaactcctgacctcgcgatctgcccagcttagcctcccaaagtgctgggattacaggcgtgagccactgctcccggcctgtttttctaactaataatatagtgatctaaactagaattcttaatcaaatatgcagtttctatatatatttggtagtcttcctggactctctaccttgtaaaattgatttagttgtagctgtactagagcagatatacactggttgctgtagcagaaactattcgttttccattcacatacaattatcttaacttcttctgaaggccatgtcttttagttaggaggtaaatctttttattttattttattactatttttttagagacagggtctccctctgtcacccaggctggagtgcagtggtgcggtcatagctcattgcagcctcaaactcctgagctcaggcaatcctctagcttcagcctcctgactggctaggaccaaaggcacgcaccatcacacctggctaagtttttaaatttttctgtagacatggagttttactatgttgaccaggctggtgtcaaactcctggcctcaagtgttccttcagcctcggcccccaaaatactgggataacagatgtatgccactatacccagcggtgggaggcaaattgtaatgatctcattcgctttgccaaattgttagtttaatcatgggcttatgtcaattttggataatatgtgaggagaagtcacagaaagacttctgagatttttctggattttcaattgtctgcacataaagtcaatatctgcaactacccttaattatagcaataccagcgatcagttctgatctctaaatattattccttgctaaaagtaactaatgcttcttggagaaatggccaattctagaagaatgtgtaaaatgggctgacaaccaattgcacaaaaacaacaacaaaaacaaaattagctgggcgtggtggcgggcacctgtaatcccagctacttgggaggctaaggcaggagaatcacttgaacctgggagacagaggttgcagtgagccgagattacaccactgcactccagccttccagacaggagcgagactccatctaaaaagaaaaaaaagccgggccagtggctcacgcctgtaatcccagcactttgggaggccgaggcgggcagatcacgaggtcaggagattgagaccatcctggctaacatggtgaaaccccgtctctactaaaaatacaaaaaattagccaggtgtggtggtgcatgcctataattccagctactcaggaggctgaggcaggagaatcacttgaacctggaaggtggaggttgcagtgagcagagatcacgccactgcactccagcctgggcaacagagccagactccgtcgcaaaacaaacaaacaaacaaaagcaaacaaaaaaatccataatctctaacataactgttgaagaaggaaaaaaaaactccaaaaataattttgattagggtggtatacttgagccaggaacagtggcttatgtctgtaatctcaaaactttgggaggccaaggcaggtggattgcttgaagccagctgggattacaggcgcccgccaccatgcccagctaatttttttgtgtttttagtagagaaggggtttcaccacataggccaggttggtcctggactccctgacctcaagtgatccacccaccttgacctcccaaagttctaggattacagacatgagccaccacatccggctatgaaatcattctttgatcatctccttacttctgtcatatgtaacacactgtttcccaatgaatcctaatctaggcccttataaataggcataatcattaaaatagactaatctctggtcttgctcccttccaataccttcccgtagtacagggagaacaatctaaaatgcaaatctaagtatgttactccttaaagcttttaaaggctcatattttgcctatcctattttagtgtttctctagtataccgtcttatgctaccatcctttctccctttttttttttgagaccccatctctactaaaaatacaaaaattagctgggtgtggtggcacatacctgtaatcccagctactcgggaggctgaggtagaattgcttgaacccaggaggcagaggttgcagtgagccactacactccagcctgagagacagaaaaagagtccatctcaaaaaaaaaaaaaaaaaagctgggcatggtggctcattcctgcaatcccagcactttgggaggctgaggcaggcagatcacgaaatcaggagttggagaccagcctgaccaacacggtgaaaccctgcctctactgaaaatacaaaaattagccaggcatggtggcgtgtgcctgtagtcccagctacttgggagtctgaggcagaattgcttgaacctgggaggcagaggttgcagtgagccgagattgcgccactgcactccagcctgggtgacacagcgagactctgtctcaaaaaataaaataaaataaagaaaaataaagattagcttcaaggctaacagagtatcttcctattgtagcctgagctctcagaagctagaagagggcttgagtgcagagtgcagcatattagagagcacactcattaagaaaacaaaaacaaaagaacaaaaaacaaacaaacaagagtcttcatctgtcacacaggctcactgcagtctcaaaatcatgggctcaagggatcaccctgcctcagcctccaaagtagctagaactacaggtgtgcacgagcataactggctacttttttttttttttgtattttttctagagctggggtctcactatgctgcccaggctggtctcaaactcctgggctcaagcaatccacctgtctcagcttcccaaagtgttgggattacaggtgcgagctgccacaccccgcctatagcatgcactcttgattttctgagaaacgatcaacaaagtttaaccctgctactgcctaagctctcaaagtgtctgtcaaactcttgagtttatatgtatttttgaagttcagtagttgaggtcaaaacacccacctttggggttggatctgatcgaatttgatgttaacattcttgagggaagcttgagttcactcccaagttctcacatatggtgtctgataagacatcagactcgaaggaagaggggagttcattccacatcaaactatgtaactttctggggttattgcaaagctatataacataatgcaacagagagcaacatctggggctttggagtcaagcaattaagggcttgaatccagattttaccacatacaaccagtaccacctttggcatgttgcttaagcttttagcttttttcttctataaaaattattaccgaggccagatgcagtggctcatgcttgtaatctcagcactttgagaggcccaggcgagagggtcacttgagcccaggaattcaagactagcctgggcaacatagcaagagccctgtctctacaaaaaagattttaaaaattggctgagtgtggcagtgtgcacctatagccccagctactgaggaggttgaggcggaaggatcatttgagcctaggagattgaggctgcagtgagccatgaatgcaccactgcactccagtctgggtaacagggtttttaatttttttaatttaaatttaaaatttaatttttaatttaaattttagtttaaaagttaaaattcaaattttaaatttaaatcaaaatttaaacatataatgtggctgggtggggtggctcatgcctgtaactccaacactttcagaggccgaggcacgtggatcacctgtggtcaggaggagttccagaccagcctggccaccatggtgaaacaccgtctctactaaaaatataaaaattagccgggcatgctggtgggtgcctgtagttccagctactcaggaggctgagggaagagaatcacttgaacccggaaggtggaggttgcagtgagccaagatcgtgccattgcactccaacctgggaaacaagaccaaaagtcggtcactaaataaataaaaacttccagcctcgtctgaaggtagtcagttacctcaattgtttgttcacagtgaattacagatcgaactccttgttctactcttccccacttctcactactgcacttgtcttaaagaaaaacagagctttagcttcttaacccacaaatggtagttaacctcagagtatagcttaaggttcaagtgtaatacagtttataaatattttcctatgttgttgagtgctgtgtaaatctttttttttttttgagatggagtctcgctctgttgcccaggcgggagtgcagtggcgctctcggctcactgcaacctccacctacgggttcaagtgattctcctgcctcagacttctgagtagttaagattacaggcatgtgccaccatgcccagctaatttttatatttttagtggagacaaggttttatcatgttggtcaggctgatctcaaacccctgagcttgtgatccaccagcctcagcctcccaaagtgctgggattacaggcgtgagccaccgtgcccagcccagtgctatgtaaatctaaagtactcttaaaggtatttacctccaaacggaactcattttaatttcagtttttttgtttttttggtttttttttttggagacggggtcttgctctgtctcacaggctggagtgcaatggtgcgatctcggcttactgcaacctccgcctcccaggttcaagcaattctgcctcagcctcctgagtagccgggattataggcccctgccatcatgcccggctactttttatttaggagacggggtttcgccacgttggccaggctggtcttgaactcctgtcctcaggtgatccacccaccttggcctcccaaagtgttaagattataagcttgagacaccatgcctggcctgcaaatagatttcatagctgctcaatgagccaagaactactttcgtggccaggaataactgcccctttgtctctctgataagagcacattgacacccatgttccaggtacatctgttctgcagatccctggccctaattgaatctcaaattctcacccttggttcttgtccttagctcttgtgactacgccagtgttatcagaggacatgtaaacactgctaccctttctactccacatgcaccttatcctaaatggattaatgtatcccatctttttgcctgttttgttccatgtatttaattgatttaatacgattctagcatcttaatttgatctgtgagcttttctgtttcttaatagtttgcttggtagtatcatcagaggtagtgctaccactgcattgaagtaatttctcagatgcttaaccttctaaaattctcaagcacactttattcaaggaccacagagtttacaccaactacccagaagccaggaatagcttaaggagagactcaccaccagcagcttcttttcaatcaagtttcacttcaacctcacacccaggaacccattcaaattcctacatttcggtatccttagtcgaactaacttcctgtgccggaagcttttgtctgtcccagtgacttctttctttaacaaattcccttcatctcccccttgagtcaaagcccatgggggccccaggaggcatgcaatatttaccaagggctctcccccactttcctgcctctgtctggcagttgtttgcctttacttttaggtttgtagtcacagcctgtattttttcctgtagacacaccaggttttctgaacggtagaattactcagagtagaattaaccttgtccttcaccccgagaactgagcttgaaattcactaatcaaggcctgtattcctcccacttctgagttttaaatttatattatgaaattcggaaaacccaggcaaattcaatccatgcttctctccttcaggtacaaactgaaatgaaaatgaaagctgagaaatcaaaataatgaattttaaaaactaaaatatggtaaagctactaaaatatagcattggaagtaacacacacctccttttgggaaaagaaaggaaaattttctagagaaaggaagaaatgttaaacagagagccttgtactatcctttttgcctaatctcctattatttttgtttatttttgagacagtgacgctctgtcgcccaggctggagtggggtggcattatctggggtcactgcaacctcccgggttcaagtgattatcctgcctccgccttccaagtagctgagattacaggcgcaaaccaagacctctggcaaatttctgtatttttagtagagacagggtttcgccatattggccatgctaaacttgaactcctgacctcaggtgatccacctgccttggtctcccgaagtgctgggattacaggtgtgagccacggcacctggcccactaatcttactgcttttgactgtagttattattgttactttaaagattattccaaatagatctctaaattcttacctgccaagaggttgaagattaatactgggtgattaaaaaaaaaaaagttcagaaaacataatacagggctaggctggtgactcatgcctgtaatctcagcacttcgggaggccaaggctggtagactgcttgagctcaggagtttgagactagccaggccaacatggggaaaccccgtctctcctaaaaacacaaaagttagctggcatggtggtgtgcacctatagtctgggctatttgagagactcaggcaggaggattgcttgaatccgggaagtcgaggctacagtgaggtgaaatggtgccactaagccccagtctgagcagcagaataagcccgtcttaaaaaaataaaaaagaaggctgggcactgtggctcatgcctgtaatcctagcactttgggagaccgaggagggtggattacctgaggtcaggagttcgagaccagcctggtcaatacggtgaaaccccatctctactaaatacaaagaattagctgggcatagtggcaaatccctgtaataccagccactcgaaaggctgaggcaagagaatcacttgaacctgggaggtgcaggttgcagtgagtagagattgcatcattgtgctccagcctgagtaacaaaagtgaagttccatctcaaaaaaaaaaaaaaaaattgcccagacacggtggctcacacctataatcccaccactttgggaggccgagtcaggtggatcacctgaggtcaggagttcgagaccaggctggccaacatggtgaaaccccatctctactaaaaataccaaaaattagccgggtgtaatgttgggtgcctgtaatcccagctacttaggaggctgacgcaggagaattgctcgaacccaggaggcggaggttgcagtgagccaagattgtgccactgcactccagcctgggcaatagagagagactgtctaaaaaaacaaacgataggccaggcgcagtggctcacgcctgtaatcccaacactttgggaggccaaggctggtggatcatgaggtcaggagttcaagaccagcctggccaacatagtgaaaccctgtctctactaaaaatacaattagctgggcatggtggctcacccctgtagtcccagctacttgggaggctgaggcaggagaatcacttgaactcgggaggcggaggttgcggtgagccgagatcgctccactacactccagcctgggcaacagagtaagactccagtcttaaaaaaaaacaaaataaaacaaaaaaaaaacacttggaattagactggatagtcttagtaacattggacaattggggaaataatgagagaaaagactggaaaaaaccactctgataacctgcatcatgctgcttcagagtgaagggacgtgctctcagatcagatacatttagggcaggcacaagatgggaaaaggacagtaaaggattattagtataattcacagatgcctgcgtagctgctcttaaggtgagaacataaatctgtttcaactagccttagaatttacttacatataggcctctgatgaaactttaaatgttagcatcaattacagattcatacacggaaataacccattacatttgtagatgcacatgtacaatgcacgtaagtgcccttttttctaaaactggcatatttattattcattcattctaaaactggcatatttatttattattcatttatttacttatttatttatttatttttgagatgggagttttgctcttgtcgcccaagctggagtgcagtggtgtgatattggctcactacaacctccacctaccaggttcaagcgattctcctgcctcagcctcccaaatagctgggactacaggcataggccaccacgctcagctatttctatgcatttctaagatagcagtgtcctcagctaatttccttctccaccccaaccaaaaatttaacaaagatttatgtttaagctgtatatttactcattgaaacactcggtgaaatcagggtaaaatcaactaaaggaaaaatagttgtttcattcatttgaacttaaaccaactaaagcagtactcatgtcattacgatgcagcaaatacgagacctctttctacaaagattagcacaaccaacaaattaggggatatagcaaaacagagccaaaaacggtaagaaatcaattaagtatgttacagcttaaccctttacctcaatagtttttaaaaaataagcaaagcctcccaatcccaaacaatacgaatacatcttcatcaccaatttgtacttgtatttcttattcttgaggttagattctaaaccctaaagatatccaaactagtattagatctacttatctatagccagagacggcagccaaggttattaaaatgtcttttctaggcagggcgcggtggctcacgcctgtaaatcccagctgttagggaggccgaggcgggtggatcacaaggtcaggagatcgagaccatcctggctaacacagtgaaaccccgtctctactaaaaatacaaaatattagccgggcgaggtggcgggcgcctgtagtcccagctgctcgggaggctgaggcaggagaatggcgtgaacccgggagacggagcttgcagtgagccaagaccgcgccactgcactccagcctgggcgacagagcaagactccgtttcaaaaaaaaaaaaaaaaaaagtattttctccaggaagatccaataggaaaaaaaaaaaaaaagaaacctcgctgattaggctccaaccatactccaccctccatgagattgactggatgggcatcatggaaaccagaacacgtggtttccaaacaagaaaaatcctatgagggatgggaggaggggagaggaaggattcagccagtgtccagactgaaattgagtaatatcagtttcactcatcttcacacgtcttcaggttgcatgttcatggagtagtttaggaataaatccatggtttgtggagtactaaaatacctagtggtctgctgtattacattaaggccttccccagcagcttccaaggcagcctccaagtcactggcaggagaatttggctggaactgcatgcaggactgcagagattcctctccacagttatagaagggactgttccaggcctgattgttccaggattgggtgcaccaggtctgagtgttccaggagtggttgctccaggactggatgttctgggtctggttgctccaggttgaattgttccaggtctggttgctccacattggaaggttcccagtcgggttcaccaggcatccctggtggtaggaagagtaaaggctggggtaggtaggtgctgaggccttctgaaagagaaggagggattaacagaaagggtacaaggacaaccagaactgtctgtgactggagttgtgtgtttcagggatggacaagattgaaagatcactgaaaggaaagaacagaatgaagtttcctgttacctgcgtcacaccattgctattcttcggccagttgtttttctgccacctcttagatttcattctctggttctggaaccaggtcttcacctgcaggaaaaaatgatagaaattgtaaaatattcataatacagaggtactttgaatcaaagtatattgctaacttttattcctggccaggtgccatatctcatgcctgtaatcccaacactttggaaggccaaggcgggcagattgcttgagcccaggagttcgctacaggctagccaacatgaggaaacaccgtgtctacaaaaatacaaaaaattagccgggtgtaatgctgcacgtctgtggtcccagcttctcaggaggctgagacgggaggatcgcttgcacctgggaagtgaaggctgcagtgagccaagattgcatcactgcactccagctgcgtgacaacagaaccagactgtctcagaaaaaaagagagaaatgaacattttggatagaaaataaaggcaagggccgggtgtggtagttcacacctgtaatcctagcactttaggaggcagaggcacgtggatcacttgaggtcaggagttgaaaaccagcctggccaacatggtgaagccccatctctactaaaaaatacagtaaaattagccaggtgtagtggcgggcgcctgtaatcccagctacttgggaggctgaggcaggagaatcccttgaacccaggaggtggaggtttcatccatttgtacttaaaccaagtaatgctaatgtcattatgatgtctcattatgaggccactgcactccagcctgggagacagagtgagactccgtctcaaaaataaacaaaagaaaagaaggaaataaagcctagaagaggataagccaattaatgaaggaaaatggccaacaagtaataaacaatgattggccttattgaatgcacacagataaaaaacaaaacaagctggagttgctggcagaaagaaaaaaaggaaaaaaaaagtttttattttaatgagaaccagtgtgagttagggtttctcctaccctggtaagtggagttagatacttcttttttattaaggaaacgttggaaagattttcacaatattggtctgtgcaagaaagtggttaaattatgacataattattcacataatagaatatttaaggaaagaaagaggtgaaggaagttacaaaagcatttcatcttcataaattatttgcaagaggcgatgtacggacacatagtacacacatctacatgcatccacagaggtcttagccatgcaaattagtccaatttttgttcaccttattccaaggacaaaacaagcctacctgtttgtagctgaggttcaggatgttggagagttcttgcatctgctggaggctgaggtatttctgtctctgaaatctatcattgagtacacacagctgggtggaagagaacacagttctggtcttctgtttcttgaccgggaccttgtcttccttttttgcgacactcttctctgcagaagtgggttgtttgcctttgggactggtggaagaatcagggctgtcctgaataagcagatccatggaggaaggaagaggagagactgttgggaacaaataaaaggacacttttgtctaaaatttttcaaatattaaaatatcctttaaaaaaattgttttcaaagtactttgataattcccagaaccccagatctaagtaataagaagcaatttcttaagcagccctggcactttggcaagctttatatagtattactccaagaagtcttatcagtatctccattttgtacataatagactgcgttgggagagatctataatggtggccaatgcattgctgagcggcgctaccccttttttttaaaattaggatggaggttcactcttgttgcccaggctgaagtgcgatggtgcaatctcggctcactgcaacctccatctcctgggttcaagcgattctcctgcctcagcctcctgagtagctgggattacaggcaggcaccatcacgcctggctaattttgtatttttagtagagacagggtttctcaatgttggtgaggctggtctcgaactcctgacctcgtgatccgcctgcctcggcctcccgaagtactgagattacaggtgtgagccacctcatcaggccggcgctaccaccttttgctttaaactgatgctcaaaagctcccacactgggtgttaataggtcagaatggagattcaccaattttcacgtattgcatctcaccctaaatcactttgtttatgatcttcatcaacacctacatgattgcttaaatgccatgattctggggattctataaaaccagcacctcagctaggtgggatggctcatgcctgtaatcccaacactttgggaggccaaggtgggcagatcacttgaggtcaagagttcaaaaccagcgtgccaacatggtgaaaccccatctctactaaaaattacaaaaattagccaggagtggtggcgcatgcctgtaatcccagctactggggagactgaggcaggagaatcacttgaacccaggaggccgtgattgcagtaagccgagagtgccactgcactccagcctgggtgacagagtgagactgtctcaaaaaaataaaaaacaaaaccagcaactgactgcccagttctcaatgctaggaccagcaggatatgtgaatccggataagcttctgtttcaatccaggccttccctttactagctctgacctcatctctaaaattatttttttattaattaaaatgaggtaaccaattgaaattctctagcatagggcctggcatttactgattttgtaactagaaatgaatatctagatttagtcatcacttatatacctaattgctctgcggttttcccagtgttcaactctcaattctacccctgcagtcacataacaaagggacaggctctaaaacagcaaaaattaacaatctcttctctcttgcaagtagatctgaaaagcagaggaagcctttcaactaatgattagaattggggaaaatcctaaatattagctacctatataaactgtcacttgatgtgtgctaaagaaaacacatccccacttgctcattcccaaacccagcaatgtatttttaacatttgaaattataaaggtggccaggcgcggtgcccagccaaggcaggtgaatcacttgaggtcaggagtttgagaccagcctggccaacacaccgaaaccccttctctactaagaactacaaaaattagctaggcgtggtggcatacatctgtaatacctgctactcgagagactgagacaggagaaatcacctgaacctaggaggcggaggttgcagtgagccaagatcacgccactgcactcccgcgtgggcaacagaatgagaccctgtctcaaaaaaaaaaaaagaaagaaagaaagaaagaaattataaaggcaagaacattaatgcatagtttagaaaaactgggtgaatagccatgcagagtgggtcagcgcctgtaatcccagcgacttgggaagctgagggtggaggatcacttgaggtcaggagttcaagaccagcccgagctgcaaagtgagaccctgtctctacaaaaataattttttaattagctgggcatagtgacacacgcctcttgtcctagtagttgggaggctgaggcaagaggatcacttgatctcagggttgaggctgcggtgatccatgatcacaccattgcactccagcctatgtgacaaagtgagtccctgattctaaaaaagaggaaaagcagggtgacattcaaatctgaggctcaaatatagcaatcatgtttacttattccttttccacaacctactctttacaactgtagtcataatgtaaatgcgctttttaagctattttacagcgttcagtgttaccaatggcattcttggtaaagttggttcattctcaagtttttgaaaactactgaaaaattgattttcaaaaaagtggtagcggctttatgagtatcccgagtatcccccaccccttgcagctaccagtcagaagcatgagtactagcacaggttttgaagccaaactggacttctagctacattctgtttgactgtcagtagattaaactttctggaattatctttaccataaagttgggtcaacgcttcccaggacttaggagaattagacatgggaggtgctcccaaactcagagctgcccagtaacatccacaaacccagagaatggagaagagacagccgttactgacatagaaagaattacccaaattatgtattacagaaatctcatcgtgatttgccatgccatttttggcaaaacaaaatcatgctcatccctgagctatgacgttaggtcttctggctaattagcaataaatctgctatttattcacatgtgtccagcactatgtgaagatgtacacatcaccttcatttaactataacgatacatttttgtttccaccatgcctaagcccataggttctcaaacttactgcacactgttcaactgccgaattctgtgtccttcaactcaatgcacactcctgagacctgggacatagttcaaagggcaggtgccaccaagttataatggaaaaaggggtttccagaggattagttgataataacacttctttatagtaatggtccatcattgctcaagagggaaatgatcccttaaccctctctccttctctcttttcccttaaggaacttggcctttcaaggataaatttctttcttaccagtctccgtgtgaggcatctcagcagaagacatttgcaaggatggatagttttcttcaggcccacaaatcacaggcataggtgaagattctttacagtcggatgcttcaaagcaaggcaagctttggggacaagctggatccacactcatgttagtatagaggaagaggaggaaaaaatttaagaggtggactggaaaaaaggttaaggcagctttaagacttttctggaagatgttagagaaataggacctccagaaggaaaagtatcaagaaattgggataaagtgagttgcctgcataataacatgaggcaaccagctcagtccagcagaacgttaaaatcctggagtctctagatttataatgaaggctctatcaccttagacccacccctcctggcgggcacaccccctactgacccacccttgtgaattctcagttaatcccgtctaccagtctcaccaaggccattgtaatgcaaaagtagctgcagagtaacccagactaggtggggaactagaaaaccgagcaacagaacctgaagacaaacccagcaacaaatacttctaggttcaccacgtttccaacttttaaatcaggaatatggttcaacaggaatgggataaaactttaatatttttaaaaattaagaaaaaggccgggcgcggtggcccacccctgtaatcccagtaaattgggaggccgtggcaggcggatcacctgaagtcaggagtttgaaaccagcctggccaacatggcgaaaccccctctctactaaaaatacaaaaattagccacgcatggtggtgggtgtctgtagtcccagctactctggaagctgaggcgggagaatcccttgaacctgggaggcagaggttgtggtgagccgatatcgcgccactgtactccagcctgggcaacagagcgggactacgtctcaaaaaaaaaaggggggggtgggggatgcatgcaccttaaattcctgaggttattgaaattctcattagggtgatttcttgatttgagataacttagtgtctcaaaatctggctagtttaggcagaaatttcaactagctccattttcctctttcattcactctgaggttatagtgaaacacaacatggcattatagcatgaagccaaggcatcagttaatgttgaaaatggtacttgttttcagcacctaccttagtttcctttagtttggtttcttgtctatccctcctcccaggtagtcgacttctggctttttccctctggctctttagcttcttcccaggtctggtgatttgtcatgtctttcaagactactccgtgcccatctcgtgtgggtgtgtgtgtttctgggggaagggaggtgttttccaaaggaacaaagtttttagagtggggttccagcactaacatttatggacaaagtctacagttttcgattttccttcctattcccaaacccaacattcaagaaacctaagatttctttctcttttccagtcttccataccgaaaagtaaactcttagcaaatcccgattatgtaatttttgaagacaaaactctttgactcattctcctctgcactctgctcctgggtctgcacccagagcagctggctttgctcccacacaagctgacttttgttcacaatgcaaagactcgaaaagtattgcttgatgtgaaacaaggaaatgaaattgggcgtaatcttttttcttctcagactaccattccggagaagattaagcataggggcatcagggagccggtgagtggggctagtacatcatgcttcaggcagatagtctatgtctcgtaggaaataggatgatttctttaaaagaagggaaaaacttgccctcctgtctctcttaatcagcacagtttgttaagtgggggctgtcaaggccaccaagactcaccgaggctgagcttgcccgcagctctccaaagggcaggtaccagaagctttgttctttgcagaagggggtctttgcataaaagcctgagctgaattcccccatcccccgctccctgtcccattgtgtctagggtaagagcctccggagtgaaagaccaaagggaaggggctggtggctggaaggccgacttactacattcttcgccaaggaaagcaattggaataaagttgaggtttaggaagctatctgactttagattttttggaacaggctggactaaggatgtgttaaaatgagctaacggctgggcacggtggctcacacctgtaatcccagcactttgcgaggccgagccaggtgcatcatctgagatcaggagttcaagaccagcctgaccaacatggtgaaaccctgtctgtactaaaaatacaaaaattaactgggctgggcgtggtggtgcacgcctgtaatcccatctactagggaggctgagacaggagaatcacttgaactccagaggcggaggttgcagcgagccgagatcacgccactgcactccagccgaggaggcacagtgagaccttgtctcaaaaaaaaaaaaaaaaagatttagtagagtagatcaaatagaccaaaaagacaattataatgttaattgtaagtgtaaagttgtgtaataagtaaggaaaaaaagtgcactggatgctaagagagtacaaataatggaggttggggtaggggagggatgggcagggaagattggacgatcctcagtgatctgagaaggaaaaatgtggagagaagggaataccagaaaactaacagtttgggtaaaggcatgagagaaaatgatgggttccaatactgttgtttagcaggactcaaaggcaggggtgcaacaggagggagttgtgggagagaacacggcaactaacacttagtgagcagattactatcagagctgtgtgaaccagaacgactccatcttcaataggagctgggtaaaatgaggctgaaacctactgggctgcattcccagatggttaaggtgttctaagtcataggatgagataggaggtcagcacaaaatacaggtcataaagaccttcctgataaaacaggttgcagtaaaggagctgaccaaatcccaccaaaatgaagatgggagactttttgaataattcaagtgataggatttggatagggcaataggtagtgttggagatgattaggaaaggtcaagtgcagcttgagttgacacacatgccaaatgtgaacctaccctttggccaggcgacacaggtaatatactatctgtctatctatctatttatctagctagctagctagctacctatctgatttatccccctactaccactagaatataagctctgtgagggcaatttttttttttttttttttgagatggagtttccctcttgttgcccaggctacagtgtaatggcgcaatctcggctcaccgcaacctccgccttctgggttcaagcgattcttctgcctcagcctccagagtagctgggattacaggcacacaccaccatgcctagctaatttttttgtatttttagtagagacggggttcaccatgttggccaggctggtctagaactcctgacctcaggtggtccacccaccttggcctcccaaagtgctgggattacaggtgtaagccaccgcgccagcctatttttatttttgcctgtttaatttattatctacagccctagaagagtatgaatggatcattcaccagcatcctcagcaccacttggaagcttgttagagatgctgattgatgggcttcaccactgaataggaatctttggtggttgggaccaggaatctgtgttttaaaattctccctgtgatttttttttttttttcatgacagcctaccattgaaaccaggtgatttttctgaatgctattgtttaagaactactcttctagagagaaccaggcaaaaagtagaaaatcattatttgttgatgaaggaatgggcataaatgagaactagggttttgtaaacaaatagagagtaggagtcatttccttacatttaaatattgaactgcacatcaatgtgatatacagaataactcttgaaaacaacaatgctctttgcctcaggtcccctacactgacaattcaatgaggcttgaacaatgagcctttaatttacaacagtcctccttcctctgggaggtagagttactctccaattaccaatgatgggaagatgaacaccacagctacggaaactgctagtttgaagattacagatggaattatacagcatattcttcacttattttgcctgttatacctataaaaacacaagcagctaggtgcagtggctcacgcctgtaatcccagcactttgggaggccgaggcgggcggatcacgaggtcaggagttcgagaccagcctgaccaacatggtaaaatcctgtctctactaaaaatacaaaaattagccaaggatggtggcatgtgtttgtaattccagctactcaggaggctgaggcaggagaatcgcttgaacccaggaggcagaggttgcggtgagccaagatcacgccattgccctccagcctgggcaacaagagcgaaattccgtctcaaaaaaataacccaaaacaaaacaacacatttcttctcttaatttttttattatgatttttttcctatggtgctgagaaaaaaatttctgactcacggctcagctttgaatttgtcagatcttactctaactaaaggcttttaatattcaaggactgaattactatgtataccaagttctaaggtctactggagagttcagaagactaaaccatcaagccgaattgtcaaaaatagtcctgaccattttttggttcctgaaaaataggaggaaaaaaaaatggtcctgaccttgaccaacactattgttgccagggtatttatgacttcctccttcccaccctaccctcaggggacctttgacccaatgtaaaaagggatttctttttaacccctagtaagtctagcccgcagggaggaggaatatctaagaatgccttccaaagtttagcatatagaaccttgctctgaaatagtataatattattggccagaagagaatcgccttctcaatttctcagtaggtgttagagaaggaggaagaagaacatgtgggcggagttcaggaaggtgaagtgatgatgttgaggagagaaaagtccagcacctatgacaattctcttatcttgactttagctgttgctccagttagctgttgaccctaataatacagcatctaaatagtgaattatctaggcagtgagttatcccaattgattgttcaggatcagttacagatcatactccttgctctacttccccccccccctcactactgcagttgagtagtattaaaagctttttacaaaaaataaataaatagtaagaatattgcaggacatcagagtatttcagttattgtaaaggggttggaggaagagggggcaagaggtccctgccaccaggagcaaataagtttaattatgtaaaagaaagagttcagccaggtgctgtggctcctgcctgtaatcccagcactttgggaggctgaggtgggtggatcacgaggttaggagttcgagtctagcctgaccaacatggtgaaaccccgtctctgctaaaaaaaaaaaaaatacaaaaattagccaggcatggtggcgcttgcctgtaatcccagctactcaggaggctgaggcaggagaattgcttgaaacccgtgaggcagaggttgcagtgagcagagattgctattcagctaggaaaaaaattaattatatcaccggccaggcgcagtgactcacgcatataatcccagtactttgggaggcggaggcgggaggatcgagaggtcaggagtttgaaaccagcctggacagcatggtgaaaccccatctctaccaaaaatacaataattagccgggcatggtggcacctgtagttcagctacttgggaggctaaggcaggagaatcgcttgaaactgggaggcggaggttgtggtgagctgagatcgcaccactgcactccagcctgtgtgacagagcgagactccatcgaaagaaagaaagaaaggaaagaaaagaaagaaagaaagaagaaagagagagagaaagaagaaagagaaagaaagaaagaaggaaagaaagaaaagaaaggaaggaaggaagaaagaaagaaagaaagagagggagagagaaggaaggaaggaaggaaaggccgggcccatgagccacggagcccggcctctgctcatcttttaaggctgaatttaagtaccacatttttctttctttctttttttttttttgagacagagtctcgatctgtcgcctgggctggagtgcagtggcgcaatcttggctcactgcaacctccgtctcccaggttcaagcgattctcctgcctcagcctcccgagtagctgggattacaggcatgcgccaccaccccggctaattttgtatttttagtagcgacggggtttctccatgttggtcaggctgatcttgaactcccgacctcaggtgatccgcctgcctcggcctcccaaagtgttgggattacaggcgtgagccaccacgcccagccaactaaggatgattttcacatctttaaatgattaggggaaaaatcaaaataatattttataacttgtgaaaagtatacaaaattcaaatttctgtgtcttttttgttttttttttcttttcttttcttttaaggaaacagggttttggccaggcaaggtgtctcccgcctgtaatcccagcaatttgggaggctgaggtaggaggatcacctgaggtcaggagttgaagaccagcctggccaacatggtgaaactctatctctactaaaaatacaaaaattagctgggcatggtggcctacacctataatcccacctgctctagaggctgaggcatgagaatctctgaacctgggaggcggatgatgcagtgagccaagatggtgccactgcactccggcctgggcgacagaggaagactccgtctcaaaaaaaaaaaaaaaaaaaaaaaaaagaaacagggttttgctctgtcacccaggcttgagtgcagtgatgctgtcataagtcactgcagtctcaaactcctggtctgaagcaattctcctgccccagcctccctagtccctagggctacaggtgtgtgccaccacccctggctaattaaaaaacaaaaacaaaaaaacacttgtagagaatgggtctcactatgttatccaaaatgttgggatcacaggcgtgagccaccgtgcctggcctgcaaattattatgtgttgactacttggccctttggagatagtttgctgaccctggtgctacacaaaagtgatgagtctttttttgttgtttttttaagatggaatcttgctctgtcgcccaggctggagtgcggtgggaccacaggcacgtgccctggctaatttttttatgttttgtaaagatggggtcttgctatgttgcccagcccaggctggtttcaaactcctgggttcaagcgatcctcccaccttggcctccgaaagtgttgggattacaggcatgacccactgtacccagttgataatttttttttttaaagacagagtttcactcttgtcgcccaggctggagtgcagtgatgtgatctgggctcactgcaacttccatctcccaggttcaagcaattctcctgctttagcctcctgagttgctgggactacagacacctgccaccacgcccagctaaatttttgtatttttaatagagacggggtttcaccatgttggccaggctggtctcgaacccctgacctcaagtgatccaccgacctcggccacccaaagtgatggggattacaggtgtgaaccaccgcgcctggcctagttctgccattattattattattattttttgagacaaagtctcgctctgttgccaggccggagtgcagtggcgtgatctctgctgactgcaacctccacctcccgggttcaggcaattctcaggcctcccaagtagctgggattacaggcatgtgccaccacacccagctaatttttgtatttttagtagagacggggtttcaccatgttgcccaggatggtcttgatctactgaccttgtgatccacccaccttggcctcccaaatgctgggattacaggtgcgagccaccatgcctggccaagttctgccattattaacatttacctaggcatggtacatttgtcacaattaattaatcaatattgggtaatcaatattgattaattttgattaatcaatattaatcttgatggaatcctgttattaatattgattaatgtttaggattctggaacataaaaagaccatagattaaaaacttgtttttttaatgtgtgctttttttttttttttttttgagaggtcactctgtagctaggctggagtgcaatggtgcgatctcggctcactgccacctccacctcccagattcaagagattctcctgcctcagtctcccgagcagctgggattacaggcacgagccaccacgccaggctaattttttgtatttttagtagagctagggtttcaccatgttggccaggctggtcttgaactcctgagctcaagtgatcctccctccttgccctcccaaagtgctgggattacaggtgtgagccactgtgcccggcctaaaaacttgttctttttatgttctagaatcgcgtccaggatatcttctatttactcattatgtctcctttggctcctctcggctatgacggttgctctactgtatcgtaagaactcccatttcacccacggcctcacctattctcgcgtttggtctcctatttgttcccttttcctctatctgtacttattgcctaccctctgaagacataatttgtttcatacccactgcttttaaaagcattattgtctttccttaagatctttgttttttttataactaagaaaagtgagaattctaaggtcagagtagatggaattttttgtattctattttcctcctgcaaaattctctcagattaatcccattcttctactgtagcgcttacaaattataaataggatgatatggttttggggaatctgaaaaggcagcctctagtgataaggttagtcagacctgggtttaaattccagatttaccattaatccaactacttgaatcttgggtgaattaatttaacttgtctaattttcttagttccattatctgttgaacagctatattactatccaacgtggttgatgtgagggttttctttattttgtttttcattttttgtttttgagacaggccttgctctgtcattcagtctggagtgcaacttttttttttctgtagagatgaggtattgctaggttttccaggatggtctggaactcctggcttcaagcgatcctccctcctgggcctcccaaagtgttgtgattacagatgtgagccaccatgcctggacttagagacgtttaaaatacatggttctgagtaaattcccaagtaaattaccaaatcctcaaatgtcctgtgctctaatctgtctttattcataccgagtattactgggaactgtaaggtattgggaattgattttttttcctgatccaatttccatattaatacattcaatttacttaagaaagataattaactatgttttaatttatttctggtaaaatgttagcaagaataaaaatatacacccacaatacatactttaaccatgtataaatatttttatttatttatttatttattttgagacagagtctcactctgttgcccaggctggaatgcagtggcgtgatctcagctcactgcaacctccgcctcccaggttcaagggattctcctggctcagcctcccgagcagctgggattacaggtgcgtgccaccagccctggctaattttttgttttttggtagacgcggtttcaccatgttagccaggatggtctcgatctcctgacctcgtgatccgcctgctttggcctcccaaagtgctggaattacaggcgtgagccacggcgcctggcccttaaccatctaaaaatctttaaaactagctgggaaccgtggctcacgactataatcccagcactttgggaggcctaggagagcaaatcacttgaggtcaggagttcgaaaccagcctggccaacatggtgaaaccccgtctctactaaaattccaaaacattagctgggcgtgttgatgagcgcctgtaatcccagttacttgggaggctgaggcaggagaatcacttgaacctgggagttggaggttgcagtgagccaagatgaggccactgcacttcagcctgggtaacagagtgagaccttgtctcaaaaataaatagataaagaaaataaaaataaggaacagtcttacatcactattttttctagtatttgttccaaattaaaaaattgttttaattattgtttaaatttaaggtatacaacataatgttttttgtttgtatttgtttgtttgttttgagacggagttttgctcttgttgcccaggctggagtgcaatggcgcgagctcggctcactgcaacctctgcttcccaggttcaagtgattcttccgcctcagcctcccgagtagctgagattacagacacccaccaccacgcccagctaattttgtatttttttttttttagtagagatgaggtttcttcatttgtcaggctgatctcaaactcctgacttcaggtgatcttcctgccttggcctcccaaagtgctgggattacaggcatgaaccactgcacctggctgatctctcttatatatgggatgtagaagcagttagggttgcttgtgttgcccaggctggagtgcaatggtgtgatttcagctcactgcaacctccacctcccaagttcaagcgattctcctgcctcagtctccgtagtagctgggattacaggcgcccgccaccacgctcgagtaatttttttgtatttttttcttttggagacagagcctcactctgttgcccaggctggagtgcagtggcctgaactcagctcactgctacctccgcctcctgggttcaagcaattctcctgtctcagcctccggagtagctgggattacagatgtgcaccaccacgcccggcttatttttgtattattagtagagatggagttttcaccatgttggccaggctagtctcgaactcctgacctcagctgatcctctcacctcagcctcccaaattgttgagattataggcataagccaccgcacccagccaatttttttgtatttttagtagagacagggttttaccatgatgtccaggctggtctccaactcctgacctcagatgatccacccaccttggactcccaacacacccagccaggatgcagttatttttacaaggggctggcttcatttcctttgggtatatacccagaattggaattgctggattatacagtagttctgtttttaattttttgaggaatctccatactgctttccataatgactgcaccaacttagcttcccatcaatgtaaaaactttctcttttctccacatcctcaccaacacgtgttctgggtgactgggaagtccaagatcaaggctccagcaaattcactgtctggggagggcatgcttcctggttcacaggtgactaaaatcggggagagagctctacactgtctcttttataagtacactaatctcatttataagatgccactcttactgcctaatcacctcccaaaggccctatctcctattatcatcacaatgggggttaggaaatttttttttagatggagtctagctctgtcgtccaaactggagtgcagtggctcgatcttggctcactgcaacctccgcttcctgggttcaagccattctcctcctcagcctctggagtagctggcattacaggctcccgccaccacacccggctaatttttgtatgtttattagagacagggtttcaccatattggccaggctggtctcttactcctgacctcggggatccatctacctcggcctccctaagtggtgggattacagccgtgagccatcgtgcccggctggagcggttttattcacagttgctaaaatttaccaagatgtccttcagtagggtgaatggataaactgtggtccatctacacaatgaaatattagtaagtgatcaaaagaaatgagccggccaggcgcagtggctcacgcctgttatcccaacactttgggaggccgaggggggtggatcacctgaggtcaggagttggagaccagcctgaccaacatggagaaaacccatctctactaaaaataactaaatt

SEQ ID NO: 63 - DNA, 30211 bp, Mus musculus
atgacagatggttgggcgtggtaggcatacctttaagtccagcattcgggagatggagacaagtggatctctgtgagttcaaggctgacctcatttacacagccaaggctacatagtgaacgcctgtttcaaagccaacagaggctggagagatggctcagtggttaagagcactgactgctcttccaaaggtcctgagttcaatgatgccctcttctgatgtgcctgggaaacagctacagtatactcataaataaaataaatcttaaaaacaaacaaacaaacaaacaaacaaaggtgttgcctgcagtgattcaggagagtaaaactgaacacttagggggctcacttcagaaaggcaagaaaataaaagagtcagaatgtggatttgaaagcccagtgtagctcttcttcttcttcgggaaaacaccaaatggcggatgacgccggtgcagcgggagggcccggaggacccgggggcccaggattaggaggccgtggtggcttccgcggaggattcggcagcggtattaggggccgtggttgtggccaaggccgtggccgtggtcgaggccgcggggctcgtggaggtaaagctgaagacaaggagtggatccccgtcaccaagctgggccgcctggttaaggacatgaagatcaagtccttggaggagatctacctgttctccctgcccattaaggagtctgagatcattgatttcttcctgggtgcgtccctaaaggatgaggttctgaaaatcatgccagtgcagaagcagactcgggctggccagcagaccaggttcaaggctttcgtcgctattgaggactacaatggtcacgttggtcttggtgttaggtgctccaaggaggttgccactgccatccgaggagccatcatcttggccaagcttttcatcatccctgtgcggagaggctactgggggaacaagattggtaagccccacactgttccatgcaaggtgacaggccgctgtggctctgtgctggtgcgtctcatccctgcccccagaggcactggcattgtctctgctcctgtgcccaagaagctcctgatgatggccggtatagatgactgctacacttcagccagaggctgcactgccaccctgggcaactttgctaaggccacctttgatgccatctccaagacttacagctacctgacccccaacctctggaaagagactgtcttcaccaagactccttatcaggaattcacggatcatcttgtgaaaacccacaccagagtctctgttcagaggacccaggctccagctgtggctaccacataagggtttttatatgagaaaaataaaagaattaagtctgctgataaaaaaaaaaaaaaagaaagcccagtgtagtgtagttacacgtctctgcccgtaactctggcattgaggaggtagaggcaggaggatcacagaaatttcaaggcctgaatttaaaacatggggttaataggtcaccaccacctttaaaaagcaaaatcggtgtcttgggggatggagatgactaagcagatgaagcacttgctcttccagtgctgggtctgagttcaaatcctcagcacggagtcgggtgctggtggcacacacctttaatcccagcactcgggaggcagaggcaggtggatttctgagttcgaggccagcctggtctacagagtgagttccaggacaaccagggctacacagagaaaccctgtctcaaaaaacaaaacaaaacaaaacaaaacaaaacaaaacaaaacaaaacaaaatcctcagcacctacatgaagaccaggtggaggggctggagatcaagagcactggctgctcttcttggacccaggttcaatttccagcacccacttgttggcttgtaaccatctgtaacaccagtcccaggagactagatgccttcttctggcttctgtatcacattggtacactgttatatattcaggcaaaacataacactaacactaacactaatactaatactaatactaatactaatactaatactaatactaatactaatactaatactaatactagtactagtactaatactaatactaatactaatactaactaagccaaccaagtaagtggagttgacggtgattctacacacctgcaatcttaagacttgagagatggaggacaatcgtaagttcaaggctatctctgacttcataaccaatactttgactcgggaggcagaggcaggtggatctctgagttcgaggccagcctggtctacaaagtgagttccaggacagccagggctatacagagaaaccctgtctcgaaaaaccaaacaaacaaacaaaaaacaaaaaacaaaaactttgagacaagagacctatctcaaagataaaaattatgtgaccgggcatggtggtgcattccttttaatcccagcactcaggaggcagaggcaggcgaatttctgagttcgaggccagcctggtctacagagtgagttccaggacagccagggctacacagagaaaccctgcctcaaaaacaaacaaacaaacaaacaaacaaacaaacaaacaaaaaagtgtcaattaaagaatatttaagggaccaggcagtggtggtagcagctgctggtggtcgcagctgctggtggtcgcagctcctggtggtggcataggtttgtaatcccagcaggattaatcccagagtcaggaggctctacagagggagatccaggatctgtgtagctggggctacacagagaaaccctgtctttttttttttttttttttttttgactgtcctaaattgtttattggatatgaattttacaaatatcatgtgtattagcggtaacggtggagctggagagtattgcgccttctccaggctgcacggcgggaaccaccaatagtgtggtggaacttgtggccctttccaaggccaccgctctttcggccagcagatgtcagcccacgcatttctctgtgtttgtggactggtttggtgatccactgggtgtcaggatttcttctgatagctttatggaacggatcaatgaggataacctcaaaaaatgtatatgtggaatcttcaccaacccagtaggaattcaggactctcaaagccccacaatggcgcccagctctctcctcagcaacaggctgaaggcttcgggcaaatttcagctggttaacaccatggtggacaggcttgccgtaagttgcacccttaggaactgggcgtttacgaccaccatggtggacacgaatcctgtaaatgacatagccttgcttagccttgtaccccagtcttcgagctttatcaggccgggtggggcggggagccctgtgcagcgcagagagctggcggtattgccagcagcggaccctcagaagaaagcgcatcacgtcggactgcttcttcctccatagctcctggatgtacttgtatgcacccatcttggctcacctgatggctgccgccagaggaaaggacgagaaaccctgtcttaaaaaacaaacaaaaaagaatatttaaggggaccaaagagaggactcatatcgctgtttttgaagaggacaggagttcccagcatcagaaaggatggttataaacaactgtgacttcagaaccagaggatcccatacccctgtccctgtcctctcagagacacacacacacacacttaaaataatttaatatatataatatttaaagaatttaatataaaataattatataaatatatatataaacataggatgtgtgtgtgtgtgtgtgtattaggtatgtaagttagtgaaacatgcatttcatcccagcactcaggagacagaagcagaccggtaggtagatagatctctgggagttccaggctcccttggtctacacagtagcttccattgtagattttcactgctaaccctgcctgattttctaaattctaattcaaatagcctataagtctgtttttcttttcatctaaagtcttgccgagacttcctgagagatgcctttgacttttccaaccccaactctcagatttattgcttactggctttgttgtcttttctttctttcaaaatgcatttataggaggcagaggcaggtggatttctgagttcgaggccagcctggtctacaaagtgagttccaggacagccagggctccacagagaaaccctgtctcaaaaaaaccaaaaaaaaaaaaatgcatttatagatttttatgtatatgagcactttatctgcatgtacaccttcataccagaagagggcatcggaccccattacatatggctgtgagccaccttgtagtttgttgagaattgaacccaggacctctagaagagcagtcagtgctcttaaccattgagccatctctccagcccctaataaaatgggtttaaaacaaacatttaaagtgtgaaagaatgactcccaccttccatttgcatacaaagtctcggttatggctcctctgttagcaacaagacaagtattaacctttatgctcagttttgttctagaataacagtcctcaaacaatatcaagtaaagatatagatagtctgtggtgtgtgtgtatgtatgtgtgtaattgtgtgtgtgtatgtatgtatatttatgtgtgtttaagtgtgtgtgttcaacataagtattaaaccaagggtctcctcatggtaaccaggagtctatcaatgaaattttgttttattaagacagaatcttaagccaggcttggtggcgcatgcctttattcccagcacttggaaggcagaggcaggcagatttctgagtttgaagccagcctggtctacagagtgagttctaggacagccagggctatacagagaaaccctgtctaaaaaacaaaacaaaacaaaacaaaacaaaacaaaacaaataaaacgacaacaccggtaagaaggacacatgctccactatgttcatagcagtcttatttataatagccagaagctggaaagaacccagatgcccctcaacagaggaatggatacagaaaatgtggtacatttacacaatggagtactactcagctattaaaaagaatgaatttatgaaattcctaggcaaatggatggacctggagggcatcatcctgagtaaggtaacccaatcacaaaggaactcataggatatgcactcactgataagtggatattagcccagaaacttaggatacccaagatataagatacaatttgctaaaagcatgaaactcaagaagaacgaagaccaaagtgtggacactttgccccttcttggaattgggaacaaaacacccatggaaggagttacagagacaaagtttggagctgtgacgaaaggatggaccatctagagactaccatatccagggatctatcccataatcagcttccaaacgctgacaccattgcatatactagcacgattttgctgaaaggacccagatgtagctgtctcttgtgagactatgccggggcctagcaaacacataagtggatgctcacagtcagctattggatggatcacagggcccccaatggaggagctagagaaagtacccaaggagctaaaaaggatctgcaaccctataggtggaacaacattatgaactaaccagtatcccagagcccttgtctctagctgcatatgtatcaaaagatggcctcgtcggccatcagaggaaagaaagacccactgaacttgcaaactttatatgccccagtacaggggaacaccagggccaaaaagtgggagtgggtaggtaggggagtgggggggggtatgggggacttttgggatagcattggaaatgtaaatgaggaaaatacctaataaaaaatatttaaaaacaacaacaacaaagacagaatcttgctggagagatggctcagtggttaagagcactgacaaaatctctccctacataccctggctggtgattctccttcaagggctaagattacaggtctgagccaccacatcctgcttcaagaaagattataaaatacagattcatggtccctaccactagtgaggagtagtagtataagctcactgcttctttcctaacacaatagctgcccctgatactgatgatgctggcaaaagaacctagtatagggggctggagacatggctcagaggttaagagcactgactgctcttctgaaggtcctgagttcaaatcccagcaaccacatggtggctcacaaacatctgtaatgggatttgataccctcttctggtgtgtctgaagagagctacagtgtacttacataaattaaataagtgaatttttgaaagaaaagacataaacaagcggtatactctaggtatgctttttcttgaaaatctatttattatactgcctggctgtgtgtgggtgcacacagagaacaacttgtgggaatacattttctttttccctaagtgagatgggggagagagggagggatctggcctcaggaagaatgaagctccaactgctttgtgggcctgagctctcagtggagacttgatcttgtctcctgcgtgctgggatttcagactcgatactatgttctgtgtagtgctggagactgaacgcatgtcctttattcatgcaaagcgagtactgtgccaactgaactacacgctcaggttcatgttatgcttttctgagtttttaaaaacagaggcgtagtcaggtaaagcagcacaaagcctttaatcccagtcttccagagtcagaggcagacgggtctccagtagttcgaggccagcctggtctacagcgtgagttccaggacagccagggcatagagaaaccttgtctcaaaaacaaaaacaaaaacccagaagtgttggagtctgtaattctctccaattgttaacctgctggaatttccttcccaggtttgtcccgcggctctcccggaggactccaaggctagcgattcacacccctcccccacctgtccctagtccccgctccttttcagcactaaccatacaagttcatcttttactcttgttttgactgctaaccacccagaggacccacttaacattcctttccccacccacacagctagttccaaccaggtctaaggcatctagacgccctcctccctattcaaaccgcttccctggataaggaatgtagcaagcctgccttttggctaccagccacctcttcgctcggatctttcaccagagactctcaaagacactaaagaggcaggacaggaatgggggttggggagggatccatcgccgtctcctaagcagactcctttgacccggagctgtgcgccctgtaccaaacctttgtagaacttggggtaaacttaaggctatggtggccttgactccgtggacccagaggcaagtttcctcctttagaggactcgcatgcattttgtttctaatttgaaatgagaaccggcttagagcttgaaccagccagttctctggactcctcccagctcttacaattcctctcccggacggttcctagaagacaaaggcaagcttaccaaaattacgtcgcccttgggacacacctagggttccctggtggcatcttttttttttcattataaacaggagtaaatttttgtaagggcagagctggtagctgagggagaggaaccctttggcctagtgaaggtagtttgctgggctttgtatccccgcccccacctcccccgagagagagagagagagagagagagagagagagagagagagagagagagagagagagagagagagagagagagactacgtggttatttcaaaaacttgagtgtggcaaaagtatgtaactgggattagtaagcatttctttccttagtgagattggagtagagggtgggaaaggaccttagaatcctcgaatgttgggcttaggaatggggagacaagagccatcacagaatgcctattgtccttcaatatgttagcgatgggccccgtgctttagattttaggcttgtattttctttgtgtgtgtgtgtgtttgttttgtttctgtttctttaggcagtctggagatcaggctggctttcaactccctgtgatgcccctacctctcctgaggtgtgagtggcagaatgctcagcgggtaaaacacacttgtataagtgcaagagaaccaagttccaaacattgtcctctgacttcctcaggcatgccttagctctaacaaataaaattgaagaaaaggattccaaaccacggtgaaggtgccacatctttgatccccttaaggcagacagaagtagagggatccctgggagttcaaagccaggttggtctgcatactgagttggctagccaggaatacacactgagactctgtctttaaaaaaaaaaaagtgtgaagactgctttctctgtcccagcacttgggagagagggaaagaaacacagcagccagccttgtctacacagtgagttccaggctaaccagatctgacatagtgaggtcctgactcaaaattaaaaattggctacagataatactgtagcccttggttagtccgagtacttaactcaacataccattcttcgtttaagcaaaccacgtgaaagacttttcactgaaggctgcaagtcttaaaatgactttggtgatgcctgcctggactgtctaccctctggagcagacttacaaagaatattttttactaagcgctgcataaaccttgatattttgaacggcctattcattctttgcctaatgacaagaatcacatcagggacatatttgtattagtccagcgaataagcagaaggtagaacagttattcttttgttctatgatttctacttaggggctttagtccatctgtttattgtttaaaaccttcatatctcaccaagtagtggtggccatccctttaaccccagcattctgagagacagaagcaggtgggtctctgtgagttcgaggccagcctggcctacagatctaattccaggatagccggggctacatagagaaactctgtctcaaaataaataagtaaataaataaataagtaaatgatatatttacattatttattatatcacaaattatatacgtgttctatagaatatgttactatatacatattttttttggtttttcgagacagggtttcatatagcattagcttcatatatataatttatatgcaaaaatatctctgaaaatggaatcactggaacccaattctaaaagtattgtttttttttgtttttaaagtttcctcatacctcaaagttgtcagaggagggcttaagagatgggctagaggggctggagagatagctcagcagttaagagctctggttgctcttccagaggaccagggttcaatttccagtacctacatgacagctcataactatctgtaatttcagttccaggggacctggcactctctttttcatctttttgttgttgttgtttttcgagacagggtttctctgtgtagccctggctgtcctggaactcactttgtagaccaggctggcctcgaactcagaaatccacctgcctctgccgcctaagtgctgggattaaaggcgtgtgccaccacggcgggcactctcacaccaaaatccatgcaggcaaaacaccaatgcacacaaaaataaaggaaatctaaagaaagaagaaaaaagaaacaaaattggaagagagagagagagagagtggtgtaaacagtgggtctgaagccttcgagggaggagggcaagatgccgcgctctgcgtttctccagctggatgtggacagaggtcaaccagccacattagtttatgtctaaaagtgtctaattgaaacaagaaatggctgctttagccgggtgtggtggcacacgcctttaatcccagcactcaggaggcagaggcaggcagatttctgagttcaaggccagcctggtctacagagtgagttccaggacagccagagctacacagagaaaccctgtctcgaaaaaccaaccaaccaaccaaccaaacaaacaaacaaaaaaggaaatggctggtttaattatatcacactgttcatcagaataaagagaaaaatctcaaaaaaaaaaaaaaaaaaaaagaggttcagtcaggctgggcaatggaggcagtagtggccgtggtggtcttggcagcagtggaggccttggtggcagtggtgacagacagtgatagtgtggcagcagttgaggcagtggtggtcgtagtggcagtgatggcattggtggcagggttggtgtggctcagaggtggcagtggtggcagtggaggcattgcaggctttagtggcaatggtagtggggcagcagtggtagccatggtggcacagtggtagcaacggtggtagtggcagccgtggtggccgcagaggcagtggtaacaatggtggcttggtggcagtgctgacagtggtagtattggtagcattggtggcagtggaagaagggaagtggtggtaatggtggcaggggtggcagcagaggcagacagtggtgacgatggtggcagtggtgctgtggcacagtggtggcattggtggcatggcacagtggtggcaatgatggtgtggtgcagtggtagcagtggagacagtggtggcagtggagacagtagtagtatggtggctgtggtggccatggcggcagtggtggcacatacaggcctttaatgccagcacatgggaggcagaggcagttggctctctgtgagttggaagccagcttgttctacagagcaagtcccaggacagccagggctacacagagaaaccctgcctagaataataacaaaactcaaacaaacaccaccaacccccgcgctccgccccgccccccccaaaaaaaaccccaaaccaaaaagagccattcaagcttagtcttttgtagaataaaacccaggaagaaccactcctaccaatactcactgtggtagagtcttcacatgggagatgttacgagaggacggcccttccctctctgcttatacacagaagccgacttaagctgggttagagtgctttcactcacttatctgtgagcacaaggactgatcggcaaactttgaacttgggatgtggaaataggaagatcaggagtttgggaccagctagagcaatagactgtgaggccagtctcgggtacgtgaaactctatctcaaagaaatgaccaaaaccaaatttgaaatacgataaatttcttcttccattgcttagacggctgaggcacttgggattgcagtaagtctgaagccagcctaggttttacagtgagaacttgtctcaaaacaaaacagaaggcctctacattaatttaaacactccttaaattgggcatggtggtagacaagcctggtctacatactgagtataagctactcaaggcaacagagaaaaacctgtctcaaaaccaaagcatggaccaacttactaaggtagcccgagtcttaagcaggacacaggctctttcttcagacttgcgttaaaaagccgcacttttggagggaagatttccccaggtttcccaatgtgaagagcaagcaagaaacgctgagtgctgaaaggaaagccgtgtataaacagagactttggcagcaaggtctgactctttcatgtctgtagaaagaatggaagaggaaactcagatcccccacttgacctgaaacttcccactagagatcgccagggtctggaggtgcagccgtggttaaaagatgaataaagtgaaatgaggtaaagcctctttttgggggggggggatgtctttagatcagaggatgccccctaagctttccctccctcccagtctgggtcaccttacagcttcttttgcattacaatgtccatggtggaccctgcaggtgggattaactgtgaattcacagggctggtggggcgtgggtgccgcctgggtgcctgggagaatagggggtgggtagggtaggaggcttgaggggggaggagcaggacctaccctttaaatctatcgccttgagccgttggccttcagataggctgatttggttggtgtcttgctctttctgtgggaaggctgcggctcacttccttctgacttcttgataattttgcattagacatttaactcttctttctatgatctttccttctagacactgagttttttggttgttgcctaaaaccttttcagaaatcccttccctcgccatcacactgacatgagtgtgggtcttcctggtccccacagtttgcctagttctgaggaagcatcgaattctgggaacgcctcatcaatgcctgcagtttttcatcccgagaactattcttgcttacaagggtctgctactgagatgctctgcacagaggctggtaaggaattcagtccccgaagaacccagtaaattagggtaagagtagaaaaaacgggctgaagggttattgcttctttatgaaccgtagtagtcattaacataagcgggtgtccttatcactcttctggaaacccctctgagtttgaccggtgatacgttggccttctagtctgaaatagagatccgggacacaggacggagcaatataaggctcttgtgtgtatttgagaacctaaatatttgggctctttggaatatgttcgggggcagtgagtggtgtcttcagtagcagggagacctaacatcctagcttggaatgagcaccccatttttttggtgaggttatacagttagtttgcaatttgcccaaatggccgttttctccagcagaagcagttagcatttctctcaacctttgggaatatggatgtcacttagcagttctgggtttgtgagctcagtgctccttccaaaccccaaacaagtgtacacagtttaagtcattcattcttatagctagcatctggagccaaggtctgaagctcattgtctgtacagagtcagcccagtactcaggcttgtaaatggtagaaccaagaggctgctaggctgtgtgtgccacggtgctcaggtgcgtgttgtgatgctcgggtgtgtgcagcgatgctcgggtgtgtgcagtgatgctcgggtgtgtgcagcggtgcttgggtgtgtggagcgctaggaagtgtgtgtccccttttttctgagcttttaagttaatgtctgtcatcttgatttttctgatttatgggttcaatttttgattttttttttgtttgtttttttttgttttttcgagacagggtttctctgtgtagccctggctgtcctggaactcactttgtagaccaggctggcctcaaactcagaaatccgcctgcctctgcctctgcctccctcaatttttgattttggaggtgggaaaagtgctgggttaggaatgaacgggtggggatagcctttgtaagtgatgtgtgtttttagagcatgtgtgtagagcatgtgtgtttgtagtgcgtgcccctagtgccagcagatggcataattttccatttagaagctgctttcagggctgtctacttatttgctagactgcaggctaacctcagcattgccatcagcgtggagcacagatgtcttcagtgtaggaggtgtcttctacctgctgctggatctaggaaatgttggggcaaagcttggtggaggagcacttgtctcttgctgaaggccctggaaaaaaacaaaaaagctaaccgaagagctagagggtcaaggataagagaaacgaatttggttaaccgaaattttactctagtaattaataattaactggaccctctgactggctgctcttgtactagcagaaaagatggtgggatatttttatttatttatttttttaaagatttatttattatatgtaagtacactgtagttgtcttcagacactccagaagagggcgtcagatcttgttacagatggttgtgagccaccatatggttgctgggatttgaactccagaccttcggaagagcagttgggtgctcttacccactgagccgttggatgctcttacccactgagccatctcaccagccccagtgggatcattttaaaatatacctttaaaaaaaaattgggggtggggggtgtctaaactcaggactgtgcattcctaacaacaagtgatttaaccctggaaatttccttagataacattcagtataatggatttcgtcatgacattttttgttcataaatattagttcatccctaaatgttaatgtgtgtgtgtgtgtgtgtgtgtgtatgtatgtatgtatgtatgtatgtatatatgtatgtatgtatagatatagctgactcagtggtagtagagtatgaaaggtcccaacaggattctattcacccagcaccatgcaaaaatctaggcgagataaaagtccccccaaacctgagtctttggataaacctccactcagaaggtagagaggtaggacccagagagcaggccagccttggctacctgagaccctatcccttagaaagaaaagaaaaccacaaacatagactagatcctctgctgcctaagctcttgtgctgtcttgtctgtctgtctctatttgttgagacgggctgatctcaaattctcccatctcagctactggagcaggggggctttagatttgtgctacccactgtcaggatcagaggtttacagtgtagatgcggtcacggttctaatgaagagggagcagggagaagggattggaaagagcagactacaaactcaaacctgtcttcatcctgccattgaactgagtattgtttggttagttgtctttttttttttttaaataggattcccagggtctaattgtataatttaaataactaatgaaacttaaaaacactgtatgtagggctggtgagatggctcaacaggtaaaagcactgactgcccttcccaaagtcctgagttcaaatcccagcaaccacatggtggctcacaaccatccgtaatgagatctgatgccctcttctggtgtgtctgaagacagctacagtgtacttacatataataataaataaatatttagcagagacattcttttttttttttaattaattaatcccatgtggttgctgggaattgaactcaggaccttcggaagagcagtctgcactcttaaccttaaccgctgagccatctctccagccccctaagtagaaacattcttaaaaaaaaaaaaaaaaaaaaaaaaaacactataaaagggagatctatgcaaaatggtgttacccaggggtgacaaagtattccaagaatactttccaaaaattaggtttttcttgttacttagatctatgaagataattgctttgaaagtaaatatagccgggcgtttaatcccagcacttgggaggcagaggcaggcgcatttctgagttcgaggccagcctggtctacaaagtgagctccaggacagccagggctatacagagaaaccctgtctcgaaaaaaccaaaaaaaaagaaaaaaaaaaaaaaaaaagaaagaaagaaagaaagaaagaaagaaagaaagaaagaaagaaagtaagtaaatatattaaatgtaacatttaattatctgggaaaatgatttatttgtttggttggttttgtttttgtttttttggtcagggtttctctgtgtagccctggccatcctggaatttactttgtaaaactgactggcctttttaaaatttatttattatatgtaagtacactgtagctgtcttcagacacaccagaagagggcatcagatctcattacggatggttgtgagccaccatgtggttgctgggatttgaactcaggaccttcggaagagcagtcagtgctcttaaccgctgagccataacccccaccccaccccgtgaactgactggacttaaacccataatctgcctgcttgagtgtcccaagtgctgggactaaaggtatgtaccaccatgccaggctgagaatgtcttatttattaacaagttatctatttatttctaacagcctctcctcgcccttcctctgaagacctgcctcttcaaggcagccctgattcttctaccagtcccaaacaaaagctctcaagtcctgaggctgacaagggccctgaggaggaggagaacaaggtccttgccaggaagcagaagatgcggactgtgttctctcaggcccagctgtgtgcactcaaggacaggtttcagaagcagaagtacctcagcctccagcagatgcaagaactctcctccattctgaacctgagctataagcaggtggggtccttagaagttgctgtaatgtaacacaatgagactgacttgctaatgaatcgaactaacgtctggacgtctctctaactatcctatcctcctatcctatgcgcctgttaaaatcataattatgtgattgattgattgattgattatgtataagtacactatagctgtcttcagatacaccagaagagggcatcagatctcattacggatggttgtgagccaccatgtggttgctgggatttgaactcaggaccttcggaagagcagtcagtgctcttaaccgctgagccatctctccagccccaattatgtgatttatatatttcccagtttgtttcattggttactttatcttctacttcacctcccacacccatccccaaatcagggtctcactgtagccctgactggtctctgtagaccaggctgggagaggttcacctgcctctgtctcctgggtgctggaaataaaggtgtgcctggcttttttcctttcttttcttttttaagattgtttatttttaaattcctttagttcattggtgttttgcctgcatgtgtttgtctttgtgagagtatcagatctcctggactagagttacagacagtcgtgagctgccatgtggccgctgagaattgaacccaggtcctctggaagagcagccagtgctcttaacagaagagccatttcccccagcacctgtctttttcaagaaagagtttcactttacaggcctggctgtcatgtttaaggtcgggctgtagacctgtctgcattctgtatgtcttagcttgttcgaatgtcctgtcactctgcaggttaagacctggtttcaaaaccaaaggatgaagtgcaagcggtggcagaaaaaccagtggttgaagactagcaatggtctgattcaggtaacaagatgttttctctgctttcctttttccccctccatcttaccatcttattttatgtgtctgtgccgtgtgtgtgtgtgtgtgtgtgtgtgtggctgacctatggctgttgggtatggatcccagatttcctgtaagagcagtcagtggctctgcctttgcttcccagtgtcatcctgatccatctatgtccattagtcctgtccctttcccatccctcttcctccacgcactctttcttgtgatctttggttctttgaggcaggctctctctatgtagccctggcagtcagagatctgcctgcctagtctcaggagtgctggggttaacggcctgtgcggccatgctaatcttttcagtatttctgcagtttacatctttagagtccccttttcactcattgcattaatcacctctttcagaagggctcagcaccagtggagtatcccagcatccattgcagctatccccagggctatctggtgaacgcatctggaagcctttccatgtggggcagccagacttggaccaacccaacttggagcagccagacctggaccaacccaacttggaacaaccagacctggaccaacccaacttggagcagccaggcctggaccgctcagtcctggaacggccagccttggaatgctgctccgctccataacttcggggaggactttctgcagccttacgtacagttgcagcaaaacttctctgccagtgatttggaggtgaatttggaagccactagggaaagccatgcgcattttagcaccccacaagccttggaattattcctgaactactctgtgactccaccaggtgaaatatgagacttacgcaacatctgggcttaaagtcagggcaaagccaggttccttccttcttccaaatattttcatattttttttaaagatttatttattcattatatgtaagtacactgtagctgtcttcagacactccagaagagggcgtcagatcttgttacgtatggttgtgagccaccatgtggttgctgggatttgaactcctgaccttcggaagagcagtcgggtgctcttatccactgagccatctcaccagcccctggtttatttttttaattattatttgctttttgtttatcaagacagggtttctctgcatagctctaattgtctttgaactagctctgcagaccagcctggccttgaactcagagatctgcccacttatctttgcctcctgaatgctgggaccaaaggtggcataccaccacacctggcatatatattgtttatttctatttctatttttattggtgccagagcaaacctaggacttagaacatgctgggcaccaactcaacttctgagctctatttacaacttggtgtgttagtgtatttgtcttagttctgaatttgtcctttttttagtgttaactctaggctttggagacagtgaggtgcatatactctctccttcccaagaataagtgcttgaacacccttacccacgcccacccacccatgctagtcttttttcttagaagcgtgggtcttggtatacactgtgtcattttgaggggtgaggtttaaaagtatatacaaagtataacgatatggtggctactctcgaggatgagacagaaggaccaggagtttgagggtagctcagatatgcaataagttcaaggccaacctgtactatgtttaaatagtaagacagcatctcgataaaataataaaactaaagtctcaacaaaataaaagctttcacctattaaggtgcttgcttgtccttggagtcccccaagagtaactgctatgttaatatctgtagaaagatgtttatatttgactgtaccatgatgaaccgatgccagctggactagtttaaacaaaataaaacactaattttacctttagtggtcttatcttttgtccagtggggtcaatatactttttattttggtatgtgaaggggagggtcttaaccgagggtccaggaaaatgggtttcttttggcttaaccggttgggagggttataccacaacagttggaatggcctggtaaccagagcaggaggccagccactcacaatgcatccagtcaagaactggagagcaatgaataagaaatgaatgttttagtgtgggtatgggccctgaggaggccagaagcattcgatgatcccctggagatgaagttacgtgaagccacctgatcacctgatgtggcaggctgcagggaaataagctctagttctctggaagaacaaatatttaactgggagagtggtttttattcctgtgaaataatagaacttgtggagagagcccctgaggtcacacacctagtgcttctgggaaagaggagggaccacagtctcttgtttttgtgtcacactggagattaatctgggacttcctggctccagatggaggctatcttccctgagcataaccccctaacctacgtgggggtgggggaagatgtcaagtgttatcacaggagacttgagaggctgtgtgggttcagaagtgagtttggggttttggagacgatttaaatttgctgaaaagacagaagatacgtatacatctggtgtagttgtgtgtacacttaaggagattaagttaacgtaactcctgatgcattaattatagatgttatagtagttgtatacagtagatttagctaaagcatgatacggaaaaacacagaagaagcaagcgacacctagtaactgccgtgcgtaaatagccatacctgtcaatcacatctttaactcctgaccactcacaggggtacccagcccagcccaagtaggttctgtagctgctcctcagctaaggagagggctgttttggcagtgagaaaaattgtccctcattgtgccacagaggctaggacacattcccttgcaaagcccagactaattccacctagaattctcctcttctgctttctgtcctttggcatcagtggggatggctgctgtgtcagagatgggacatcatcacctccacaaaccctgacgaccgttactgagagaccactttgcttcaactcttagaggtttcgttgataagattctaaaatgtgtggtcttggggatcaaatccagggactcttagaccctgggtaagtgctctactactgaacaacactcagtccttggtgtgagaatccgagctttgattttaccctttttagggtggaagagattccaccaatcacccaggagtggggctagttcaagaggcctccccagctgcagctttcagaggctttttgcttcaggctcccaccaagggacctattcaaatgccttagtcaactgacatctgagtcccaagctgttgcaggaccccagctgacttctttatttaacaaatcctcctttttcccctgctcgggctcctctccctcctctgtctggcaactgtccgctttctctttgtagttccccaccaggacctgttttctctccactgtcaccaggttttctgccgactgggtttattcacaacagaattaaccttttcctttacccagagaagccagcccttggaattcaatggcagagaaggtctgtgcttctgagcttgtagtttgcactgtccaattccgaagacccaggcaaatttgatccagggtgctccgtgttagacctgaggaagaaaccaattccaagactgcctgattaaagcaggttttacttagaggaacagcaggaactggccagcccatgcacatgagtaaaacaagcttggttggattaatttggccacgatggtttgcgttagtggtcttccttctcccaactttgggattgacatttgctcccttgggttcaaaaagaaaaggacaataaaaaccagaaaatcgcccggcgtggtaacgcacgcctttaatcccagccagcacttgggaggcagaggcaagcagatttctgagttcgaggccagcctggtctacaaagtgagttccaggacagccagggctatacagagaaatcctttctcagaaaaacaaaacaaaacaaaacaaaacaaaacaaaaacaaaaacaaaaaacagaaaatcaaggtagatttaactttgtatactcagacataaactggagtaacacccttcttttgggatgagagacagagaaagcaagagtttctaaggaaagaaaagtggggaaagacaggctggcttgtggatgagttttcatttcagtttctctcttatcaggttaacttgatgctcagccagtctatgggggagggagggatgaatccttcagttggattcacacctttcctctttctttctttctttctttctttctttctttctttctttctttctttctttctttctttctttctttttttctttttcatgactgtgtcaagctctgaaggtgacttattatcgtaaattaaaaataaataatttggggctggtgagatggctcagtgggtaagagcacccaactgttcttccgaaggtcctgagttcaaatcccagcaaccacatggtggctcacaaccatctgtaacaagatctgacgccctcttctggagtgtctgaagacagctacagtgtacttacatataataaataaataaatctttaaaaaaaataaataatttaggggctggaggaatggctcagcagttaaaagcaccctctgctcttccagaggaattgcgctcagtcccctgcagccagggcagttggcttcacaccccttgtaactctgggtccaggggttgctgtgcctctctggcttgcttaggcacctgtacacatctacatgtaaccgatactcaaacaactaacacacacacacacacacacacacacacacacacacacacacacacacacacacatacagttaattgctaaataacataaattacaggaaaaactacctacaaaaaaatggtggtaaacacaggctttggagtgtctttgaagctcactaaatatttttattttcctaataaaccatctccagctgtatcactaaaaagggtagctggggcttagggggagatagtaacagagtaaaagagtgattctctctctctctctttcacaatttatttatttattaaagattttatttatttattatatgtaagtacactgtagctgtcttcagatctcattacaggtggttgtgagcccccatgtggtttctgggaattgaactcaggaccttaggaaaagcagtcagtgctcttaaccactgagccatctcctgattgtctcttttaattttgtgtaatattttatagcttttgttgctttaagctgagaaaaacagaaaaggaaggaagaaagaaagaaagaaagaaagaaagaaagaaagaaagaaagaaagaaagaaagaaagaccttaatctttggacaggcatcgtagcagcatctgtagtcccagtagtcccagcgctaaggagacagaagcaggtaagcaaatgccagtgagttcaaggcctacctgctctgtatagtgaatttcaggctaaccaaggctgcatggtgagatactgcctcaaaaacaacaacaataaaacccaagactgggcccacaagatgcctcagtgggtagaagggcttgccacaagcctagcttgttggcttgcatccaatctcttgggtccacaagatggacagagaggaaacactccacagacctgccctctgacctctgcacacaggccatagcatacacctctccctgacttcccaaagtaaataaatgcaatcacaggctggagagatggctcagcagataagagcactaactgctcttctgaaggtcctgagttcaaattccagcaactacatggtggctcacaaccatccgtaatgagatctgatgccctcttctggggtgtctgaagacagttacagtgtacttacatataataataaataaatctttacaaaaaaatgtaatcactaacagaaactcctcaaatacagcaaccatcattaatcaatgtcctgattagctacctggatttcctcttttctccttgttattttcgttgcttttgtctctcctggacctcattgtgtagactaggctggccttaaactcacagagatatgccagcctctgcctgtctagtgctgggattaaaggcctattccaaggccacctaaagtgtctgttaaatcaaccatggatagattaagagaagtatgattgagtctaacgtttagtttttctctctctctttttttttttttttttaggatttgcctaaataaattaatttaattaaagtaaacaaactccccacaaaactggctgagcttaggctgggcctggtgcacattttcatgggaacaaaataatgaatgattaaattcttggactttagatactgtcttgctttttaaaaaatatttacatcatcattattattatcattactgtgtgtgtatatgtgaatgccatctgtatagaggcaacatcagatctctggagctggatttgtaagtgtttgtgagccaatggacttgggtgctgagaactgaacttggacccctctacaagaatcctcttggactctgtagaccaggctgccctcgaactcacagagatcttcctgcctctgcttcctgagtgctaagattagaggcttacactatgaaacctggttgacctggggtctttgtaagcccacactcattctcagtgggcgtgggcatcactctctcctgagcaaatctgtcccttaacccacaggctttatgcttatgttaaaatatcttagatgttgggtggtgttggctcatgcctttaatcccagtacttgggagatagacataggcttgaggccagcctgttctacaaagtgagttccaggacagccagggttacacagagaaaccctgtcttgaaaaccaaaccaaaccaaaccaaccaaccaaccaaacaaacaaacaaaaatttatttctgggcatgtggtgacacatgcttttaaacccagcacttataggaacctgaggcaggagaatctcaggccatacaggcctccatagtgagaccttgtcttaaaacaaaataaacaacaacaagatattatcattaaatgccgatgtacttcaaagagaaaagtaatggggcctcattatattcccttggttggtcctttatgtctgagctcaagggagccttctggctcagtccttccagtagccaagactacaggtgttagccactgtccttggcttacatgaacagttttaaaggtgaaattaacttaagttcctattgcacaattgggtctggaacccagggccccacatatgctctctcgcccctgaaactatacctccaatcctgaaatctggatcctaaaccagactagactgtctggctttgggcagagccacagaaggaatcttaaacttactggaggatagcagctccccctaccggtcccctgtggcattggactcaccagtctctaaattgtcttccagtttaacttcatggctgataagaggaggagagatacccacaaattcctcaactacatgtggtttcaggtggcaatcagtgacaagggtgggctaggaagacatacttggtgaactaaagggtcttctcaagactcagatagagctcaaagaggagaaagggatgaaaagcttaacagaaaaagaatcacagctgggcgtggtggcgcacgcctttaatcccagcactcaggaggtagaggcaggttctgagttcgaggccagcctggtttacaaaatgagtcccaggacaggcagagctatacagagaaaccctgtctcaaaaataaaagaatcaggggctggcgagatggctcagagggtaagagcactgactgctcctccaaaggtcctgagttcaaatcccagcaaccacatggtggcttacaaccatctgtaatgagatctgacgccctcttctggtgtgtctgaagccagctacagtgtacttacatataataataaataaatctttaaaaaaaatcagcgtgactctaactaaggaagtgaaagatctgtatgataaaatctctgaagaaagaaattaaagaagatctcagaagatggaaagatctcccatgctcatagattggcaggatcaacattgtaaaaatggctatcttgccaaaagcaatctacagattcaatgcaatccccatcaaaattccaaatcaattcttcaacgattagaaggagcaatttgcaaattcatctggaataacaaaaaacctaggatagcaaaaactcttctcaaggataaaagaacctctggtggaatcaccatgtctgacctaaagctttactaaagagcaattgtgataaaaactgcatggtactggtatagagacagacaagtagaccaatggaatagaattgaagacccagaaatgaacccacacacctatggtcacttgatcttcgacaagggagctaaaaccatccagtggaagaaagacagcattttctttttttttttttttttggtctttctttttttttttttttttttttttaaacaacattttttttagatttatttatttattataagtaagtacactgtagctgtcttcagacactccagaagagggcgtcagatctcgttacggatggttgtgagccaccatgtggttgctgggatttgaacttcggaccttcggaagagcagtcgggtgctcttacccactgagccatctcaccagcccagaaagacagcattttcaacaattggtgctggcacaactggttgttatcatgtagaagaatgcgaatcgatccatacttatctctttgtactaaggtcaaatctaagtggatcaaggaacttcacataaaaccagagacactgaaacttatagaggagaaagtggggaaaagccttgaagatatgggcacaggggaaaaattcctgaacagaacagcaatggcttgtgctgtaagatcgagaattgacaaatgggacctaatgaaactccaaagtttctgcaaggcaaaagacaccgtcattaagacaaaaagaccaccaacagattgggaaaggatctttacctatcctaaatcagataggggactaatatccaacatatataaagaactcaagaaggtggacttcagaaaatcaaataaccccattaaaaaatggggctcagaactgaacaaagaattctcacctgaggaataccgaatggcagagaagcacctgaaaaaatgttcaacatccttaatcatcagggaaatgcaaatcaaaacaaccctgagattccacctcacaccagtcagaatggctaagatcaaaaattcaggtgacagcagatgctggcgtggatgtggagaaagaggaacactcctccattgttggtgggattgcaggcttgtacaaccactctggaaatcagtctggcggttcctcagaaaattggacatattactaccggaggatccagcaatacctctcctgggcatatatccagaagatgccccaactggtaagaaggacacatgctccactatgttcatagcagccttatttataatagccagaagctggaaagaactcagatgcccctcaacagaggaatggatacagaaaatgtggtacatctacacaatggagtactactcagctattaaaaagaatgaatttatgaaattcctagccaaatggatggacctggagggcatcatcctcagtgaggtaacacactcacaaaggaactcacacaatatgtactcactgataagtggatattagcccaaaacctaggatacccaagatataagatacaatttcctaaacacatgaaactcaagaaaaatgaaaactgaagtgtggacactatgcccctccttagaagtgggaacaaaacacccttggaaggagttacagagacaaagtttggagctgagatgaaaggatggtccatgtagagactgccatatccaaggatccaccccataatcagcatccaaacgctgacaccattgcatacactagcaagattttatcgaaaggacccagatgtagctgtctcttgtgagactatgccggggcctagcaaacacagaagtgtatgctcacaatcagctaatggatggatcacagggctcccaatggaggagctagagaaagtacccaaggagctaaagggatctgcaaccctataggtggatcaacattatgaactaaccagtaccccggagctcttgactctagctgcatatgtatcaaaagatggcctagtcggccatcactggaaagagaggcccattggacttgcaaactttatatgccccagtacaggggaacgccagggccaaaaagggggagtgggtgggtaggggaaggggggtgggtgggtatgggggacttttggtatagcattggaaatgtaaatgagctaaatacctaataaaaaatggagaaggaaaaaaaaatcagtccttaaataaaaaaatcatttttattttctgtgtatgagtattttgcctgcatgccagcatgtatgtatgtgtgtatgtatgtatgtatacatatatgtatatgtgtaaaatacatatgtgtgtatatatatgttatatatatatatacatataaacattatatatatatcatatatataatatacatatgcatacacacatatgatatataaaatactggtcctgtaacctgtaaggccatttgggatatagaaacagaaaaatcaaaggttcaaaggtattctttgctgcatatctaatttgaggccaacttgtgatacataaaatacacacacacacacacacacacacacacacacacacacacgcacacacacatagaaaagaaaagacaagacaagaataatcactaacgagacaaaaagcactcattatccacacacagctgagtccagtggtaaatcttttcactgtgaggaaataagtcactcataatgaaaacagttctgattcagatattaagataaaaatgcaattagcagcaaagatggttaatgtttaagtcccttgggcaaacatcacctctttatagatgttagtgtgactctgttcttccgaaggctcctgcttctggatttatgaggatattagatttcttctgctgcatgtctataatcagcacagtttcccagcaaccacttataagaaggtccacctctctgctaagcaccagaaggctaaactccggaagcctttcttctcttgtgatgattgatcttaaagtaatccctgtatgtttcagtgtgggaacaatgtatacttttatttaaagggccggagaactgcccaaggtcctgactctcaaacattgtgctttgttgcatgatgtgatggctattcctggttgccagcttgattacatctggaatgaaccacaatccagaaatggagggcacattacccaagttttgaagtaggaagtcacaaacctttgacgcagatttaaaaaaaaaaaaaaagatttatttttgtatatgagtactctgtctgcatgtacacctatgcatcagaagaggtcatcagatcctattatagatggttgtgagtcaccataccttgttgggaattgaatttaggaagtgctcttttccactgagacatctctccagtcctgttttttttttttaaacaatccttagatcaatgatgccatttaatacccccaacttggctttttccttcttgctttggctgtaaacgtagaggaactattgttctgttctctttgttttgttagggtctaggagtcacccaaacaccaagctacaaacaccaagctcagttagacagggatggtttattgaatgcataccccaagactgaccaatcagggacacagctcagatgtgggagctggaggctgcagccatgggcactgtccagagtcagtttatatagggaagaagccatcatgagctcctgagcagatacaggggaggctgcagagtggttggcataattccaagtttcttcagtagtttagacataacatatggagaaccttttggggtaccgctcggcaggaatctgacattaggccatgacaaggaagtaaactcaggcaggattctgacattagggcatgataaggaaggaagtttcagcaaggatctaactttaagctataatagggaagtaggttaaggcagcaatttttttgtttgtttgtttggcttggtttgtttctttcaaaacagggcttctctgtgtagccctggctgtcctggaactcactctgtagaccaggctggcctcgaactcagaagtccacctgcctctgcctcccaagtgctggggttaaaggtgtgctccaccactatccggctaaggcagcaactttaatcttagggtggaacagaagaagtaggcttcaggcaagattttgggtttggacaaaggagtgggctcaggtattttggtcattcttctgacaagcccttggaaacaactttcaccggagaaatcacaggactctgcttactgccttgctagttccttaatgtactgctcacccttaatacttgcatataattaaaattgtataaaaggcagattgtttagccctggctgtcctggaactcactttgtagatgaggctggcctcgaactcagaaatccacctgcctttgcctcccaagtgctgcgattaaaggcatgtgccaccacacctggcatcttttttctttttaatcctcactcctgtgctggagaacctgttgattgactgagcagttcaacctgacctctattttgtttggccctgagtgaaggctgtggctgggaaatttcctcaaaacataacaaaactttgagcatagcaggatatatagtcaactcgacctctctctgagccaaactatatctacttttctctagttataaccaagttgcattttgtgtcagcaatatggtatgcctggcatacgtgaagcaaaatggctacagttatgccagggaggtagggcagggatgctgccttcatctatgtttttttgtttttcttaactttttcatttgtttgttctgt

SEQ ID NO: 64 - DNA, 30211 bp, Mus musculus
acagaacaaacaaatgaaaaagttaagaaaaacaaaaaaacatagatgaaggcagcatccctgccctacctccctggcataactgtagccattttgcttcacgtatgccaggcataccatattgctgacacaaaatgcaacttggttataactagagaaaagtagatatagtttggctcagagagaggtcgagttgactatatatcctgctatgctcaaagttttgttatgttttgaggaaatttcccagccacagccttcactcagggccaaacaaaatagaggtcaggttgaactgctcagtcaatcaacaggttctccagcacaggagtgaggattaaaaagaaaaaagatgccaggtgtggtggcacatgcctttaatcgcagcacttgggaggcaaaggcaggtggatttctgagttcgaggccagcctcatctacaaagtgagttccaggacagccagggctaaacaatctgccttttatacaattttaattatatgcaagtattaagggtgagcagtacattaaggaactagcaaggcagtaagcagagtcctgtgatttctccggtgaaagttgtttccaagggcttgtcagaagaatgaccaaaatacctgagcccactcctttgtccaaacccaaaatcttgcctgaagcctacttcttctgttccaccctaagattaaagttgctgccttagccggatagtggtggagcacacctttaaccccagcacttgggaggcagaggcaggtggacttctgagttcgaggccagcctggtctacagagtgagttccaggacagccagggctacacagagaagccctgttttgaaagaaacaaaccaagccaaacaaacaaacaaaaaaattgctgccttaacctacttccctattatagcttaaagttagatccttgctgaaacttccttccttatcatgccctaatgtcagaatcctgcctgagtttacttccttgtcatggcctaatgtcagattcctgccgagcggtaccccaaaaggttctccatatgttatgtctaaactactgaagaaacttggaattatgccaaccactctgcagcctcccctgtatctgctcaggagctcatgatggcttcttccctatataaactgactctggacagtgcccatggctgcagcctccagctcccacatctgagctgtgtccctgattggtcagtcttggggtatgcattcaataaaccatccctgtctaactgagcttggtgtttgtagcttggtgtttgggtgactcctagaccctaacaaaacaaagagaacagaacaatagttcctctacgtttacagccaaagcaagaaggaaaaagccaagttgggggtattaaatggcatcattgatctaaggattgtttaaaaaaaaaaaacaggactggagagatgtctcagtggaaaagagcacttcctaaattcaattcccaacaaggtatggtgactcacaaccatctataataggatctgatgacctcttctgatgcataggtgtacatgcagacagagtactcatatacaaaaataaatctttttttttttttttaaatctgcgtcaaaggtttgtgacttcctacttcaaaacttgggtaatgtgccctccatttctggattgtggttcattccagatgtaatcaagctggcaaccaggaatagccatcacatcatgcaacaaagcacaatgtttgagagtcaggaccttgggcagttctccggccctttaaataaaagtatacattgttcccacactgaaacatacagggattactttaagatcaatcatcacaagagaagaaaggcttccggagtttagccttctggtgcttagcagagaggtggaccttcttataagtggttgctgggaaactgtgctgattatagacatgcagcagaagaaatctaatatcctcataaatccagaagcaggagccttcggaagaacagagtcacactaacatctataaagaggtgatgtttgcccaagggacttaaacattaaccatctttgctgctaattgcatttttatcttaatatctgaatcagaactgttttcattatgagtgacttatttcctcacagtgaaaagatttaccactggactcagctgtgtgtggataatgagtgctttttgtctcgttagtgattattcttgtcttgtcttttcttttctatgtgtgtgtgcgtgtgtgtgtgtgtgtgtgtgtgtgtgtgtgtgtgtgtgtattttatgtatcacaagttggcctcaaattagatatgcagcaaagaatacctttgaacctttgatttttctgtttctatatcccaaatggccttacaggttacaggaccagtattttatatatcatatgtgtgtatgcatatgtatattatatatatgatatatatataatgtttatatgtatatatatatataacatatatatacacacatatgtattttacacatatacatatatgtatacatacatacatacacacatacatacatgctggcatgcaggcaaaatactcatacacagaaaataaaaatgatttttttatttaaggactgatttttttttccttctccattttttattaggtatttagctcatttacatttccaatgctataccaaaagtcccccatacccacccaccccccttcccctacccacccactccccctttttggccctggcgttcccctgtactggggcatataaagtttgcaagtccaatgggcctctctttccagtgatggccgactaggccatcttttgatacatatgcagctagagtcaagagctccggggtactggttagttcataatgttgatccacctatagggttgcagatccctttagctccttgggtactttctctagctcctccattgggagccctgtgatccatccattagctgattgtgagcatacacttctgtgtttgctaggccccggcatagtctcacaagagacagctacatctgggtcctttcgataaaatcttgctagtgtatgcaatggtgtcagcgtttggatgctgattatggggtggatccttggatatggcagtctctacatggaccatcctttcatctcagctccaaactttgtctctgtaactccttccaagggtgttttgttcccacttctaaggaggggcatagtgtccacacttcagttttcatttttcttgagtttcatgtgtttaggaaattgtatcttatatcttgggtatcctaggttttgggctaatatccacttatcagtgagtacatattgtgtgagttcctttgtgagtgtgttacctcactgaggatgatgccctccaggtccatccatttggctaggaatttcataaattcattctttttaatagctgagtagtactccattgtgtagatgtaccacattttctgtatccattcctctgttgaggggcatctgagttctttccagcttctggctattataaataaggctgctatgaacatagtggagcatgtgtccttcttaccagttggggcatcttctggatatatgcccaggagaggtattgctggatcctccggtagtaatatgtccaattttctgaggaaccgccagactgatttccagagtggttgtacaagcctgcaatcccaccaacaatggaggagtgttcctctttctccacatccacgccagcatctgctgtcacctgaatttttgatcttagccattctgactggtgtgaggtggaatctcagggttgttttgatttgcatttccctgatgattaaggatgttgaacattttttcaggtgcttctctgccattcggtattcctcaggtgagaattctttgttcagttctgagccccattttttaatggggttatttgattttctgaagtccaccttcttgagttctttatatatgttggatattagtcccctatctgatttaggataggtaaagatcctttcccaatctgttggtggtctttttgtcttaatgacggtgtcttttgccttgcagaaactttggagtttcattaggtcccatttgtcaattctcgatcttacagcacaagccattgctgttctgttcaggaatttttcccctgtgcccatatcttcaaggcttttccccactttctcctctataagtttcagtgtctctggttttatgtgaagttccttgatccacttagatttgaccttagtacaaagagataagtatggatcgattcgcattcttctacatgataacaaccagttgtgccagcaccaattgttgaaaatgctgtctttctgggctggtgagatggctcagtgggtaagagcacccgactgctcttccgaaggtccgaagttcaaatcccagcaaccacatggtggctcacaaccatccgtaacgagatctgacgccctcttctggagtgtctgaagacagctacagtgtacttacttataataaataaataaatctaaaaaaaatgttgtttaaaaaaaaaaaaaaaaaaaaaaagaaagaccaaaaaaaaaaaaaaaaagaaaatgctgtctttcttccactggatggttttagctcccttgtcgaagatcaagtgaccataggtgtgtgggttcatttctgggtcttcaattctattccattggtctacttgtctgtctctataccagtaccatgcagtttttatcacaattgctctttagtaaagctttaggtcagacatggtgattccaccagaggttcttttatccttgagaagagtttttgctatcctaggttttttgttattccagatgaatttgcaaattgctccttctaatcgttgaagaattgatttggaattttgatggggattgcattgaatctgtagattgcttttggcaagatagccatttttacaatgttgatcctgccaatctatgagcatgggagatctttccatcttctgagatcttctttaatttctttcttcagagattttatcatacagatctttcacttccttagttagagtcacgctgattttttttaaagatttatttattattatatgtaagtacactgtagctggcttcagacacaccagaagagggcgtcagatctcattacagatggttgtaagccaccatgtggttgctgggatttgaactcaggacctttggaggagcagtcagtgctcttaccctctgagccatctcgccagcccctgattcttttatttttgagacagggtttctctgtatagctctgcctgtcctgggactcattttgtaaaccaggctggcctcgaactcagaacctgcctctacctcctgagtgctgggattaaaggcgtgcgccaccacgcccagctgtgattctttttctgttaagcttttcatccctttctcctctttgagctctatctgagtcttgagaagaccctttagttcaccaagtatgtcttcctagcccacccttgtcactgattgccacctgaaaccacatgtagttgaggaatttgtgggtatctctcctcctcttatcagccatgaagttaaactggaagacaatttagagactggtgagtccaatgccacaggggaccggtagggggagctgctatcctccagtaagtttaagattccttctgtggctctgcccaaagccagacagtctagtctggtttaggatccagatttcaggattggaggtatagtttcaggggcgagagagcatatgtggggccctgggttccagacccaattgtgcaataggaacttaagttaatttcacctttaaaactgttcatgtaagccaaggacagtggctaacacctgtagtcttggctactggaaggactgagccagaaggctcccttgagctcagacataaaggaccaaccaagggaatataatgaggccccattacttttctctttgaagtacatcggcatttaatgataatatcttgttgttgtttattttgttttaagacaaggtctcactatggaggcctgtatggcctgagattctcctgcctcaggttcctataagtgctgggtttaaaagcatgtgtcaccacatgcccagaaataaatttttgtttgtttgtttggttggttggttggtttggtttggtttggttttcaagacagggtttctctgtgtaaccctggctgtcctggaactcactttgtagaacaggctggcctcaagcctatgtctatctcccaagtactgggattaaaggcatgagccaacaccacccaacatctaagatattttaacataagcataaagcctgtgggttaagggacagatttgctcaggagagagtgatgcccacgcccactgagaatgagtgtgggcttacaaagaccccaggtcaaccaggtttcatagtgtaagcctctaatcttagcactcaggaagcagaggcaggaagatctctgtgagttcgagggcagcctggtctacagagtccaagaggattcttgtagaggggtccaagttcagttctcagcacccaagtccattggctcacaaacacttacaaatccagctccagagatctgatgttgcctctatacagatggcattcacatatacacacacagtaatgataataataatgatgatgtaaatattttttaaaaagcaagacagtatctaaagtccaagaatttaatcattcattattttgttcccatgaaaatgtgcaccaggcccagcctaagctcagccagttttgtggggagtttgtttactttaattaaattaatttatttaggcaaatcctaaaaaaaaaaaaaaaaagagagagagaaaaactaaacgttagactcaatcatacttctcttaatctatccatggttgatttaacagacactttaggtggccttggaataggcctttaatcccagcactagacaggcagaggctggcatatctctgtgagtttaaggccagcctagtctacacaatgaggtccaggagagacaaaagcaacgaaaataacaaggagaaaagaggaaatccaggtagctaatcaggacattgattaatgatggttgctgtatttgaggagtttctgttagtgattacatttttttgtaaagatttatttattattatatgtaagtacactgtaactgtcttcagacaccccagaagagggcatcagatctcattacggatggttgtgagccaccatgtagttgctggaatttgaactcaggaccttcagaagagcagttagtgctcttatctgctgagccatctctccagcctgtgattgcatttatttactttgggaagtcagggagaggtgtatgctatggcctgtgtgcagaggtcagagggcaggtctgtggagtgtttcctctctgtccatcttgtggacccaagagattggatgcaagccaacaagctaggcttgtggcaagcccttctacccactgaggcatcttgtgggcccagtcttgggttttattgttgttgtttttgaggcagtatctcaccatgcagccttggttagcctgaaattcactatacagagcaggtaggccttgaactcactggcatttgcttacctgcttctgtctccttagcgctgggactactgggactacagatgctgctacgatgcctgtccaaagattaaggtctttctttctttctttctttctttctttctttctttctttctttctttctttctttcttccttccttttctgtttttctcagcttaaagcaacaaaagctataaaatattacacaaaattaaaagagacaatcaggagatggctcagtggttaagagcactgactgcttttcctaaggtcctgagttcaattcccagaaaccacatgggggctcacaaccacctgtaatgagatctgaagacagctacagtgtacttacatataataaataaataaaatctttaataaataaataaattgtgaaagagagagagagagaatcactcttttactctgttactatctccccctaagccccagctaccctttttagtgatacagctggagatggtttattaggaaaataaaaatatttagtgagcttcaaagacactccaaagcctgtgtttaccaccatttttttgtaggtagtttttcctgtaatttatgttatttagcaattaactgtatgtgtgtgtgtgtgtgtgtgtgtgtgtgtgtgtgtgtgtgtgtgtgtgtgtgtgttagttgtttgagtatcggttacatgtagatgtgtacaggtgcctaagcaagccagagaggcacagcaacccctggacccagagttacaaggggtgtgaagccaactgccctggctgcaggggactgagcgcaattcctctggaagagcagagggtgcttttaactgctgagccattcctccagcccctaaattatttattttttttaaagatttatttatttattatatgtaagtacactgtagctgtcttcagacactccagaagagggcgtcagatcttgttacagatggttgtgagccaccatgtggttgctgggatttgaactcaggaccttcggaagaacagttgggtgctcttacccactgagccatctcaccagccccaaattatttatttttaatttacgataataagtcaccttcagagcttgacacagtcatgaaaaagaaaaaaagaaagaaagaaagaaagaaagaaagaaagaaagaaagaaagaaagaaagaaagaaagaaagaaagaggaaaggtgtgaatccaactgaaggattcatccctccctcccccatagactggctgagcatcaagttaacctgataagagagaaactgaaatgaaaactcatccacaagccagcctgtctttccccacttttctttccttagaaactcttgctttctctgtctctcatcccaaaagaagggtgttactccagtttatgtctgagtatacaaagttaaatctaccttgattttctgttttttgtttttgtttttgttttgttttgttttgttttgttttgtttttctgagaaaggatttctctgtatagccctggctgtcctggaactcactttgtagaccaggctggcctcgaactcagaaatctgcttgcctctgcctcccaagtgctggctgggattaaaggcgtgcgttaccacgccgggcgattttctggtttttattgtccttttctttttgaacccaagggagcaaatgtcaatcccaaagttgggagaaggaagaccactaacgcaaaccatcgtggccaaattaatccaaccaagcttgttttactcatgtgcatgggctggccagttcctgctgttcctctaagtaaaacctgctttaatcaggcagtcttggaattggtttcttcctcaggtctaacacggagcaccctggatcaaatttgcctgggtcttcggaattggacagtgcaaactacaagctcagaagcacagaccttctctgccattgaattccaagggctggcttctctgggtaaaggaaaaggttaattctgttgtgaataaacccagtcggcagaaaacctggtgacagtggagagaaaacaggtcctggtggggaactacaaagagaaagcggacagttgccagacagaggagggagaggagcccgagcaggggaaaaaggaggatttgttaaataaagaagtcagctggggtcctgcaacagcttgggactcagatgtcagttgactaaggcatttgaataggtcccttggtgggagcctgaagcaaaaagcctctgaaagctgcagctggggaggcctcttgaactagccccactcctgggtgattggtggaatctcttccaccctaaaaagggtaaaatcaaagctcggattctcacaccaaggactgagtgttgttcagtagtagagcacttacccagggtctaagagtccctggatttgatccccaagaccacacattttagaatcttatcaacgaaacctctaagagttgaagcaaagtggtctctcagtaacggtcgtcagggtttgtggaggtgatgatgtcccatctctgacacagcagccatccccactgatgccaaaggacagaaagcagaagaggagaattctaggtggaattagtctgggctttgcaagggaatgtgtcctagcctctgtggcacaatgagggacaatttttctcactgccaaaacagccctctccttagctgaggagcagctacagaacctacttgggctgggctgggtacccctgtgagtggtcaggagttaaagatgtgattgacaggtatggctatttacgcacggcagttactaggtgtcgcttgcttcttctgtgtttttccgtatcatgctttagctaaatctactgtatacaactactataacatctataattaatgcatcaggagttacgttaacttaatctccttaagtgtacacacaactacaccagatgtatacgtatcttctgtcttttcagcaaatttaaatcgtctccaaaaccccaaactcacttctgaacccacacagcctctcaagtctcctgtgataacacttgacatcttcccccacccccacgtaggttagggggttatgctcagggaagatagcctccatctggagccaggaagtcccagattaatctccagtgtgacacaaaaacaagagactgtggtccctcctctttcccagaagcactaggtgtgtgacctcaggggctctctccacaagttctattatttcacaggaataaaaaccactctcccagttaaatatttgttcttccagagaactagagcttatttccctgcagcctgccacatcaggtgatcaggtggcttcacgtaacttcatctccaggggatcatcgaatgcttctggcctcctcagggcccatacccacactaaaacattcatttcttattcattgctctccagttcttgactggatgcattgtgagtggctggcctcctgctctggttaccaggccattccaactgttgtggtataaccctcccaaccggttaagccaaaagaaacccattttcctggaccctcggttaagaccctccccttcacataccaaaataaaaagtatattgaccccactggacaaaagataagaccactaaaggtaaaattagtgttttattttgtttaaactagtccagctggcatcggttcatcatggtacagtcaaatataaacatctttctacagatattaacatagcagttactcttgggggactccaaggacaagcaagcaccttaataggtgaaagcttttattttgttgagactttagttttattattttatcgagatgctgtcttactatttaaacatagtacaggttggccttgaacttattgcatatctgagctaccctcaaactcctggtccttctgtctcatcctcgagagtagccaccatatcgttatactttgtatatacttttaaacctcacccctcaaaatgacacagtgtataccaagacccacgcttctaagaaaaaagactagcatgggtgggtgggcgtgggtaagggtgttcaagcacttattcttgggaaggagagagtatatgcacctcactgtctccaaagcctagagttaacactaaaaaaaggacaaattcagaactaagacaaatacactaacacaccaagttgtaaatagagctcagaagttgagttggtgcccagcatgttctaagtcctaggtttgctctggcaccaataaaaatagaaatagaaataaacaatatatatgccaggtgtggtggtatgccacctttggtcccagcattcaggaggcaaagataagtgggcagatctctgagttcaaggccaggctggtctgcagagctagttcaaagacaattagagctatgcagagaaaccctgtcttgataaacaaaaagcaaataataattaaaaaaataaaccaggggctggtgagatggctcagtggataagagcacccgactgctcttccgaaggtcaggagttcaaatcccagcaaccacatggtggctcacaaccatacgtaacaagatctgacgccctcttctggagtgtctgaagacagctacagtgtacttacatataatgaataaataaatctttaaaaaaaatatgaaaatatttggaagaaggaaggaacctggctttgccctgactttaagcccagatgttgcgtaagtctcatatttcacctggtggagtcacagagtagttcaggaataattccaaggcttgtggggtgctaaaatgcgcatggctttccctagtggcttccaaattcacctccaaatcactggcagagaagttttgctgcaactgtacgtaaggctgcagaaagtcctccccgaagttatggagcggagcagcattccaaggctggccgttccaggactgagcggtccaggcctggctgctccaagttgggttggtccaggtctggttgttccaagttgggttggtccaggtctggctgctccaagttgggttggtccaagtctggctgccccacatggaaaggcttccagatgcgttcaccagatagccctggggatagctgcaatggatgctgggatactccactggtgctgagcccttctgaaagaggtgattaatgcaatgagtgaaaaggggactctaaagatgtaaactgcagaaatactgaaaagattagcatggccgcacaggccgttaaccccagcactcctgagactaggcaggcagatctctgactgccagggctacatagagagagcctgcctcaaagaaccaaagatcacaagaaagagtgcgtggaggaagagggatgggaaagggacaggactaatggacatagatggatcaggatgacactgggaagcaaaggcagagccactgactgctcttacaggaaatctgggatccatacccaacagccataggtcagccacacacacacacacacacacacacacggcacagacacataaaataagatggtaagatggagggggaaaaaggaaagcagagaaaacatcttgttacctgaatcagaccattgctagtcttcaaccactggtttttctgccaccgcttgcacttcatcctttggttttgaaaccaggtcttaacctgcagagtgacaggacattcgaacaagctaagacatacagaatgcagacaggtctacagcccgaccttaaacatgacagccaggcctgtaaagtgaaactctttcttgaaaaagacaggtgctgggggaaatggctcttctgttaagagcactggctgctcttccagaggacctgggttcaattctcagcggccacatggcagctcacgactgtctgtaactctagtccaggagatctgatactctcacaaagacaaacacatgcaggcaaaacaccaatgaactaaaggaatttaaaaataaacaatcttaaaaaagaaaagaaaggaaaaaagccaggcacacctttatttccagcacccaggagacagaggcaggtgaacctctcccagcctggtctacagagaccagtcagggctacagtgagaccctgatttggggatgggtgtgggaggtgaagtagaagataaagtaaccaatgaaacaaactgggaaatatataaatcacataattggggctggagagatggctcagcggttaagagcactgactgctcttccgaaggtcctgagttcaaatcccagcaaccacatggtggctcacaaccatccgtaatgagatctgatgccctcttctggtgtatctgaagacagctatagtgtacttatacataatcaatcaatcaatcaatcacataattatgattttaacaggcgcataggataggaggataggatagttagagagacgtccagacgttagttcgattcattagcaagtcagtctcattgtgttacattacagcaacttctaaggaccccacctgcttatagctcaggttcagaatggaggagagttcttgcatctgctggaggctgaggtacttctgcttctgaaacctgtccttgagtgcacacagctgggcctgagagaacacagtccgcatcttctgcttcctggcaaggaccttgttctcctcctcctcagggcccttgtcagcctcaggacttgagagcttttgtttgggactggtagaagaatcagggctgccttgaagaggcaggtcttcagaggaagggcgaggagaggctgttagaaataaatagataacttgttaataaataagacattctcagcctggcatggtggtacatacctttagtcccagcacttgggacactcaagcaggcagattatgggtttaagtccagtcagttcacggggtggggtgggggttatggctcagcggttaagagcactgactgctcttccgaaggtcctgagttcaaatcccagcaaccacatggtggctcacaaccatccgtaatgagatctgatgccctcttctggtgtgtctgaagacagctacagtgtacttacatataataaataaattttaaaaaggccagtcagttttacaaagtaaattccaggatggccagggctacacagagaaaccctgaccaaaaaaacaaaaacaaaaccaaccaaacaaataaatcattttcccagataattaaatgttacatttaatatatttacttactttctttctttctttctttctttctttctttctttctttctttcttttttttttttttttttctttttttttggttttttcgagacagggtttctctgtatagccctggctgtcctggagctcactttgtagaccaggctggcctcgaactcagaaatgcgcctgcctctgcctcccaagtgctgggattaaacgcccggctatatttactttcaaagcaattatcttcatagatctaagtaacaagaaaaacctaatttttggaaagtattcttggaatactttgtcacccctgggtaacaccattttgcatagatctcccttttatagtgttttttttttttttttttttttttttaagaatgtttctacttagggggctggagagatggctcagcggttaaggttaagagtgcagactgctcttccgaaggtcctgagttcaattcccagcaaccacatgggattaattaattaaaaaaaaaaaagaatgtctctgctaaatatttatttattattatatgtaagtacactgtagctgtcttcagacacaccagaagagggcatcagatctcattacggatggttgtgagccaccatgtggttgctgggatttgaactcaggactttgggaagggcagtcagtgcttttacctgttgagccatctcaccagccctacatacagtgtttttaagtttcattagttatttaaattatacaattagaccctgggaatcctatttaaaaaaaaaaaaagacaactaaccaaacaatactcagttcaatggcaggatgaagacaggtttgagtttgtagtctgctctttccaatcccttctccctgctccctcttcattagaaccgtgaccgcatctacactgtaaacctctgatcctgacagtgggtagcacaaatctaaagcccccctgctccagtagctgagatgggagaatttgagatcagcccgtctcaacaaatagagacagacagacaagacagcacaagagcttaggcagcagaggatctagtctatgtttgtggttttcttttctttctaagggatagggtctcaggtagccaaggctggcctgctctctgggtcctacctctctaccttctgagtggaggtttatccaaagactcaggtttggggggacttttatctcgcctagatttttgcatggtgctgggtgaatagaatcctgttgggacctttcatactctactaccactgagtcagctatatctatacatacatacatatatacatacatacatacatacatacatacacacacacacacacacacacacattaacatttagggatgaactaatatttatgaacaaaaaatgtcatgacgaaatccattatactgaatgttatctaaggaaatttccagggttaaatcacttgttgttaggaatgcacagtcctgagtttagacaccccccacccccaatttttttttaaaggtatattttaaaatgatcccactggggctggtgagatggctcagtgggtaagagcatccaacggctcagtgggtaagagcacccaactgctcttccgaaggtctggagttcaaatcccagcaaccatatggtggctcacaaccatctgtaacaagatctgacgccctcttctggagtgtctgaagacaactacagtgtacttacatataataaataaatctttaaaaaaataaataaataaaaatatcccaccatcttttctgctagtacaagagcagccagtcagagggtccagttaattattaattactagagtaaaatttcggttaaccaaattcgtttctcttatccttgaccctctagctcttcggttagcttttttgtttttttccagggccttcagcaagagacaagtgctcctccaccaagctttgccccaacatttcctagatccagcagcaggtagaagacacctcctacactgaagacatctgtgctccacgctgatggcaatgctgaggttagcctgcagtctagcaaataagtagacagccctgaaagcagcttctaaatggaaaattatgccatctgctggcactaggggcacgcactacaaacacacatgctctacacacatgctctaaaaacacacatcacttacaaaggctatccccacccgttcattcctaacccagcacttttcccacctccaaaatcaaaaattgagggaggcagaggcagaggcaggcggatttctgagtttgaggccagcctggtctacaaagtgagttccaggacagccagggctacacagagaaaccctgtctcgaaaaaacaaaaaaaaacaaacaaaaaaaaaatcaaaaattgaacccataaatcagaaaaatcaagatgacagacattaacttaaaagctcagaaaaaaggggacacacacttcctagcgctccacacacccaagcaccgctgcacacacccgagcatcactgcacacacccgagcatcgctgcacacacccgagcatcacaacacgcacctgagcaccgtggcacacacagcctagcagcctcttggttctaccatttacaagcctgagtactgggctgactctgtacagacaatgagcttcagaccttggctccagatgctagctataagaatgaatgacttaaactgtgtacacttgtttggggtttggaaggagcactgagctcacaaacccagaactgctaagtgacatccatattcccaaaggttgagagaaatgctaactgcttctgctggagaaaacggccatttgggcaaattgcaaactaactgtataacctcaccaaaaaaatggggtgctcattccaagctaggatgttaggtctccctgctactgaagacaccactcactgcccccgaacatattccaaagagcccaaatatttaggttctcaaatacacacaagagccttatattgctccgtcctgtgtcccggatctctatttcagactagaaggccaacgtatcaccggtcaaactcagaggggtttccagaagagtgataaggacacccgcttatgttaatgactactacggttcataaagaagcaataacccttcagcccgttttttctactcttaccctaatttactgggttcttcggggactgaattccttaccagcctctgtgcagagcatctcagtagcagacccttgtaagcaagaatagttctcgggatgaaaaactgcaggcattgatgaggcgttcccagaattcgatgcttcctcagaactaggcaaactgtggggaccaggaagacccacactcatgtcagtgtgatggcgagggaagggatttctgaaaaggttttaggcaacaaccaaaaaactcagtgtctagaaggaaagatcatagaaagaagagttaaatgtctaatgcaaaattatcaagaagtcagaaggaagtgagccgcagccttcccacagaaagagcaagacaccaaccaaatcagcctatctgaaggccaacggctcaaggcgatagatttaaagggtaggtcctgctcctcccccctcaagcctcctaccctacccaccccctattctcccaggcacccaggcggcacccacgccccaccagccctgtgaattcacagttaatcccacctgcagggtccaccatggacattgtaatgcaaaagaagctgtaaggtgacccagactgggagggagggaaagcttagggggcatcctctgatctaaagacatcccccccccccaaaaagaggctttacctcatttcactttattcatcttttaaccacggctgcacctccagaccctggcgatctctagtgggaagtttcaggtcaagtgggggatctgagtttcctcttccattctttctacagacatgaaagagtcagaccttgctgccaaagtctctgtttatacacggctttcctttcagcactcagcgtttcttgcttgctcttcacattgggaaacctggggaaatcttccctccaaaagtgcggctttttaacgcaagtctgaagaaagagcctgtgtcctgcttaagactcgggctaccttagtaagttggtccatgctttggttttgagacaggtttttctctgttgccttgagtagcttatactcagtatgtagaccaggcttgtctaccaccatgcccaatttaaggagtgtttaaattaatgtagaggccttctgttttgttttgagacaagttctcactgtaaaacctaggctggcttcagacttactgcaatcccaagtgcctcagccgtctaagcaatggaagaagaaatttatcgtatttcaaatttggttttggtcatttctttgagatagagtttcacgtacccgagactggcctcacagtctattgctctagctggtcccaaactcctgatcttcctatttccacatcccaagttcaaagtttgccgatcagtccttgtgctcacagataagtgagtgaaagcactctaacccagcttaagtcggcttctgtgtataagcagagagggaagggccgtcctctcgtaacatctcccatgtgaagactctaccacagtgagtattggtaggagtggttcttcctgggttttattctacaaaagactaagcttgaatggctctttttggtttggggttttttttggggggggcggggcggagcgcgggggttggtggtgtttgtttgagttttgttattattctaggcagggtttctctgtgtagccctggctgtcctgggacttgctctgtagaacaagctggcttccaactcacagagagccaactgcctctgcctcccatgtgctggcattaaaggcctgtatgtgccaccactgccgccatggccaccacagccaccatactactactgtctccactgccaccactgtctccactgctaccactgcaccacaccatcattgccaccactgtgccatgccaccaatgccaccactgtgccacagcaccactgccaccatcgtcaccactgtctgcctctgctgccacccctgccaccattaccaccacttcccttcttccactgccaccaatgctaccaatactaccactgtcagcactgccaccaagccaccattgttaccactgcctctgcggccaccacggctgccactaccaccgttgctaccactgtgccaccatggctaccactgctgccccactaccattgccactaaagcctgcaatgcctccactgccaccactgccacctctgagccacaccaaccctgccaccaatgccatcactgccactacgaccaccactgcctcaactgctgccacactatcactgtctgtcaccactgccaccaaggcctccactgctgccaagaccaccacggccactactgcctccattgcccagcctgactgaacctctttttttttttttttttttttgagatttttctctttattctgatgaacagtgtgatataattaaaccagccatttccttttttgtttgtttgtttggttggttggttggttggtttttcgagacagggtttctctgtgtagctctggctgtcctggaactcactctgtagaccaggctggccttgaactcagaaatctgcctgcctctgcctcctgagtgctgggattaaaggcgtgtgccaccacacccggctaaagcagccatttcttgtttcaattagacacttttagacataaactaatgtggctggttgacctctgtccacatccagctggagaaacgcagagcgcggcatcttgccctcctccctcgaaggcttcagacccactgtttacaccactctctctctctctctcttccaattttgtttcttttttcttctttctttagatttcctttatttttgtgtgcattggtgttttgcctgcatggattttggtgtgagagtgcccgccgtggtggcacacgcctttaatcccagcacttaggcggcagaggcaggtggatttctgagttcgaggccagcctggtctacaaagtgagttccaggacagccagggctacacagagaaaccctgtctcgaaaaacaacaacaacaaaaagatgaaaaagagagtgccaggtcccctggaactgaaattacagatagttatgagctgtcatgtaggtactggaaattgaaccctggtcctctggaagagcaaccagagctcttaactgctgagctatctctccagcccctctagcccatctcttaagccctcctctgacaactttgaggtatgaggaaactttaaaaacaaaaaaaaacaatacttttagaattgggttccagtgattccattttcagagatatttttgcatataaattatatatatgaagctaatgctatatgaaaccctgtctcgaaaaaccaaaaaaaatatgtatatagtaacatattctatagaacacgtatataatttgtgatataataaataatgtaaatatatcatttacttatttatttatttacttatttattttgagacagagtttctctatgtagccccggctatcctggaattagatctgtaggccaggctggcctcgaactcacagagacccacctgcttctgtctctcagaatgctggggttaaagggatggccaccactacttggtgagatatgaaggttttaaacaataaacagatggactaaagcccctaagtagaaatcatagaacaaaagaataactgttctaccttctgcttattcgctggactaatacaaatatgtccctgatgtgattcttgtcattaggcaaagaatgaataggccgttcaaaatatcaaggtttatgcagcgcttagtaaaaaatattctttgtaagtctgctccagagggtagacagtccaggcaggcatcaccaaagtcattttaagacttgcagccttcagtgaaaagtctttcacgtggtttgcttaaacgaagaatggtatgttgagttaagtactcggactaaccaagggctacagtattatctgtagccaatttttaattttgagtcaggacctcactatgtcagatctggttagcctggaactcactgtgtagacaaggctggctgctgtgtttctttccctctctcccaagtgctgggacagagaaagcagtcttcacacttttttttttttaaagacagagtctcagtgtgtattcctggctagccaactcagtatgcagaccaacctggctttgaactcccagggatccctctacttctgtctgccttaaggggatcaaagatgtggcaccttcaccgtggtttggaatccttttcttcaattttatttgttagagctaaggcatgcctgaggaagtcagaggacaatgtttggaacttggttctcttgcacttatacaagtgtgttttacccgctgagcattctgccactcacacctcaggagaggtaggggcatcacagggagttgaaagccagcctgatctccagactgcctaaagaaacagaaacaaaacaaacacacacacacacaaagaaaatacaagcctaaaatctaaagcacggggcccatcgctaacatattgaaggacaataggcattctgtgatggctcttgtctccccattcctaagcccaacattcgaggattctaaggtcctttcccaccctctactccaatctcactaaggaaagaaatgcttactaatcccagttacatacttttgccacactcaagtttttgaaataaccacgtagtctctctctctctctctctctctctctctctctctctctctctctctctctctctctctctctctctctctctcgggggaggtgggggcggggatacaaagcccagcaaactaccttcactaggccaaagggttcctctccctcagctaccagctctgcccttacaaaaatttactcctgtttataatgaaaaaaaaaagatgccaccagggaaccctaggtgtgtcccaagggcgacgtaattttggtaagcttgcctttgtcttctaggaaccgtccgggagaggaattgtaagagctgggaggagtccagagaactggctggttcaagctctaagccggttctcatttcaaattagaaacaaaatgcatgcgagtcctctaaaggaggaaacttgcctctgggtccacggagtcaaggccaccatagccttaagtttaccccaagttctacaaaggtttggtacagggcgcacagctccgggtcaaaggagtctgcttaggagacggcgatggatccctccccaacccccattcctgtcctgcctctttagtgtctttgagagtctctggtgaaagatccgagcgaagaggtggctggtagccaaaaggcaggcttgctacattccttatccagggaagcggtttgaatagggaggagggcgtctagatgccttagacctggttggaactagctgtgtgggtggggaaaggaatgttaagtgggtcctctgggtggttagcagtcaaaacaagagtaaaagatgaacttgtatggttagtgctgaaaaggagcggggactagggacaggtgggggaggggtgtgaatcgctagccttggagtcctccgggagagccgcgggacaaacctgggaaggaaattccagcaggttaacaattggagagaattacagactccaacacttctgggtttttgtttttgtttttgagacaaggtttctctatgccctggctgtcctggaactcacgctgtagaccaggctggcctcgaactactggagacccgtctgcctctgactctggaagactgggattaaaggctttgtgctgctttacctgactacgcctctgtttttaaaaactcagaaaagcataacatgaacctgagcgtgtagttcagttggcacagtactcgctttgcatgaataaaggacatgcgttcagtctccagcactacacagaacatagtatcgagtctgaaatcccagcacgcaggagacaagatcaagtctccactgagagctcaggcccacaaagcagttggagcttcattcttcctgaggccagatccctccctctctcccccatctcacttagggaaaaagaaaatgtattcccacaagttgttctctgtgtgcacccacacacagccaggcagtataataaatagattttcaagaaaaagcatacctagagtataccgcttgtttatgtcttttctttcaaaaattcacttatttaatttatgtaagtacactgtagctctcttcagacacaccagaagagggtatcaaatcccattacagatgtttgtgagccaccatgtggttgctgggatttgaactcaggaccttcagaagagcagtcagtgctcttaacctctgagccatgtctccagccccctatactaggttcttttgccagcatcatcagtatcaggggcagctattgtgttaggaaagaagcagtgagcttatactactactcctcactagtggtagggaccatgaatctgtattttataatctttcttgaagcaggatgtggtggctcagacctgtaatcttagcccttgaaggagaatcaccagccagggtatgtagggagagattttgtcagtgctcttaaccactgagccatctctccagcaagattctgtctttgttgttgttgtttttaaatattttttattaggtattttcctcatttacatttccaatgctatcccaaaagtcccccatacccccccccactcccctacctacccactcccactttttggccctggtgttcccctgtactggggcatataaagtttgcaagttcagtgggtctttctttcctctgatggccgacgaggccatcttttgatacatatgcagctagagacaagggctctgggatactggttagttcataatgttgttccacctatagggttgcagatcctttttagctccttgggtactttctctagctcctccattgggggccctgtgatccatccaatagctgactgtgagcatccacttatgtgtttgctaggccccggcatagtctcacaagagacagctacatctgggtcctttcagcaaaatcgtgctagtatatgcaatggtgtcagcgtttggaagctgattatgggatagatccctggatatggtagtctctagatggtccatcctttcgtcacagctccaaactttgtctctgtaactccttccatgggtgttttgttcccaattccaagaaggggcaaagtgtccacactttggtcttcgttcttcttgagtttcatgcttttagcaaattgtatcttatatcttgggtatcctaagtttctgggctaatatccacttatcagtgagtgcatatcctatgagttcctttgtgattgggttaccttactcaggatgatgccctccaggtccatccatttgcctaggaatttcataaattcattctttttaatagctgagtagtactccattgtgtaaatgtaccacattttctgtatccattcctctgttgaggggcatctgggttctttccagcttctggctattataaataagactgctatgaacatagtggagcatgtgtccttcttaccggtgttgtcgttttatttgttttgttttgttttgttttgttttgttttgttttttagacagggtttctctgtatagccctggctgtcctagaactcactctgtagaccaggctggcttcaaactcagaaatctgcctgcctctgccttccaagtgctgggaataaaggcatgcgccaccaagcctggcttaagattctgtcttaataaaacaaaatttcattgatagactcctggttaccatgaggagacccttggtttaatacttatgttgaacacacacacttaaacacacataaatatacatacatacacacacacaattacacacatacatacacacacaccacagactatctatatctttacttgatattgtttgaggactgttattctagaacaaaactgagcataaaggttaatacttgtcttgttgctaacagaggagccataaccgagactttgtatgcaaatggaaggtgggagtcattctttcacactttaaatgtttgttttaaacccattttattaggggctggagagatggctcaatggttaagagcactgactgctcttctagaggtcctgggttcaattctcaacaaactacaaggtggctcacagccatatgtaatggggtccgatgccctcttctggtatgaaggtgtacatgcagataaagtgctcatatacataaaaatctataaatgcatttttttttttttggtttttttgagacagggtttctctgtggagccctggctgtcctggaactcactttgtagaccaggctggcctcgaactcagaaatccacctgcctctgcctcctataaatgcattttgaaagaaagaaaagacaacaaagccagtaagcaataaatctgagagttggggttggaaaagtcaaaggcatctctcaggaagtctcggcaagactttagatgaaaagaaaaacagacttataggctatttgaattagaatttagaaaatcaggcagggttagcagtgaaaatctacaatggaagctactgtgtagaccaagggagcctggaactcccagagatctatctacctaccggtctgcttctgtctcctgagtgctgggatgaaatgcatgtttcactaacttacatacctaatacacacacacacacacacatcctatgtttatatatatatttatataattattttatattaaattctttaaatattatatatattaaattattttaagtgtgtgtgtgtgtgtctctgagaggacagggacaggggtatgggatcctctggttctgaagtcacagttgtttataaccatcctttctgatgctgggaactcctgtcctcttcaaaaacagcgatatgagtcctctctttggtccccttaaatattcttttttgtttgttttttaagacagggtttctcgtcctttcctctggcggcagccatcaggtgagccaagatgggtgcatacaagtacatccaggagctatggaggaagaagcagtccgacgtgatgcgctttcttctgagggtccgctgctggcaataccgccagctctctgcgctgcacagggctccccgccccacccggcctgataaagctcgaagactggggtacaaggctaagcaaggctatgtcatttacaggattcgtgtccaccatggtggtcgtaaacgcccagttcctaagggtgcaacttacggcaagcctgtccaccatggtgttaaccagctgaaatttgcccgaagccttcagcctgttgctgaggagagagctgggcgccattgtggggctttgagagtcctgaattcctactgggttggtgaagattccacatatacattttttgaggttatcctcattgatccgttccataaagctatcagaagaaatcctgacacccagtggatcaccaaaccagtccacaaacacagagaaatgcgtgggctgacatctgctggccgaaagagcggtggccttggaaagggccacaagttccaccacactattggtggttcccgccgtgcagcctggagaaggcgcaatactctccagctccaccgttaccgctaatacacatgatatttgtaaaattcatatccaataaacaatttaggacagtcaaaaaaaaaaaaaaaaaaaaaaagacagggtttctctgtgtagccccagctacacagatcctggatctccctctgtagagcctcctgactctgggattaatcctgctgggattacaaacctatgccaccaccaggagctgcgaccaccagcagctgcgaccaccagcagctgctaccaccactgcctggtcccttaaatattctttaattgacacttttttgtttgtttgtttgtttgtttgtttgtttgtttgtttttgaggcagggtttctctgtgtagccctggctgtcctggaactcactctgtagaccaggctggcctcgaactcagaaattcgcctgcctctgcctcctgagtgctgggattaaaaggaatgcaccaccatgcccggtcacataatttttatctttgagataggtctcttgtctcaaagtttttgttttttgttttttgtttgtttgtttggtttttcgagacagggtttctctgtatagccctggctgtcctggaactcactttgtagaccaggctggcctcgaactcagagatccacctgcctctgcctcccgagtcaaagtattggttatgaagtcagagatagccttgaacttacgattgtcctccatctctcaagtcttaagattgcaggtgtgtagaatcaccgtcaactccacttacttggttggcttagttagtattagtattagtattagtattagtactagtactagtattagtattagtattagtattagtattagtattagtattagtattagtattagtattagtattagtgttagtgttagtgttatgttttgcctgaatatataacagtgtaccaatgtgatacagaagccagaagaaggcatctagtctcctgggactggtgttacagatggttacaagccaacaagtgggtgctggaaattgaacctgggtccaagaagagcagccagtgctcttgatctccagcccctccacctggtcttcatgtaggtgctgaggattttgttttgttttgttttgttttgttttgttttgttttgttttgttttttgagacagggtttctctgtgtagccctggttgtcctggaactcactctgtagaccaggctggcctcgaactcagaaatccacctgcctctgcctcccgagtgctgggattaaaggtgtgtgccaccagcacccgactccgtgctgaggatttgaactcagacccagcactggaagagcaagtgcttcatctgcttagtcatctccatcccccaagacaccgattttgctttttaaaggtggtggtgacctattaaccccatgttttaaattcaggccttgaaatttctgtgatcctcctgcctctacctcctcaatgccagagttacgggcagagacgtgtaactacactacactgggctttctttttttttttttttatcagcagacttaattcttttatttttctcatataaaaacccttatgtggtagccacagctggagcctgggtcctctgaacagagactctggtgtgggttttcacaagatgatccgtgaattcctgataaggagtcttggtgaagacagtctctttccagaggttgggggtcaggtagctgtaagtcttggagatggcatcaaaggtggccttagcaaagttgcccagggtggcagtgcagcctctggctgaagtgtagcagtcatctataccggccatcatcaggagcttcttgggcacaggagcagagacaatgccagtgcctctgggggcagggatgagacgcaccagcacagagccacagcggcctgtcaccttgcatggaacagtgtggggcttaccaatcttgttcccccagtagcctctccgcacagggatgatgaaaagcttggccaagatgatggctcctcggatggcagtggcaacctccttggagcacctaacaccaagaccaacgtgaccattgtagtcctcaatagcgacgaaagccttgaacctggtctgctggccagcccgagtctgcttctgcactggcatgattttcagaacctcatcctttagggacgcacccaggaagaaatcaatgatctcagactccttaatgggcagggagaacaggtagatctcctccaaggacttgatcttcatgtccttaaccaggcggcccagcttggtgacggggatccactccttgtcttcagctttacctccacgagccccgcggcctcgaccacggccacggccttggccacaaccacggcccctaataccgctgccgaatcctccgcggaagccaccacggcctcctaatcctgggcccccgggtcctccgggccctcccgctgcaccggcgtcatccgccatttggtgttttcccgaagaagaagaagagctacactgggctttcaaatccacattctgactcttttattttcttgcctttctgaagtgagccccctaagtgttcagttttactctcctgaatcactgcaggcaacacctttgtttgtttgtttgtttgtttgtttttaagatttattttatttatgagtatactgtagctgtttcccaggcacatcagaagagggcatcattgaactcaggacctttggaagagcagtcagtgctcttaaccactgagccatctctccagcctctgttggctttgaaacaggcgttcactatgtagccttggctgtgtaaatgaggtcagccttgaactcacagagatccacttgtctccatctcccgaatgctggacttaaaggtatgcctaccacgcccaaccatctgtcat

SEQ ID NO: 65 - DNA, 32616 bp, Homo sapiens
taaaatgaaggtcatctaatttttgaagttgatttcaaagaagatagattcagccatttattcaataagtattgagtactagtatatgctagtcatttttctaggtgcttggaatataacagtaaacaaagcagacaaaaatttgaccttcatggaatttacatatttggaaggggaagacaggtagtaaacaaaatatgaaagtaaaatatgtagcacattagatgttgatgaatactaataataaatcttggtgaattgtgaacctgttcattcctatggaaaatattaaaggaaaatcattttttgttaagaggataagttgagtttttagtacggtaatatgaaaagatccaggggacaatttctcaaatggttttgagcttcaggtaagagtaagggatagaggtaaagctttggaagcaagaaaccctgaagtgcttgtcgaagctattgggaaagatgtgaacctctaaaacaagagagtagtgattcaagagaggaagaaagaggcttcacataaatgccatctttggaaatgacgggggtgagagaaggaatacatttttcagatgtttgcaaagcaatccttgtccttagggtagagtgaggttttagttaagaaaggaagtaaactttccatgagtatctcaatgagcatctgacactattcaatctacacagcatttaaccttgaagctttttcccaatgattatcaagaatcagcaaacaaatatgcatcgccttccgcaaaacagtcctgtggctcgtgtggtggatgttgttttctcacaccactaataatgaaatgtaatatctataaaaggtagaattaatatgcaaaatgagttcattttaagcccagttcagagtcacagcaaaattgagcagaaagtacgaagagttcccatagaacccctgtacctttctttacaagaaaagctcatgtgctatcagcattcctcaccagagtgatacaattactataatcaatgaatctacattgacacatcagtatcacccaaagtccctagtttaccccagggatcattcttggtgttgtgcatgctatggttttaaaaatgtataaagacacgtatccaccatgtttttttttttgtttgtttgtttgttttttttttgagacggagtctcgctctgtcgcccaggttgcagtgcagtggtgccatctaggctcactgcaagctccgccttccgggttcatgccattctcctgccgcagcctcctgagtagctgggactaccagagcccaccaccatgtccggctaatttttttgtatttctttttagtagagatggagtttcaccgtgttagccaggatggtctcgatatcctgacctcgtgatccgctcgcctcggcctcccaaaatgctgggactacaggcacgagccacagcgcccagccttctatccaccattatagtatcttatagaatagtttcactgccctaaaaatcctttgcgttctgccttttcatcctcacccccaatcccaacttctggcaaccactactccttttactgtctccatagctttaccttttccagaatatcatattgctggaatcctacggtaggtatccttttcagataggtttctttcacttagtaatatatatttaagattcctccatgtcttaaatatatgatggtaccacattttcttttactgctgactaatgctctactgactgaatatatcacaattaatccgttctccttctgaagtacatcttgattgtttccaagtttttgaaattaagaataaagttgccaaaaacatttgcatgcagcttttgtatggacatacttttcagctcattttggtaaatatcaaggtgtgtgactgctggatcgggtattaagagtatgttcatttttgtaagaatctgccaagccatcctccaaaatggttatactattttgcatttccattagcaatgaatgaaagttttgcttgtttcatttcctcaccagtattttgtgttgacaatgttctggattttggccattccaataggtgtgtattatctcatttttgttttaatttgcatttccctgaagacatgtgttgtggtaaatcttttcatatgcttatttgccatgtattacatgtgtattctttggcactgtgtctattcaggcctttgacttattttttaactggattgtttgttttcctatttttgagttttaagacatctttgtatattttggataactgtcctttatctgaaatgtttttcgcaaatattttctccctgtctgggacttgtcttcccattcgtttttgacagtgagtttgtgaagcagatgtttttaattttactgaagtccaaattgtcaattacttttttcatgaatcatgcccttgtgtatctaaaaaaaaatcattgccatacccaaatccgtctagatttccttctatgttatcatctaagacttttataattttacattttacatttaggtctataacctattttgagttaacttttttattaaaagtgtaaagtctgtatcaagagacttttttattttttatttttttgttttgcttgttgatgttcagtttttctagcaccatttgttgaaaatgctatctttgttccattgtattgccatgtatcccttgtcaaaaattaattgactatatttatgtgggcctatttctggaccctatctattctattgatctatttgtcgattcttttgcaaatactatgctgtcttgactactgtagctttatagtaagtcttgaagtaagatagtgtcagtcctgcaactttgttcttctccttcagtaatgagttggcttttttgggtcttttgccttcccacataaacttcctttttttgagacagggttctcactctattgcccaggctgaagaccagtggtgttgatcacagctcatggcagcatcaacatcctgggctcagggaatcttcccctcccagtatcctgagtagctgggactacaggcatgcaccaccaggcccagctaatttttttgtaaacccagagtttcactatgttgcccaggctggtcttgaactcttaggctcaagcaatcctcctgcctcagcctcccaaagtgctaggataataggcaggagccactgtgcccagcctccatataaactttagaataagtttgtcaacatccacaacacaatatgctggaatttttattgaaattatgttgtatctatagattaatttaagaagaactgaaatcttgacaatcatgagtctttctagctatgaacatgtaatatctctccatttatttagttcttctgatattttcatcagtttggtcatttttcttatacagatctcatatatatttagttagatttatacctaaatatttaatgttggagggtgttaatgtaaatggtaatgtgtttttaatttcaaattccacttgttgatttctggtatacaggaaagtggttgacttatgtatgttaaccttgcatgctgcaatgttgctataatcacttcttagctccaggagttttttggtcagtctttataaattttctacatagatggtcatatcatttgcaaacaaaaacagttttatttcttccttcacaatctgtataccatttatctatttacttatttatctatttatttatttttgtcttattgcattgactagggcttccagtatgatgatgaaaaagggtgatgagtcaggtacagtggatcactcctgtctgtaatcccagcacaatgggaggccgaggtgggcggatcacttgaggtcaagagttcaagaccagcgtggccaacatggtgaaatcctgcctctactaaaaatacaaaaactagccaggcatggtggcacactcctgtaatcccagctactcagtaaaattgcttggacctgggaggaagaggttgcagtgagccaagatcacaccactgcattccagcctgggtgacagagtgagactccatctcaaaaaaaaataaagaaagaaagaaaaaagaaaatgaatggtgagaaagaacaaaattgtctcacttctggtattagtaagaaagcttctggtcccccatcattaattacagtgttagctattagttttttgtagatgttaatcgtcaacttgaggaatcttccctctatttctactttgttgtttgtttttattatgatgggtattggactttgtcaaatgcttttttctgcactattaattgtgtgatttttcttctttactctgttcatgtgatagattttcaattaaatgtttaatgttaagctagccttacatactgggacaaatctgacttggtcatgttgcataattatttgtatatattgttggactggattaccagcattttgttgagtcgttttgcatatatgttcatgagagatattggtatgttattttatgttcttgtaatgcctttacagtctatgaggtaatgctgaccttatagaatgagttagaaaatattcttttctgcttctatcctctgaaaatgattacaaagaattggtataatgttttcttaaatgtctagtagtactcaccagtgaacttatatgagcttgattctttctgttttggaaggttattaattatcgattcaattttttaaatagggataggccaattcagattgtcaatttcttattgtgtgaattttggcagattgtaccttctagaaattcatctaggttatcaaatctgtggtcaaaagttgttcatagtattcctttattatcctttcaatgtccatgggatctgtagtgatgtctcctctactatttctagtttaaaaaaaacttttagatacaaggtctcctctggtacccaggctggagtgcactggtgtgatcatagctcactaacctcgaactcctgggcttaggcaatcctcttgccttggcctcccaaagtgccaggattacaggcatgagccaccacagtggagctctcaattctgatactaataatttgtgtcttctctttttttccttagcctgactagagtaattaactttatgtcttttaaaagaaccacctttttggttttacccattttcttttttgattttctgtttttgatttgattgatatctactctaattttttattatttcttttcctctgcttactttgaatttaattacttttcttttttgtagtctcctaaaatagaagcttatattattgattttagatctttcttcttttctattacagcactcaatgctataaatttccctctaagcattgctttcactgcatcctacaatatttcaactctattgttatttagctcaaaagaggttcttaatttctattgggatttctctttgacccatgtgttattcagaagtgttccgtgtgatctccaaatatttgggagtttttcagctatctttctattattcatttcttgtttaattctattgtggcctgagagcatatattgtatgatttatattcttgtaaatgtgttaaggtgtgtcttatggtgcagaatgcggtttatcttgctatatgttccttagagaataatgtatgttctgctgttattggataaagtagtctatagatgtcagttacatctcgttgattaatggtgctgttgagttcagctatgtcctaaatgattttctgtctgctgtatctgtctatttctgacacaaggctgttgaagtctccaaccataataatgaattaatctatttttctttgcagttttatcaattttgtcttatatatattgatgctccattgtttggcacatacacattaagaattgttatgtcttcttggagaatttacctttccataacatgtaacatttccctttattcctgataatttttcttgctcagaagtttgccctgttggaaattaacagaactactctggctttatttgattagtgttagcatgctctctctttctctattcttacacttttaatgtatacttgactttgtatttaaagtggggttcttatagaaaacatatacttggtagggtgggaagtaaaataaaaagaaatacttgggtattggtttgatccactctaacaatctctatgttttaattgatgtatttagaccattgatacttatttttttatcctcatccctgtgattacccagagagctgcttaaattgattattgatatagacaaattaataattaatatctaccgtttgttactgttttctatttttcattgcccttactttctgctcctattttttgctcctttttctgttaatttaggttttgagtattttatatcattctattttctctcccttctcagcatatgaattatctttctttttgacttttttagtggctgccctgaaggttgcaatgtacatttacaaccagtccaattctcctttcaaaaaacacaatactgtttcatggctagtgcaagtacctaataataagaagtcactcctaatttctttctctcattctttgtatctttactgttattcatttcacttgtacataagctgtaatctttcaatacattattgctattattatttcaaaacatgttatctattatatctatttaaaataagaaaaataggccaggtgcagtggcttactcatgtaatcccagcactttgggagaccgatggattgctagagctcaggaattcgagaccagcctgggcaacatagtgaaaccctgtctctactaaaaatacaaaaaaaaaaattgctgggcatggtggcatgggcctgtggtcacagctactcgggaggctgaggtgagaggattgcttgagcctgggaggcagaggttgcagtgaaccaaaatcaagctactgcactccagcctaagtgacagagtgagaccctgtctcaaaaaaaaaatgaaaaagaattatttttatttatcttcacttatttcttctctaatgctctttgtttctttagtatgtagatccaagtttctaacctgtatcatttttcttatctcaataacttcttttaacatttctcacaaagcagatctactggccacagaatgcctcaattttcatttgtctgagaaaaccttatttctccttcacttttgaaagataattttgtagggtacagaattctaggttgtaggttttttcccctcaaagtgaaatatttcattccactcttttcttctttgtatggtatctgagaagaagtcagatgtaattcttatcattattacttaaaagattgcttctgttcctttctctcttctccttcccttctttccttctctgtatattacaccttttatagttgccccatatttcttagatattatgttttggttttcttctgtgtttttttctttgattctcagttttagaagtctctatttatatatctgcaatcgcagggattctttcctctgccatgtccagtctactaataagcccttacagacattgttgacttctgttccagtgtttttgatctctagcatttctctgattatttcttggaattgccatctgtctacttacattaccaacctattcttgtgtgttgtcttatcatagtaattgcagttgttttaatttcataggtattgtaatttcaacatctctaccatatttgacattgattctgatgcttgctctgtcttatcaagctatgtttttgtcttttagtgtgacttctaattttttgttgaaagccaggcatgatgtactgagtgaaagaaactcaatacattgtaatgtgacgataagagttcaggggaagtgaagcattctatagtcctatagcaggtctcggccttttagtgagcctgtgcctatgaacggtgactttcaacaagtgcttttcattccactcttttcctgtccttaagtgggacaagatcactgggggggggctagaattgggtatttcccttctccaatgtagaagctaaagagagggctggagttgggtatttttcttcccctgtatggaaagctagaggcagttaaatttggatattttccttcttctaattcagttaggctgcgacaaaaatcccgacagtttaggctctaatattataaaataatttctcttgagtataggccttattaagaacactatactctgatggagctgagggggagttttctctgatattcactgcgagaacctcgtagagctccaggaagcaaaactcacaaaagtgtgggagtcttccagaatttttcctttgcagacttatctgcactgaacctccagaaattcatcaattacagttcaggttttcctacccaggtactggttttcatggaggtttctgcctgtgcatttctgctccagtaagttgttcttcttgtatggtctgtctttcaaattttttaagtagggttatgacctgtcgcctcacttctctgacagttctgagagtgttgatttttcagtttgcttagatttttacttgtttttaggatgaagtgacaatttccaagctcctccctgacatgccagatcagaaactgaaagtcctaagcctcatattctgtgcgtgggtatgttcacatcctgcctgctccagtgcccccacctcacactctctttcccttccttgtccccttgtgagatttctaggtccaatacaaagactgtgttcaactcattcaactactttggctcatctgagtattataatgaacaatcacaaaaaaaaatgaagtaaaagaaaaatccatcaaagaattgagatatttgagaaaaagaaaggagatcagtgttttataaaacttagaaatagattttttaagtgtttcttcattgacttatgtgaaaggacttttcttaatttaacaaattatgtgctttcgtttatagcctcaaaacttcttgtgtagctaagaatgggtaaataatcaggctttactaaaggactaacgtaaagatcttctgtaagtaacatttctgctactcaaggaagagataaacttcatggcataaccttgccaaagtatactaagaataaccctgacacaaagctcttttttcagccaacatgccatgaaagaaagaagacaaggggtgatctccactctctaagtgaaccactaaacccaccaaagaagaaacgagggaaatagaaagaggacccttgcctgagataatggatctgtatgtatgagtagtagaaccctgctcaaagtacaaggaagggaaaaaaaagttagtttatttggaattttggacattaagagtctttattgttcattttcttttaactcacatgaatggcttatcacttcaattaataaatatttcatttcttttcaacatattcatgaaacaaatctgaaatgaacagtgcaacatgtgaatgtttagaacattataaaattaaacacaaaatctgtctggcaatcttcctagcatcttaggaaaaaagttgacaaaatttcaagcagcagaagggggcagtaaaactcaacagaaagctctggaagatttttaagattcttccttattttcttttcatgtagattatttcccaacaaatttcagacgctaatagaaattttgtacaacagatccatatatttgcctaaaatagacacagaaacattgaatatatgcaaacatgagagctataagttttacatgatcaaaccttttttttatggtacacaatagtcacagtacttttccatataaaacaggtttagtggtcttaatttagtttggcacatttaatacactcccatgaccagcatcccaaatgtacctatccgttttattttattgtctcagaattgtcagttatttaataaattatgtaacttttttccttatgctcagatttgcacttctttctaaaactctgcccatccttaaagtcccagattctccttgaacttttttttttgactttccaagtacatggaactcttcactctatcctgctatataagtgacagaatttccactatgggatagatggagttcaattcctttgagtttaaaataatctaaatataattattccttatgccctgtttttccctcacttttgtatccaaatctcttttcagacaacagaacaattaatgtctgataaggaagacaatgatgatgatcacttcaaaatgaattcaggattgtaatgtaaaattttagtactctctcacagtatggattctaacatggcttctaacccaaactaacattagtagctctaactataaacttcaaatttcagtagatgcaacctactcctttaaaatgaaacagaagattgaaattattaaattatcaaaaagaaaatgatccacgctcttagttgaaatttcatgtaagattccatgcaataaataggagtgccataaatggaatgatgaaatatgactagaggaggagaaaggcttcctagatgagatggaattttagtcatccgtgtctcatgaagaatcagatgtgtacactaagcaaaacagttaaaaaaaaaacctccaagtgagtctcttatttatttttttcttataagacttctacaaattgaggtacctggtgtagttttatttcaggttttatgctgtcattttcctgtaatgctaaggacttaggacataactgaattttctattttccacttcttttctggtgtgtgtgtatatatatatgtatatatacacacacacatatacatatatatattttttagtatctcaccctcacatgctcctccctgagcactacccatgatagatgttaaacaaaagcaaagatgaaattccaactgtcaaaatctcccttccatctaattaattcctcatccaactatgttccaaaacgagaatagaaaattagccccaataagcccaggcaactgaaaagtaaatgctatgttgtactttgatccatggtcacaactcataatcttggaaaagtggacagaaaagacaaaagagtgaactttaaaactcgaatttattttaccagtatctcctatgaagggctagtaaccaaaataatccacgcatcagggagagaaatgccttaaggcatacgttttggacatttagcgtccctgcaaattctggccatcgccgcttcctttgtccatcagaaggcaggaaactttatattggtgacccgtggagctcacattaactatttacagggtaactgcttaggaccagtattatgaggagaatttacctttcccgcctctctttccaagaaacaaggagggggtgaaggtacggagaacagtatttcttctgttgaaagcaacttagctacaaagataaattacagctatgtacactgaaggtagctatttcattccacaaaataagagttttttaaaaagctatgtatgtatgtgctgcatatagagcagatatacagcctattaagcgtcgtcactaaaacataaaacatgtcagcctttcttaaccttactcgccccagtctgtcccgacgtgacttcctcgaccctctaaagacgtacagaccagacacggcggcggcggcgggagaggggattccctgcgcccccggacctcagggccgctcagattcctggagaggaagccaagtgtccttctgccctcccccggtatcccatccaaggcgatcagtccagaactggctctcggaagcgctcgggcaaagactgcgaagaagaaaagacatctggcggaaacctgtgcgcctggggcggtggaactcggggaggagagggagggatcagacaggagagtggggactaccccctctgctcccaaattggggcagcttcctgggtttccgattttctcatttccgtgggtaaaaaaccctgcccccaccgggcttacgcaatttttttaaggggagaggagggaaaaatttgtggggggtacgaaaaggcggaaagaaacagtcatttcgtcacatgggcttggttttcagtcttataaaaaggaaggttctctcggttagcgaccaattgtcatacgacttgcagtgagcgtcaggagcacgtccaggaactcctcagcagcgcctccttcagctccacagccagacgccctcagacagcaaagcctacccccgcgccgcgccctgcccgccgctgcgatgctcgcccgcgccctgctgctgtgcgcggtcctggcgctcagccatacaggtgagtacctggcgccgcgcaccggggactccggttccacgcacccgggcagagtttccgctctgacctcctgggtctatcccagtactccgacttctctccgaatagagaagctacgtgacttgggaaagagcttggaccgctagagttcgaaagaactccgtggatattccagctttcccacaagcactgatcattatgagccagttacttaaccgatctgagacactctcacctcctaaatagggatagatgatactaatttgcaggttgtcattatgataagacaggatctgatcaatatatgtgaattgtttatatttggaacctttttattgagtggaagaagttgttttaaatattctagtcagttctttcctgctcccaggaaagcccggattatgttttaagataagcaaaatgtcttaaaagtaagctgttttactttgaatttttccctaaatgttgattagtgtactagatccattttaatttggaaagtgaagtgctacttatttgaacttcttaaaaatgctaattttaacatctaaagagttaactaagaaaagcttagtaacatgatgtaccaagttgaatatgctgttatccttatttagaatagaaaattggtatttctacgttttatccattctaaggcaggttaaaaaattgtatttccatgactacctatatatttcttgaatttattattgtaaagttgattcatagtcaaacaattaaatgtttaaattaagattaagacactagagaatgatttatttgctgtcctttaattgcagcaaatccttgctgttcccacccatgtcaaaaccgaggtgtatgtatgagtgtgggatttgaccagtataagtgcgattgtacccggacaggattctatggagaaaactgctcaacacgtaagtttgtcctttggttgcctcattaggagtggggctggatacagttatcattgtatagatttgtgtcttataatgagtcccattaatttctccctccctttcttcgtcttcttgcagcggaatttttgacaagaataaaattatttctgaaacccactccaaacacagtgcactacatacttacccacttcaagggattttggaacgttgtgaataacattcccttccttcgaaatgcaattatgagttatgtgttgacatgtaagtacaagtgtctttctaaggtttttagccttctcaaagaaaaatatgctttataatactgtaagcctaatctaaaaacatatttccaagcttatcaaaaagactttaagatagcttttaagtttgccttccatcttaatcgccaaaaatattgacatttagtcccatccagtttatacagtctgctcacaactctgtatacctcttctaacctttactgtttggtcagtttgtggaggtagcatggtccagctgtttattgaatgcccatgggccacagaattgttctgaacatgtagcacccattaaaataaatttggatttggatcagcaagaaaataactttccatgattctaaagtgggtgccatactcagccattcctttcataggcctcttggatagtgagcagatggctacctgaaaaatcaatattgccagattataatgtgcagagtatatgtattttattaaagatgtatttcaagtggccattagactataaagtgtagttgtttaaaaatagattttttttattttggagttacattcaacctcaggtgccactttccacattttacaataaaaataatggttgatttacttaacaaatgagaataaataaaacatttttttctttgaaaatttcagccagatcacatttgattgacagtccaccaacttacaatgctgactatggctacaaaagctgggaagccttctctaacctctcctattatactagagcccttcctcctgtgcctgatgattgcccgactcccttgggtgtcaaaggtgagtaagaagaatccattagagatgtattaactataagacgggctgcattgctgccaaaaaaaaaaattgaccttagactaccatttatttattaacaaaagcagtttttacttttagcatggttatctatgggtattttttaaagtatgagtctatataaactattatgtaaaagcaaatgagcgtcttggtataatgtcttaatattttcaaattatttctttagaaatgaaataattctaattaaaatagataaaatcattcagtaagaagttgttccaccatatcttagaactgttgtttatattatgatcctattcacaattgtaattctcatataaatgaagaattcttggtagattgacagtcaccatctcctttcttgaatacatagatggattcttaccttagctttctcatttttcaggtaaaaagcagcttcctgattcaaatgagattgtggaaaaattgcttctaagaagaaagttcatccctgatccccagggctcaaacatgatgtttgcattctttgcccagcacttcacgcatcagtttttcaagacagatcataagcgagggccagctttcaccaacgggctgggccatggggtaagatagagttaatatcttagagttagtaaaattataccaaatcatagtcaagggctaacattaaaggagatatacagatagatagatccaaataacttatccactttttttaaaaagaagtcttatctataaaaaccttaaaggaattttccatttacttcactggtctagtaaaattatacacacacacagacatgcacacacatatataaacattcacacacatacatatgtacaggtattgttatttgtaatttgacccttgtattttttagtttaaaatgttagtactgcaaaatgttatgtcctcaaaaacacattgtaccatgattatgccgctttcaatattgtaaagtgaggtttttgccgcattattattttttggatttcaatagcatagcttcaagttattcgtaagaattttttataaataatacatttttatacttttttataattaccatatcatcatagtgaagtatataatatatatgatataagctcaatatagtatattaattccgttaaacacaaagacatatcagtttgtagctttggtggataaacaaattaatttagcaattcatggctatgaaaaatgtatattttatttaaaaattttaaagaaagctaaatgatcaaattatttaatgatgaattatatgatagacactttatataagaaaaacttcaacagcaacaaattaaaattttttcatcattttctaggtggacttaaatcatatttacggtgaaactctggctagacagcgtaaactgcgccttttcaaggatggaaaaatgaaatatcaggtatgcttcctttgactattaagacttagttattaccgcttatacccatattttaaaatccctaaaaatgtgttccttaactttttaactgatgtttatttatttatttatttttttagataattgatggagagatgtatcctcccacagtcaaagatactcaggcagagatgatctaccctcctcaagtccctgagcatctacggtttgctgtggggcaggaggtctttggtctggtgcctggtctgatgatgtatgccacaatctggctgcgggaacacaacagagtatgcgatgtgcttaaacaggagcatcctgaatggggtgatgagcagttgttccagacaagcaggctaatactgataggtaaacaagaaaatgatttatataaaaccctcttccccagggaaaattagtgtgctatctttgttatgttttgagtaaatgacaagatgtggtaaatgaaaactcacacattctatatacattaaatatgtaagcatgactgataaaatagctatcttttgatactgacaaggaagaaaacagaaatgaaggaatagcaaattttaaaaattgcattccagttgcttgaaagcttgtgatcagatgcaataaatgtttttattatttattttgtgcaaataggagagactattaagattgtgattgaagattatgtgcaacacttgagtggctatcacttcaaactgaaatttgacccagaactacttttcaacaaacaattccagtaccaaaatcgtattgctgctgaatttaacaccctctatcactggcatccccttctgcctgacacctttcaaattcatgaccagaaatacaactatcaacagtttatctacaacaactctatattgctggaacatggaattacccagtttgttgaatcattcaccaggcaaattgctggcagggtaagcattattattgaaaaccaaaacaaaagactagtcagtaactttagaatttctgccacggaaattatttttcttaaacttactaaaagagtagttagttatattgctagtaaaattattttattgatataagaagcctaactttgtttgaaaagtctaaacttttagtctagtctacagttgtcagacaaatagcaaattgtacccctaccttaaaaatattttcaaaaagtatctataatcttataggaataaatattttaggcttgaatactagtgttatttttgaaatgtaaaaaggcaaattagttctaggctggtgtcccattgaattttaagcagagctcctgttgaaatgtaggtaagcatctttccagcaaataaaaattgtctccgctgggagtttcagttttacctgatttgtacctaaggcaagctgaatacaaacagtaaatatgcctaaaattcttgttttacaactaattttactttccacaggttgctggtggtaggaatgttccacccgcagtacagaaagtatcacaggcttccattgaccagagcaggcagatgaaataccagtcttttaatgagtaccgcaaacgctttatgctgaagccctatgaatcatttgaagaacttacaggtaagaaacagtttctaaacttcttcgttttttgtttgtttgtttgtttttgttgtttttggttttcttttcgagatggagccgccctctgtcacccaggctggagtgcagtggcgccatctcggctcactgcaacctccgcctcctgggttcaagcaattctcctgcctcaacttcctgagtagctgggactacaggctcacgtcgcacgcatggataattttttgtattttcagtatagacggggtttcaccgtgttagccaggctggtctcaaactcctgacctagtgatccgccggcttcggcctcccgaagtgctgggattacaggcgtgagccaccgcgcctggcccctaaacttcttaaaagaatcaggggtcaaatggaaacagagaagttggcagcaaattgagcaaaagaatcaaactgttttttattttgtgaagtttgacattggttgtatctctgtcttcatcgccttcacaggagaaaaggaaatgtctgcagagttggaagcactctatggtgacatcgatgctgtggagctgtatcctgcccttctggtagaaaagcctcggccagatgccatctttggtgaaaccatggtagaagttggagcaccattctccttgaaaggacttatgggtaatgttatatgttctcctgcctactggaagccaagcacttttggtggagaagtgggttttcaaatcatcaacactgcctcaattcagtctctcatctgcaataacgtgaagggctgtccctttacttcattcagtgttccagatccagagctcattaaaacagtcaccatcaatgcaagttcttcccgctccggactagatgatatcaatcccacagtactactaaaagaacgttcgactgaactgtagaagtctaatgatcatatttatttatttatatgaaccatgtctattaatttaattatttaataatatttatattaaactccttatgttacttaacatcttctgtaacagaagtcagtactcctgttgcggagaaaggagtcatacttgtgaagacttttatgtcactactctaaagattttgctgttgctgttaagtttggaaaacagtttttattctgttttataaaccagagagaaatgagttttgacgtctttttacttgaatttcaacttatattataagaacgaaagtaaagatgtttgaatacttaaacactgtcacaagatggcaaaatgctgaaagtttttacactgtcgatgtttccaatgcatcttccatgatgcattagaagtaactaatgtttgaaattttaaagtacttttggttatttttctgtcatcaaacaaaaacaggtatcagtgcattattaaatgaatatttaaattagacattaccagtaatttcatgtctactttttaaaatcagcaatgaaacaataatttgaaatttctaaattcatagggtagaatcacctgtaaaagcttgtttgatttcttaaagttattaaacttgtacatataccaaaaagaagctgtcttggatttaaatctgtaaaatcagtagaaattttactacaattgcttgttaaaatattttataagtgatgttcctttttcaccaagagtataaacctttttagtgtgactgttaaaacttccttttaaatcaaaatgccaaatttattaaggtggtggagccactgcagtgttatcttaaaataagaatattttgttgagatattccagaatttgtttatatggctggtaacatgtaaaatctatatcagcaaaagggtctacctttaaaataagcaataacaaagaagaaaaccaaattattgttcaaatttaggtttaaacttttgaagcaaacttttttttatccttgtgcactgcaggcctggtactcagattttgctatgaggttaatgaagtaccaagctgtgcttgaataatgatatgttttctcagattttctgttgtacagtttaatttagcagtccatatcacattgcaaaagtagcaatgacctcataaaatacctcttcaaaatgcttaaattcatttcacacattaattttatctcagtcttgaagccaattcagtaggtgcattggaatcaagcctggctacctgcatgctgttccttttcttttcttcttttagccattttgctaagagacacagtcttctcatcacttcgtttctcctattttgttttactagttttaagatcagagttcactttctttggactctgcctatattttcttacctgaacttttgcaagttttcaggtaaacctcagctcaggactgctatttagctcctcttaagaagattaaaagagaaaaaaaaaggcccttttaaaaatagtatacacttattttaagtgaaaagcagagaattttatttatagctaattttagctatctgtaaccaagatggatgcaaagaggctagtgcctcagagagaactgtacggggtttgtgactggaaaaagttacgttcccattctaattaatgccctttcttatttaaaaacaaaaccaaatgatatctaagtagttctcagcaataataataatgacgataatacttcttttccacatctcattgtcactgacatttaatggtactgtatattacttaatttattgaagattattatttatgtcttattaggacactatggttataaactgtgtttaagcctacaatcattgatttttttttgttatgtcacaatcagtatatcttctttggggttacctctctgaatattatgtaaacaatccaaagaaatgattgtattaagatttgtgaataaatttttagaaatctgattggcatattgagatatttaaggttgaatgtttgtccttaggataggcctatgtgctagcccacaaagaatattgtctcattagcctgaatgtgccataagactgaccttttaaaatgttttgagggatctgtggatgcttcgttaatttgttcagccacaatttattgagaaaatattctgtgtcaagcactgtgggttttaatatttttaaatcaaacgctgattacagataatagtatttatataaataattgaaaaaaattttcttttgggaagagggagaaaatgaaataaatatcattaaagataactcaggagaatcttctttacaattttacgtttagaatgtttaaggttaagaaagaaatagtcaatatgcttgtataaaacactgttcactgttttttttaaaaaaaaaacttgatttgttattaacattgatctgctgacaaaacctgggaatttgggttgtgtatgcgaatgtttcagtgcctcagacaaatgtgtatttaacttatgtaaaagataagtctggaaataaatgtctgtttatttttgtactatttaaaaattgacagatcttttctgaagataaactttgattgtttctatacatctttgtcatatgacataagatttctctgaagcattactcttaaaccattatcttgcattctcctacctattcaaaactaggactggcccttcatgaaatggttttgccctcaattatatagaggcttcctagagtcactatttaaatctcataatccttattcactgcgacactgtgttggaaaatgtctagtttgtgtatctttacagaagatggcaaacaagcttattttcattgcctagtctagaagaagaagaaaaaaatacacaataaggcaaagaataagacatatattatgaagggggcacaaagttaagaagttcaaagaggaggaaattatacaaagttgggcaaatcattgatgcaaaagctcataggcttttgttgtacctctatccttgacatcttggtaatttcaatatctacatggaccacatatttagcatcttccctggcctctcctctttggccttctccattccagggatggcctcttccaccatatttcctgaaatcatacatatcttgatatcattatgattaattacagcaccactttcaaaatcttgattccaagcatcttccagctcacctattttattgcttacactctaacatctaactctcagtctcactgaacctaccgatccaccaacctcatcacttcactatttatcacctgttttatctttccatttacttccatatgcatctagctcagattctattgtccatcattctaatcattcccctctgctctgtatattctccctctactgtgctgaattgacacaagttgattaaatccagccattctcctaatctgttttttatttggcttctcagtagcattcaacacaaatagctataatctctttactgaaagaacccctgccccaaccttggcttcatggtttgatactctcctggtctttctctacctttctcagagcactattgctcagtcttttctctctctcttttttttaagctctttctcttctactgtatgtataagttgaagtgtcttgatatctgctctgtctgcattcctccagattaatcacatttaagctcattatttgaaataataagcactcagaaataagcactccaggaccaacgtctaattgtcaattgacaacatctccaaattgtcaattgacaacctctccactcaaagtcatcaatttaattgcttcttttacattcttccctcccagaaccatatatcccaaataataattgtccaacgttaaagacaccaccatactctttccttcacttgcatagccaatccaacagcaatcctgttgactacaacccacaaataaatcttaaatctgtcaccttttttccaacttcacaacctagcagtgtaatagtctattaattggtgttctcttgtctattctttcctcagcccaaaccattctccttatggcagtggcagtaattttatatatatatatacacacacactttatactttaagttctgggacacatgtgcagaacgtgcaggtttgttacataggtatacatgcgccatggtggtttgctgcacccatcaacttgtcatctacgttaggtatttctcttaatgctatccctcccctagccccccacccttcgacaagccccagtgtatgatgttcccctccctgtgtccgtgtggtctcattgttcaactcccacttatgagtgagaatatgcagcgtttggttttctgttcctgtgttagtttgctgaaaatgatggtttccagcttcaaccatttccctggaaaggacatgaattcatcctttttaatggctgcatagtattccatggcatatatgttccacattttctttattcagtctgtcattgatgggcatttgggttggttccaagtctttgctattgtgaacagtgccacaatgaatatacatgtgcatgtgtctttatagtagaatgatgtataatcatttgggtatatacccagtaatgagattgctgggtcaaatggtatttctggttctagatctttgaggaatctccacactgttttccacaatggttgaactaatttacaatcctaccaacagtgtaaaagcgttcttatttctccacatgctttccagcatcagttgttttctgactttttaatgattgccattctaactggcatgagatggtatctcattgtggttttgatgtgcatttctctaatgaccggtgatgagctttttttcatgtttgttggctgcataaatgtcttcttttgagaagtgtctgttcatatcctttgcccactttttgatggggttgtttgttttttcttgtaaattcatttaagttctttgtagattctggatattagccctttgtcagatgcatagattgcaaaaattttctcccattctgtaggttgcctgttcactgtgatggtagtttcttttactgtgcagaagctctttagtttaattagatcccattagtcaattttggcttttgttgccattatttttggtgttttagtcttgaagtccttgcccaatgtctatgtcctgaatggtattgcctaggttttcttctagggtttttatggttttaggtcttacatttaagtctttaattcttcaatgcagaaaagaccttcagtaaacaccccctcatgctaaaaactctcaataaactaggtattgatggaacatatctcaaaataataagagctatttatgacaaacacacagccaatatcatacctaatgggcaaaagctggaagcattccctttgaaaactggcacaagacaaggatgccctctttcaccactcctattcaacatagtattggaagttgtggccagggcaatcaggaaagagaaagaaataaaacttattcaaataggaagagaggaagtcaaattgtctctctttgcagatgacatgattgtatatttagaaaaccccatcatctgagcccaaaatctccttaagctgataagcaacttcagcaaattctcaggatacaaaatcaatgtgcagaagtcacaatcattcctatacaccaataatagacaaacagagagccaaatcatgagtgaactcccattcacaattgttacaaagataataaaatacctaggaatccaacttacaagggatgtgaaggaccttttcaagaagaactacaaatcactgctcaacaaaataaaagaggacacaaacaaatggaagaatattccatgctcatgggtaggaaggatcagtatcttgaaaatggccatactgccccaagtaatgtatagattcaatgctatccattgactttccattaagctaccattgactttcttcacagaattggaaaaaactactttaaatttcatatggaaccaaaaaaaaagagcccgtatagccaagacaatcctaagcaaaaagaacaaagctggaggcatcatgtacagtaaccaaaacagcatggtactggtaccaaaacagatatatagaccaatgaaacagaacagaggcctcagaaataataccacacatctacaaccatctgatctttgacagtcctgacaaaaacaagcaatggggaaaggattccctatttaataaatggtgttgggaaaactggctaaccatatgcagaaaactgaaactggaccccttccttacaccttatataggcagtaattatgttttaacataaatcatatcatgcctttcccatgtttaaaatcttccagtagcttcctactacacaatggaaaaatataatcttcttatcctaccctatgaggatctcaatggtctattccctgcccatctatctgagcttatctactaaaattccacactcttattcattatgctccagacacagtggctttcttgtgatttcctcagtagctgtgattctcaggtgttgccctattttgaatatttcttatgcagattttcacatccttctcaacatttagatctcagctcaaatttcccctttttagaaagggcttctccaaccaccaaactaaagcaactactaaggctgtttgattttctttataccatttattttatctaatattgtcttatttgtgtgtttactatctatgtcccctttctggaattttgtgtctgtgaaagcaaggaccttgcctgcattattcacaggttccagaacagtgcctgacatttaaaaggcattcaaaaataaatatatgattaataaataataacagacttcatgaaagaagtagaatatgtggtgattcttgaagaaagagtaagatcttagagagcagagacatccacgatgaaaaagtttggtaatttattcttgaattaaaaattcacttacttatatgtaatgcctttctgcttatgttattaacaaaatactgcaaaattatgagctcaaattcattatctaaagttctggaggttagaagttagaacttctaacttatgaactaaaatcttatgaattttatgaactaaaatcttatgaactaaaaacttaaaaacttatgaactaaaatcttatgaactaaaatcaagatgtcagcagggctgtgtttcttccgaaagctctaggggaatttattccttgacttttccagcttctaaaggttgccttggctcataatttatttctccatctttaaagccaacaggatagcatcttccaaagtctctaactcggattgttttaccttcccctctcataatgacccttctgattgccctggggcccatgcagataatataggaaattctctcctgctcaagatccttaatttcttcacatttacaaagtcctttctgtcatgtaagataacattcacaggttcttgagattaaggcatggacattttgggggagccattattttgtttaccataccacacaacccaactgtatttgcactcttgaccaattatccaagaattgtacttcttggcctttaccccccaaaaataaaaacctatgttcatgcaaaaacctgtgcatgaaagttgtagcacatttattcatgatagccaaaagctggaaacaacccaaagtccatcaatagatgaatgattaaactaactgtaccaagctgtggtatctctgtggtatcaatgaaatactatatagtgaaaggaaaaaagcctactaatacacacagcactttggatggaactcaagggaattatgtgtaaattatgctgagtaaaaaaagccagtgttaagttccacgtgtaattccatttatataacattcttgatataacaaaactatagaggtgaagaaaatatagtggttgcaagattagcaattggtgggaggattagaagctataaaagagtagtgtaagggatatgtgtgctgcttgaacagttctttgattaaggtagtagttacacaaatctctatacatggcataattgcatagaactatacacacacaaaaaaacatgtaaatgcatatataaattgtgaaatgtaaatatgttctgtggattgtaccaagatcagtttcctggttttgatattgtactataattatgcaagatgtcaacattgggggaggtattatgaagtttgcatctttcctctttatacatttctttgcaactttctatgaatttataatatttcaaaataaaaagccttttttaaggaaaagatgcaaggttcttcttgttgatggggttaggtttgcaagccatttttgcaccacatgatttcctttatcctcatcaaaactgccagaatagattatccgcagaatgaatactgaacccaagctagaaaataaaattccttctcttaggagtttggcaattaggatgaagaacctagttcagactgacaattttacagttgacaatgatgactatgcaatctgattggtaaaccaaaatctcttttcagtaaatagtataggaactactgaacattcgcacaaatagaaagaaccttaattctacctcacaacactcacgagttaattcaaatggttcctttatctacatataaaacctagaactataaagctcccggaaaaaaatattgtatatctttataagcctgaggtaagcaaagattttagataggatccagaaggtactaattataaaagaaaaaattgatagaatggacttcaaaaaattaataaaattgctcatcaaaagactatattaggggctggacagagtgacatacgcctgtaatcccagcactttgcgaggccaaggcaggcagatcacttgcagtcaggagttcaagaacagcctggccagtatggtgaaaccctgtctttactaaaaatacaaaaattaacctggcatggtggcaagcgcctataatcccagctactcaggaggttgagacacgaacatcgcttgaacctggaaagtggaggttgcagtgagccaagattgtgccactgcactccagcctgagcaacagagtgagaccctgtcaaaaaaaaaaaaaaaaaaaaaagactatatcaggaaagtaaatatacaaaccacagacatatagaaaataattgcagtacacatatagaacaaaggatttgaatatagaatttataattaccttcttcaactcaatagcaaaaaagacaaacaataaaaataaacaaaagtcttaagcaggaactttacaaaggaaaacatgagtgctcaataagtaaatgaaaatgtgttcagcatcatcagtcaccaataaaatgcaaattaaaacagcagtaagatactactacacacccactagagtcattaaagtttaaaagaccaactgtgattgttaattttgtgtgtcaacttaactaggctttgatatctatttgtttggtaaaacactagtctagatgttgctgtgaaggtattttttcagtatataattaacatttacatcagtagagtttgagtaaaacttatttctttacataatgtgatgaaccttgcccaatcagttgaagtccttaaaagtaaagtgtaaggttccccaaagaagaaatcctccttaagattgtgccctggtttaaatgatggtgccctctctctccaaaattcatgttgaaacctaatgcccaatgcaacaaacagtattaagaggtggtgtgttctttgggaggtgatgaagtcatgagggctccatgctcacgaataggatcagcactcttataaaagggcttgtgggagtaggttcccttccgctcttctgccatgttaggatgcagcaagaaggctctcacaagacacataatctgccagcaatttgattttagaattatgagcctctaaaatgtgagaaataaatatctgatgtttataaattaccgaggctgtggtattttgttatagcagctcatatggactaagactgactggaacataaaaatcctacctgaaggccgggtgcggtgccccacgcctgtaatcccagcactttgggaggccaaggcaggtggatcacgaggtcaggagtttgagaccagcctggccaacatggtgaaacctcgtctctactaaaaatataaaaattagccaggtgtggtggcaggcaccggtaatcccagctacttgggaggctgagacaggagaattgcttgaacccaggtggtggaggtgatctcagcagtgagctgagatcatgccactacattccagcctaggtgacagagcaagactctgtcaaaaaaaaaaaaaaaaaaaaaaaaaaaaaaaaaaaaatccctgcctgagtttccagcctgctgcccttcagaattctgactcaaaactatattaactcctacttgagttgtcagcctgctggcctgccctacagatttcagacaatccaacaccctacaatcccataatctgattccccttaaagtcactctttttatctctcttttccttcacacacacacacacaaactcacatctatacacacacatacacacacacatatcccattgtcaaaatcctgcaccatggtggtacattggttacaattgatgaatctacactgatacagcataattatccaaaagccatagtttacattagagttcactgtgggagttgtacattctacattataacagtgtacaaagtgttttcactttcctaaaaatcctctttactctacctctccaaccctcccactgccacccaccaactcctggcgaccactgatctttttattaatactatatccacagttttgccttttccagtatatcagacgctaaaaacgaccattagaaaaagcacatggtgtgtatgcatgcatgtgtattacatatgaaagtcagtctgagtcttcattaatttacgggaatagatgtcagcagaactggaagagttctggtagcaaaaggtctcccctggatgttttcttagcttcaagtagttaattcaactctctcaaaccatatggcttcctggattctatgaaggagaatcctatatttacaaaatattgtaggactatggagtcagaagaagaaataaattttgggatcaagggagttgtatattagcaggattgtttttattattttcactgcatgttatgaaaggaaaaaaaaaatagtcctagaatctgcactaatcactgacactgatcacaaacataggaccacccattaagagccagaatatgtttatttttgttataattgtttttgtgtgttgggggggaggaggaaggagtgtgaatggtttaggtaaagggtgggagtggaaatgtttattaaaaaacataaataaattttgttcttaagtaacttcctctgaatgaatctgactaatcttgccagtgttttcttggcttccaagcaatctttatcacaccaggaagtaggtcagccagacctggggcaagacaagacaattggttggtatgtaaatagctgaaagctttctcctacaaatcagtaggggatttgtaaaatttctatacttaaaatgttgctagtcatatctcagaggctctccccaccttttcatcttccttcaccctgaattcactgatacaattatgtatgcacacaaattaagaggtggaaatattcagtaaagtcagtttaataagaaagtagaatttttaacactacagaacatgtctattatgtagataaagctaaacaggagagaaacaccgttacattaaatacaacgtaacgactctgttaaaaatatgattcctcctagattgattctaaaagctatcatttatgaatagaaagttttagttactggagaatatgattgcatatgtctcagaataaagtagcaactcttagagatgtggtctatagactccctagtccatactatccttcaacaatctataattagacattgagagttttgacacatgactcagagtcttgcacctctccacaactcttgcccaccttttagaaggtttcaggggctgtgtagataactcattcaatggcctatggttttcagttctactccattcagccaccatccacccctttccaagtccacccttatcatcattcagcatcatcccatctcctaaagtttaacccacagtctttcacctgactcttggatcaacaattctctcctatcttagctaatgccacattacactctcacttcaggtaggcctagtcccatatccctctattttatttaactcaatcggtcttcttttgagttttctttcttctccatcatatattctcattgtctagtgataattattcctaatattttgaaaaataagaacattaaaatattctaacttgaatagaaatcttactttttatatagttataactatatataaaaactactacatatatttatatataaacttttttctagctttattgagatataattgacaggtgggggggaagggggagggatagcattaggagatatacctaatgctaaatgacgagttaatgggtgcagcacaccagcatggcacatgtatacatatgtaactaacctgcacattgtgcacatgtaccctaaaacttaaagtataataataataaaaaaaactaaaaaaaagagatataattgacaaaaattgtatatattatggtgcgcaatatgttttgatgtatgtatacattgtgaaatgcttgccacaatcaaactaattaacatgtctatcatctcacatagttttgtgtgtgtgtagtgaaaacatttaaaatctactcttagcaacgttcaagtatacagtactttatcattagctataatcaccatgctgtacaatagacttacagaatttattcatcctgtctaactgaaacttttatttttcataattttaaaatcttgttaaaataccgttcactttaaggtctacattgtattctactaatttcatagttttatgtttcacaattgggttttaatccatcaggagttcacctttgtaaaagtggaataggagtgaaaactcgaggagctcagatctgagaagcatcagggagtgccgttggcatggattaggcaggtgagctaaggacatgagacttccctactgtctgcagccgggcactacacacccagcccttactccccaggcaggaaaccataggcctactctcaggagaagttacactagatggattttggactccatacagcagaggaaagggttaaacagcagcaggaagggataaaagtatttgtcaaaatagaaggaataagtgaatctctatatactaaatattaagattcccagataattcccttgttcagaacagatatacaccctctaaacaagagattggaaccttctttcctcaagacaatagactgcactagagagaagtgttccagatacaatgaagtagtggtaaatactatgaagaaaatagctttgggaggccgaggcaggtggatcacccgaggccaggagtttgagaccagcctaatcaacatggagaaaccccatctctactaaaaatacaaaatattagccgggtgtggtggcacatgcctgtaatcccagctactcgggaggctgaggcaggagaattgcttgaacctgggaggtggaggttgcggtgagccgagatctcatcattgcactccagcctgggcaacaagagcaaaacatctcaaaaaaaaaaaagaaaaagaaaaagaaaaagaaaacagcatatgaattggggtagattattttatttggaaaggccagtggtggccttaatgattaggtgacatttgagcagatacttgaaacaagtgagaaagccatgagggtgatacggtttggatttgtgtctctgcccaaatctcatgtcaaattgtaatccccaatgttggaaatgggtcctggtgggaggtgattggaccttgggggcggtttctcatgagtagtttagcaacaccccccataatgtggttctcatgataaagttatcatgagatcttgttgtttgaaagtgtgtggcacctcacatacacctccctctctcttccttctgctccagccatgtaagacatgcctgcttcccctttgcctttcaccatgattctaagtttcctgtggcatctccagaagcagaagccactatgcttcctgtatatagcctgcagaactgtgagccaattaaaacttttttctttattaattactcagtctcaggaatttcttaatagcagtgtgagaatggactaatacagatggtaacagagaaaaagttgtatcagaaagaagaaacagaacttgcaatcctcctgaagtagaagtgcttggactatttgaggaacagcaaggagcccagctggttgcagtggcataagcaagatggaaactagcagaaaatgaggtcaaagaagaagccatatgctgaatcatctaaaacttcataggccatggtgaatactttggatttatcctaaaagggatggagattctctggaagctttgaacagaggtgtgacaagaactgactacatatggagaatctgactacctt

SEQ ID NO: 66 - DNA, 32616 bp, Homo sapiens
aaggtagtcagattctccatatgtagtcagttcttgtcacacctctgttcaaagcttccagagaatctccatcccttttaggataaatccaaagtattcaccatggcctatgaagttttagatgattcagcatatggcttcttctttgacctcattttctgctagtttccatcttgcttatgccactgcaaccagctgggctccttgctgttcctcaaatagtccaagcacttctacttcaggaggattgcaagttctgtttcttctttctgatacaactttttctctgttaccatctgtattagtccattctcacactgctattaagaaattcctgagactgagtaattaataaagaaaaaagttttaattggctcacagttctgcaggctatatacaggaagcatagtggcttctgcttctggagatgccacaggaaacttagaatcatggtgaaaggcaaaggggaagcaggcatgtcttacatggctggagcagaaggaagagagagggaggtgtatgtgaggtgccacacactttcaaacaacaagatctcatgataactttatcatgagaaccacattatggggggtgttgctaaactactcatgagaaaccgcccccaaggtccaatcacctcccaccaggacccatttccaacattggggattacaatttgacatgagatttgggcagagacacaaatccaaaccgtatcaccctcatggctttctcacttgtttcaagtatctgctcaaatgtcacctaatcattaaggccaccactggcctttccaaataaaataatctaccccaattcatatgctgttttctttttctttttctttttcttttttttttttgagatgttttgctcttgttgcccaggctggagtgcaatgatgagatctcggctcaccgcaacctccacctcccaggttcaagcaattctcctgcctcagcctcccgagtagctgggattacaggcatgtgccaccacacccggctaatattttgtatttttagtagagatggggtttctccatgttgattaggctggtctcaaactcctggcctcgggtgatccacctgcctcggcctcccaaagctattttcttcatagtatttaccactacttcattgtatctggaacacttctctctagtgcagtctattgtcttgaggaaagaaggttccaatctcttgtttagagggtgtatatctgttctgaacaagggaattatctgggaatcttaatatttagtatatagagattcacttattccttctattttgacaaatacttttatcccttcctgctgctgtttaaccctttcctctgctgtatggagtccaaaatccatctagtgtaacttctcctgagagtaggcctatggtttcctgcctggggagtaagggctgggtgtgtagtgcccggctgcagacagtagggaagtctcatgtccttagctcacctgcctaatccatgccaacggcactccctgatgcttctcagatctgagctcctcgagttttcactcctattccacttttacaaaggtgaactcctgatggattaaaacccaattgtgaaacataaaactatgaaattagtagaatacaatgtagaccttaaagtgaacggtattttaacaagattttaaaattatgaaaaataaaagtttcagttagacaggatgaataaattctgtaagtctattgtacagcatggtgattatagctaatgataaagtactgtatacttgaacgttgctaagagtagattttaaatgttttcactacacacacacaaaactatgtgagatgatagacatgttaattagtttgattgtggcaagcatttcacaatgtatacatacatcaaaacatattgcgcaccataatatatacaatttttgtcaattatatctcttttttttagttttttttattattattatactttaagttttagggtacatgtgcacaatgtgcaggttagttacatatgtatacatgtgccatgctggtgtgctgcacccattaactcgtcatttagcattaggtatatctcctaatgctatccctcccccttcccccccacctgtcaattatatctcaataaagctagaaaaaagtttatatataaatatatgtagtagtttttatatatagttataactatataaaaagtaagatttctattcaagttagaatattttaatgttcttatttttcaaaatattaggaataattatcactagacaatgagaatatatgatggagaagaaagaaaactcaaaagaagaccgattgagttaaataaaatagagggatatgggactaggcctacctgaagtgagagtgtaatgtggcattagctaagataggagagaattgttgatccaagagtcaggtgaaagactgtgggttaaactttaggagatgggatgatgctgaatgatgataagggtggacttggaaaggggtggatggtggctgaatggagtagaactgaaaaccataggccattgaatgagttatctacacagcccctgaaaccttctaaaaggtgggcaagagttgtggagaggtgcaagactctgagtcatgtgtcaaaactctcaatgtctaattatagattgttgaaggatagtatggactagggagtctatagaccacatctctaagagttgctactttattctgagacatatgcaatcatattctccagtaactaaaactttctattcataaatgatagcttttagaatcaatctaggaggaatcatatttttaacagagtcgttacgttgtatttaatgtaacggtgtttctctcctgtttagctttatctacataatagacatgttctgtagtgttaaaaattctactttcttattaaactgactttactgaatatttccacctcttaatttgtgtgcatacataattgtatcagtgaattcagggtgaaggaagatgaaaaggtggggagagcctctgagatatgactagcaacattttaagtatagaaattttacaaatcccctactgatttgtaggagaaagctttcagctatttacataccaaccaattgtcttgtcttgccccaggtctggctgacctacttcctggtgtgataaagattgcttggaagccaagaaaacactggcaagattagtcagattcattcagaggaagttacttaagaacaaaatttatttatgttttttaataaacatttccactcccaccctttacctaaaccattcacactccttcctcctcccccccaacacacaaaaacaattataacaaaaataaacatattctggctcttaatgggtggtcctatgtttgtgatcagtgtcagtgattagtgcagattctaggactattttttttttcctttcataacatgcagtgaaaataataaaaacaatcctgctaatatacaactcccttgatcccaaaatttatttcttcttctgactccatagtcctacaatattttgtaaatataggattctccttcatagaatccaggaagccatatggtttgagagagttgaattaactacttgaagctaagaaaacatccaggggagaccttttgctaccagaactcttccagttctgctgacatctattcccgtaaattaatgaagactcagactgactttcatatgtaatacacatgcatgcatacacaccatgtgctttttctaatggtcgtttttagcgtctgatatactggaaaaggcaaaactgtggatatagtattaataaaaagatcagtggtcgccaggagttggtgggtggcagtgggagggttggagaggtagagtaaagaggatttttaggaaagtgaaaacactttgtacactgttataatgtagaatgtacaactcccacagtgaactctaatgtaaactatggcttttggataattatgctgtatcagtgtagattcatcaattgtaaccaatgtaccaccatggtgcaggattttgacaatgggatatgtgtgtgtgtatgtgtgtgtatagatgtgagtttgtgtgtgtgtgtgtgaaggaaaagagagataaaaagagtgactttaaggggaatcagattatgggattgtagggtgttggattgtctgaaatctgtagggcaggccagcaggctgacaactcaagtaggagttaatatagttttgagtcagaattctgaagggcagcaggctggaaactcaggcagggatttttttttttttttttttttttttttttttttttttgacagagtcttgctctgtcacctaggctggaatgtagtggcatgatctcagctcactgctgagatcacctccaccacctgggttcaagcaattctcctgtctcagcctcccaagtagctgggattaccggtgcctgccaccacacctggctaatttttatatttttagtagagacgaggtttcaccatgttggccaggctggtctcaaactcctgacctcgtgatccacctgccttggcctcccaaagtgctgggattacaggcgtggggcaccgcacccggccttcaggtaggatttttatgttccagtcagtcttagtccatatgagctgctataacaaaataccacagcctcggtaatttataaacatcagatatttatttctcacattttagaggctcataattctaaaatcaaattgctggcagattatgtgtcttgtgagagccttcttgctgcatcctaacatggcagaagagcggaagggaacctactcccacaagcccttttataagagtgctgatcctattcgtgagcatggagccctcatgacttcatcacctcccaaagaacacaccacctcttaatactgtttgttgcattgggcattaggtttcaacatgaattttggagagagagggcaccatcatttaaaccagggcacaatcttaaggaggatttcttctttggggaaccttacactttacttttaaggacttcaactgattgggcaaggttcatcacattatgtaaagaaataagttttactcaaactctactgatgtaaatgttaattatatactgaaaaaataccttcacagcaacatctagactagtgttttaccaaacaaatagatatcaaagcctagttaagttgacacacaaaattaacaatcacagttggtcttttaaactttaatgactctagtgggtgtgtagtagtatcttactgctgttttaatttgcattttattggtgactgatgatgctgaacacattttcatttacttattgagcactcatgttttcctttgtaaagttcctgcttaagacttttgtttatttttattgtttgtcttttttgctattgagttgaagaaggtaattataaattctatattcaaatcctttgttctatatgtgtactgcaattattttctatatgtctgtggtttgtatatttactttcctgatatagtcttttttttttttttttttttttgacagggtctcactctgttgctcaggctggagtgcagtggcacaatcttggctcactgcaacctccactttccaggttcaagcgatgttcgtgtctcaacctcctgagtagctgggattataggcgcttgccaccatgccaggttaatttttgtatttttagtaaagacagggtttcaccatactggccaggctgttcttgaactcctgactgcaagtgatctgcctgccttggcctcgcaaagtgctgggattacaggcgtatgtcactctgtccagcccctaatatagtcttttgatgagcaattttattaattttttgaagtccattctatcaattttttcttttataattagtaccttctggatcctatctaaaatctttgcttacctcaggcttataaagatatacaatatttttttccgggagctttatagttctaggttttatatgtagataaaggaaccatttgaattaactcgtgagtgttgtgaggtagaattaaggttctttctatttgtgcgaatgttcagtagttcctatactatttactgaaaagagattttggtttaccaatcagattgcatagtcatcattgtcaactgtaaaattgtcagtctgaactaggttcttcatcctaattgccaaactcctaagagaaggaattttattttctagcttgggttcagtattcattctgcggataatctattctggcagttttgatgaggataaaggaaatcatgtggtgcaaaaatggcttgcaaacctaaccccatcaacaagaagaaccttgcatcttttccttaaaaaaggctttttattttgaaatattataaattcatagaaagttgcaaagaaatgtataaagaggaaagatgcaaacttcataatacctcccccaatgttgacatcttgcataattatagtacaatatcaaaaccaggaaactgatcttggtacaatccacagaacatatttacatttcacaatttatatatgcatttacatgtttttttgtgtgtgtatagttctatgcaattatgccatgtatagagatttgtgtaactactaccttaatcaaagaactgttcaagcagcacacatatcccttacactactcttttatagcttctaatcctcccaccaattgctaatcttgcaaccactatattttcttcacctctatagttttgttatatcaagaatgttatataaatggaattacacgtggaacttaacactggctttttttactcagcataatttacacataattcccttgagttccatccaaagtgctgtgtgtattagtaggcttttttcctttcactatatagtatttcattgataccacagagataccacagcttggtacagttagtttaatcattcatctattgatggactttgggttgtttccagcttttggctatcatgaataaatgtgctacaactttcatgcacaggtttttgcatgaacataggtttttatttttggggggtaaaggccaagaagtacaattcttggataattggtcaagagtgcaaatacagttgggttgtgtggtatggtaaacaaaataatggctcccccaaaatgtccatgccttaatctcaagaacctgtgaatgttatcttacatgacagaaaggactttgtaaatgtgaagaaattaaggatcttgagcaggagagaatttcctatattatctgcatgggccccagggcaatcagaagggtcattatgagaggggaaggtaaaacaatccgagttagagactttggaagatgctatcctgttggctttaaagatggagaaataaattatgagccaaggcaacctttagaagctggaaaagtcaaggaataaattcccctagagctttcggaagaaacacagccctgctgacatcttgattttagttcataagattttagttcataagtttttaagtttttagttcataagattttagttcataaaattcataagattttagttcataagttagaagttctaacttctaacctccagaactttagataatgaatttgagctcataattttgcagtattttgttaataacataagcagaaaggcattacatataagtaagtgaatttttaattcaagaataaattaccaaactttttcatcgtggatgtctctgctctctaagatcttactctttcttcaagaatcaccacatattctacttctttcatgaagtctgttattatttattaatcatatatttatttttgaatgccttttaaatgtcaggcactgttctggaacctgtgaataatgcaggcaaggtccttgctttcacagacacaaaattccagaaaggggacatagatagtaaacacacaaataagacaatattagataaaataaatggtataaagaaaatcaaacagccttagtagttgctttagtttggtggttggagaagccctttctaaaaaggggaaatttgagctgagatctaaatgttgagaaggatgtgaaaatctgcataagaaatattcaaaatagggcaacacctgagaatcacagctactgaggaaatcacaagaaagccactgtgtctggagcataatgaataagagtgtggaattttagtagataagctcagatagatgggcagggaatagaccattgagatcctcatagggtaggataagaagattatatttttccattgtgtagtaggaagctactggaagattttaaacatgggaaaggcatgatatgatttatgttaaaacataattactgcctatataaggtgtaaggaaggggtccagtttcagttttctgcatatggttagccagttttcccaacaccatttattaaatagggaatcctttccccattgcttgtttttgtcaggactgtcaaagatcagatggttgtagatgtgtggtattatttctgaggcctctgttctgtttcattggtctatatatctgttttggtaccagtaccatgctgttttggttactgtacatgatgcctccagctttgttctttttgcttaggattgtcttggctatacgggctctttttttttggttccatatgaaatttaaagtagttttttccaattctgtgaagaaagtcaatggtagcttaatggaaagtcaatggatagcattgaatctatacattacttggggcagtatggccattttcaagatactgatccttcctacccatgagcatggaatattcttccatttgtttgtgtcctcttttattttgttgagcagtgatttgtagttcttcttgaaaaggtccttcacatcccttgtaagttggattcctaggtattttattatctttgtaacaattgtgaatgggagttcactcatgatttggctctctgtttgtctattattggtgtataggaatgattgtgacttctgcacattgattttgtatcctgagaatttgctgaagttgcttatcagcttaaggagattttgggctcagatgatggggttttctaaatatacaatcatgtcatctgcaaagagagacaatttgacttcctctcttcctatttgaataagttttatttctttctctttcctgattgccctggccacaacttccaatactatgttgaataggagtggtgaaagagggcatccttgtcttgtgccagttttcaaagggaatgcttccagcttttgcccattaggtatgatattggctgtgtgtttgtcataaatagctcttattattttgagatatgttccatcaatacctagtttattgagagtttttagcatgagggggtgtttactgaaggtcttttctgcattgaagaattaaagacttaaatgtaagacctaaaaccataaaaaccctagaagaaaacctaggcaataccattcaggacatagacattgggcaaggacttcaagactaaaacaccaaaaataatggcaacaaaagccaaaattgactaatgggatctaattaaactaaagagcttctgcacagtaaaagaaactaccatcacagtgaacaggcaacctacagaatgggagaaaatttttgcaatctatgcatctgacaaagggctaatatccagaatctacaaagaacttaaatgaatttacaagaaaaaacaaacaaccccatcaaaaagtgggcaaaggatatgaacagacacttctcaaaagaagacatttatgcagccaacaaacatgaaaaaaagctcatcaccggtcattagagaaatgcacatcaaaaccacaatgagataccatctcatgccagttagaatggcaatcattaaaaagtcagaaaacaactgatgctggaaagcatgtggagaaataagaacgcttttacactgttggtaggattgtaaattagttcaaccattgtggaaaacagtgtggagattcctcaaagatctagaaccagaaataccatttgacccagcaatctcattactgggtatatacccaaatgattatacatcattctactataaagacacatgcacatgtatattcattgtggcactgttcacaatagcaaagacttggaaccaacccaaatgcccatcaatgacagactgaataaagaaaatgtggaacatatatgccatggaatactatgcagccattaaaaaggatgaattcatgtcctttccagggaaatggttgaagctggaaaccatcattttcagcaaactaacacaggaacagaaaaccaaacgctgcatattctcactcataagtgggagttgaacaatgagaccacacggacacagggaggggaacatcatacactggggcttgtcgaagggtggggggctaggggagggatagcattaagagaaatacctaacgtagatgacaagttgatgggtgcagcaaaccaccatggcgcatgtatacctatgtaacaaacctgcacgttctgcacatgtgtcccagaacttaaagtataaagtgtgtgtgtatatatatatataaaattactgccactgccataaggagaatggtttgggctgaggaaagaatagacaagagaacaccaattaatagactattacactgctaggttgtgaagttggaaaaaaggtgacagatttaagatttatttgtgggttgtagtcaacaggattgctgttggattggctatgcaagtgaaggaaagagtatggtggtgtctttaacgttggacaattattatttgggatatatggttctgggagggaagaatgtaaaagaagcaattaaattgatgactttgagtggagaggttgtcaattgacaatttggagatgttgtcaattgacaattagacgttggtcctggagtgcttatttctgagtgcttattatttcaaataatgagcttaaatgtgattaatctggaggaatgcagacagagcagatatcaagacacttcaacttatacatacagtagaagagaaagagcttaaaaaaaagagagagagaaaagactgagcaatagtgctctgagaaaggtagagaaagaccaggagagtatcaaaccatgaagccaaggttggggcaggggttctttcagtaaagagattatagctatttgtgttgaatgctactgagaagccaaataaaaaacagattaggagaatggctggatttaatcaacttgtgtcaattcagcacagtagagggagaatatacagagcagaggggaatgattagaatgatggacaatagaatctgagctagatgcatatggaagtaaatggaaagataaaacaggtgataaatagtgaagtgatgaggttggtggatcggtaggttcagtgagactgagagttagatgttagagtgtaagcaataaaataggtgagctggaagatgcttggaatcaagattttgaaagtggtgctgtaattaatcataatgatatcaagatatgtatgatttcaggaaatatggtggaagaggccatccctggaatggagaaggccaaagaggagaggccagggaagatgctaaatatgtggtccatgtagatattgaaattaccaagatgtcaaggatagaggtacaacaaaagcctatgagcttttgcatcaatgatttgcccaactttgtataatttcctcctctttgaacttcttaactttgtgcccccttcataatatatgtcttattctttgccttattgtgtatttttttcttcttcttctagactaggcaatgaaaataagcttgtttgccatcttctgtaaagatacacaaactagacattttccaacacagtgtcgcagtgaataaggattatgagatttaaatagtgactctaggaagcctctatataattgagggcaaaaccatttcatgaagggccagtcctagttttgaataggtaggagaatgcaagataatggtttaagagtaatgcttcagagaaatcttatgtcatatgacaaagatgtatagaaacaatcaaagtttatcttcagaaaagatctgtcaatttttaaatagtacaaaaataaacagacatttatttccagacttatcttttacataagttaaatacacatttgtctgaggcactgaaacattcgcatacacaacccaaattcccaggttttgtcagcagatcaatgttaataacaaatcaagttttttttttaaaaaaaacagtgaacagtgttttatacaagcatattgactatttctttcttaaccttaaacattctaaacgtaaaattgtaaagaagattctcctgagttatctttaatgatatttatttcattttctccctcttcccaaaagaaaatttttttcaattatttatataaatactattatctgtaatcagcgtttgatttaaaaatattaaaacccacagtgcttgacacagaatattttctcaataaattgtggctgaacaaattaacgaagcatccacagatccctcaaaacattttaaaaggtcagtcttatggcacattcaggctaatgagacaatattctttgtgggctagcacataggcctatcctaaggacaaacattcaaccttaaatatctcaatatgccaatcagatttctaaaaatttattcacaaatcttaatacaatcatttctttggattgtttacataatattcagagaggtaaccccaaagaagatatactgattgtgacataacaaaaaaaaatcaatgattgtaggcttaaacacagtttataaccatagtgtcctaataagacataaataataatcttcaataaattaagtaatatacagtaccattaaatgtcagtgacaatgagatgtggaaaagaagtattatcgtcattattattattgctgagaactacttagatatcatttggttttgtttttaaataagaaagggcattaattagaatgggaacgtaactttttccagtcacaaaccccgtacagttctctctgaggcactagcctctttgcatccatcttggttacagatagctaaaattagctataaataaaattctctgcttttcacttaaaataagtgtatactatttttaaaagggcctttttttttctcttttaatcttcttaagaggagctaaatagcagtcctgagctgaggtttacctgaaaacttgcaaaagttcaggtaagaaaatataggcagagtccaaagaaagtgaactctgatcttaaaactagtaaaacaaaataggagaaacgaagtgatgagaagactgtgtctcttagcaaaatggctaaaagaagaaaagaaaaggaacagcatgcaggtagccaggcttgattccaatgcacctactgaattggcttcaagactgagataaaattaatgtgtgaaatgaatttaagcattttgaagaggtattttatgaggtcattgctacttttgcaatgtgatatggactgctaaattaaactgtacaacagaaaatctgagaaaacatatcattattcaagcacagcttggtacttcattaacctcatagcaaaatctgagtaccaggcctgcagtgcacaaggataaaaaaaagtttgcttcaaaagtttaaacctaaatttgaacaataatttggttttcttctttgttattgcttattttaaaggtagacccttttgctgatatagattttacatgttaccagccatataaacaaattctggaatatctcaacaaaatattcttattttaagataacactgcagtggctccaccaccttaataaatttggcattttgatttaaaaggaagttttaacagtcacactaaaaaggtttatactcttggtgaaaaaggaacatcacttataaaatattttaacaagcaattgtagtaaaatttctactgattttacagatttaaatccaagacagcttctttttggtatatgtacaagtttaataactttaagaaatcaaacaagcttttacaggtgattctaccctatgaatttagaaatttcaaattattgtttcattgctgattttaaaaagtagacatgaaattactggtaatgtctaatttaaatattcatttaataatgcactgatacctgtttttgtttgatgacagaaaaataaccaaaagtactttaaaatttcaaacattagttacttctaatgcatcatggaagatgcattggaaacatcgacagtgtaaaaactttcagcattttgccatcttgtgacagtgtttaagtattcaaacatctttactttcgttcttataatataagttgaaattcaagtaaaaagacgtcaaaactcatttctctctggtttataaaacagaataaaaactgttttccaaacttaacagcaacagcaaaatctttagagtagtgacataaaagtcttcacaagtatgactcctttctccgcaacaggagtactgacttctgttacagaagatgttaagtaacataaggagtttaatataaatattattaaataattaaattaatagacatggttcatataaataaataaatatgatcattagacttctacagttcagtcgaacgttcttttagtagtactgtgggattgatatcatctagtccggagcgggaagaacttgcattgatggtgactgttttaatgagctctggatctggaacactgaatgaagtaaagggacagcccttcacgttattgcagatgagagactgaattgaggcagtgttgatgatttgaaaacccacttctccaccaaaagtgcttggcttccagtaggcaggagaacatataacattacccataagtcctttcaaggagaatggtgctccaacttctaccatggtttcaccaaagatggcatctggccgaggcttttctaccagaagggcaggatacagctccacagcatcgatgtcaccatagagtgcttccaactctgcagacatttccttttctcctgtgaaggcgatgaagacagagatacaaccaatgtcaaacttcacaaaataaaaaacagtttgattcttttgctcaatttgctgccaacttctctgtttccatttgacccctgattcttttaagaagtttaggggccaggcgcggtggctcacgcctgtaatcccagcacttcgggaggccgaagccggcggatcactaggtcaggagtttgagaccagcctggctaacacggtgaaaccccgtctatactgaaaatacaaaaaattatccatgcgtgcgacgtgagcctgtagtcccagctactcaggaagttgaggcaggagaattgcttgaacccaggaggcggaggttgcagtgagccgagatggcgccactgcactccagcctgggtgacagagggcggctccatctcgaaaagaaaaccaaaaacaacaaaaacaaacaaacaaacaaaaaacgaagaagtttagaaactgtttcttacctgtaagttcttcaaatgattcatagggcttcagcataaagcgtttgcggtactcattaaaagactggtatttcatctgcctgctctggtcaatggaagcctgtgatactttctgtactgcgggtggaacattcctaccaccagcaacctgtggaaagtaaaattagttgtaaaacaagaattttaggcatatttactgtttgtattcagcttgccttaggtacaaatcaggtaaaactgaaactcccagcggagacaatttttatttgctggaaagatgcttacctacatttcaacaggagctctgcttaaaattcaatgggacaccagcctagaactaatttgcctttttacatttcaaaaataacactagtattcaagcctaaaatatttattcctataagattatagatactttttgaaaatatttttaaggtaggggtacaatttgctatttgtctgacaactgtagactagactaaaagtttagacttttcaaacaaagttaggcttcttatatcaataaaataattttactagcaatataactaactactcttttagtaagtttaagaaaaataatttccgtggcagaaattctaaagttactgactagtcttttgttttggttttcaataataatgcttaccctgccagcaatttgcctggtgaatgattcaacaaactgggtaattccatgttccagcaatatagagttgttgtagataaactgttgatagttgtatttctggtcatgaatttgaaaggtgtcaggcagaaggggatgccagtgatagagggtgttaaattcagcagcaatacgattttggtactggaattgtttgttgaaaagtagttctgggtcaaatttcagtttgaagtgatagccactcaagtgttgcacataatcttcaatcacaatcttaatagtctctcctatttgcacaaaataaataataaaaacatttattgcatctgatcacaagctttcaagcaactggaatgcaatttttaaaatttgctattccttcatttctgttttcttccttgtcagtatcaaaagatagctattttatcagtcatgcttacatatttaatgtatatagaatgtgtgagttttcatttaccacatcttgtcatttactcaaaacataacaaagatagcacactaattttccctggggaagagggttttatataaatcattttcttgtttacctatcagtattagcctgcttgtctggaacaactgctcatcaccccattcaggatgctcctgtttaagcacatcgcatactctgttgtgttcccgcagccagattgtggcatacatcatcagaccaggcaccagaccaaagacctcctgccccacagcaaaccgtagatgctcagggacttgaggagggtagatcatctctgcctgagtatctttgactgtgggaggatacatctctccatcaattatctaaaaaaataaataaataaataaacatcagttaaaaagttaaggaacacatttttagggattttaaaatatgggtataagcggtaataactaagtcttaatagtcaaaggaagcatacctgatatttcatttttccatccttgaaaaggcgcagtttacgctgtctagccagagtttcaccgtaaatatgatttaagtccacctagaaaatgatgaaaaaattttaatttgttgctgttgaagtttttcttatataaagtgtctatcatataattcatcattaaataatttgatcatttagctttctttaaaatttttaaataaaatatacatttttcatagccatgaattgctaaattaatttgtttatccaccaaagctacaaactgatatgtctttgtgtttaacggaattaatatactatattgagcttatatcatatatattatatacttcactatgatgatatggtaattataaaaaagtataaaaatgtattatttataaaaaattcttacgaataacttgaagctatgctattgaaatccaaaaaataataatgcggcaaaaacctcactttacaatattgaaagcggcataatcatggtacaatgtgtttttgaggacataacattttgcagtactaacattttaaactaaaaaatacaagggtcaaattacaaataacaatacctgtacatatgtatgtgtgtgaatgtttatatatgtgtgtgcatgtctgtgtgtgtgtataattttactagaccagtgaagtaaatggaaaattcctttaaggtttttatagataagacttctttttaaaaaaagtggataagttatttggatctatctatctgtatatctcctttaatgttagcccttgactatgatttggtataattttactaactctaagatattaactctatcttaccccatggcccagcccgttggtgaaagctggccctcgcttatgatctgtcttgaaaaactgatgcgtgaagtgctgggcaaagaatgcaaacatcatgtttgagccctggggatcagggatgaactttcttcttagaagcaatttttccacaatctcatttgaatcaggaagctgctttttacctgaaaaatgagaaagctaaggtaagaatccatctatgtattcaagaaaggagatggtgactgtcaatctaccaagaattcttcatttatatgagaattacaattgtgaataggatcataatataaacaacagttctaagatatggtggaacaacttcttactgaatgattttatctattttaattagaattatttcatttctaaagaaataatttgaaaatattaagacattataccaagacgctcatttgcttttacataatagtttatatagactcatactttaaaaaatacccatagataaccatgctaaaagtaaaaactgcttttgttaataaataaatggtagtctaaggtcaatttttttttttggcagcaatgcagcccgtcttatagttaatacatctctaatggattcttcttactcacctttgacacccaagggagtcgggcaatcatcaggcacaggaggaagggctctagtataataggagaggttagagaaggcttcccagcttttgtagccatagtcagcattgtaagttggtggactgtcaatcaaatgtgatctggctgaaattttcaaagaaaaaaatgttttatttattctcatttgttaagtaaatcaaccattatttttattgtaaaatgtggaaagtggcacctgaggttgaatgtaactccaaaataaaaaaaatctatttttaaacaactacactttatagtctaatggccacttgaaatacatctttaataaaatacatatactctgcacattataatctggcaatattgatttttcaggtagccatctgctcactatccaagaggcctatgaaaggaatggctgagtatggcacccactttagaatcatggaaagttattttcttgctgatccaaatccaaatttattttaatgggtgctacatgttcagaacaattctgtggcccatgggcattcaataaacagctggaccatgctacctccacaaactgaccaaacagtaaaggttagaagaggtatacagagttgtgagcagactgtataaactggatgggactaaatgtcaatatttttggcgattaagatggaaggcaaacttaaaagctatcttaaagtctttttgataagcttggaaatatgtttttagattaggcttacagtattataaagcatatttttctttgagaaggctaaaaaccttagaaagacacttgtacttacatgtcaacacataactcataattgcatttcgaaggaagggaatgttattcacaacgttccaaaatcccttgaagtgggtaagtatgtagtgcactgtgtttggagtgggtttcagaaataattttattcttgtcaaaaattccgctgcaagaagacgaagaaagggagggagaaattaatgggactcattataagacacaaatctatacaatgataactgtatccagccccactcctaatgaggcaaccaaaggacaaacttacgtgttgagcagttttctccatagaatcctgtccgggtacaatcgcacttatactggtcaaatcccacactcatacatacacctcggttttgacatgggtgggaacagcaaggatttgctgcaattaaaggacagcaaataaatcattctctagtgtcttaatcttaatttaaacatttaattgtttgactatgaatcaactttacaataataaattcaagaaatatataggtagtcatggaaatacaattttttaacctgccttagaatggataaaacgtagaaataccaattttctattctaaataaggataacagcatattcaacttggtacatcatgttactaagcttttcttagttaactctttagatgttaaaattagcatttttaagaagttcaaataagtagcacttcactttccaaattaaaatggatctagtacactaatcaacatttagggaaaaattcaaagtaaaacagcttacttttaagacattttgcttatcttaaaacataatccgggctttcctgggagcaggaaagaactgactagaatatttaaaacaacttcttccactcaataaaaaggttccaaatataaacaattcacatatattgatcagatcctgtcttatcataatgacaacctgcaaattagtatcatctatccctatttaggaggtgagagtgtctcagatcggttaagtaactggctcataatgatcagtgcttgtgggaaagctggaatatccacggagttctttcgaactctagcggtccaagctctttcccaagtcacgtagcttctctattcggagagaagtcggagtactgggatagacccaggaggtcagagcggaaactctgcccgggtgcgtggaaccggagtccccggtgcgcggcgccaggtactcacctgtatggctgagcgccaggaccgcgcacagcagcagggcgcgggcgagcatcgcagcggcgggcagggcgcggcgcgggggtaggctttgctgtctgagggcgtctggctgtggagctgaaggaggcgctgctgaggagttcctggacgtgctcctgacgctcactgcaagtcgtatgacaattggtcgctaaccgagagaaccttcctttttataagactgaaaaccaagcccatgtgacgaaatgactgtttctttccgccttttcgtaccccccacaaatttttccctcctctccccttaaaaaaattgcgtaagcccggtgggggcagggttttttacccacggaaatgagaaaatcggaaacccaggaagctgccccaatttgggagcagagggggtagtccccactctcctgtctgatccctccctctcctccccgagttccaccgccccaggcgcacaggtttccgccagatgtcttttcttcttcgcagtctttgcccgagcgcttccgagagccagttctggactgatcgccttggatgggataccgggggagggcagaaggacacttggcttcctctccaggaatctgagcggccctgaggtccgggggcgcagggaatcccctctcccgccgccgccgccgtgtctggtctgtacgtctttagagggtcgaggaagtcacgtcgggacagactggggcgagtaaggttaagaaaggctgacatgttttatgttttagtgacgacgcttaataggctgtatatctgctctatatgcagcacatacatacatagctttttaaaaaactcttattttgtggaatgaaatagctaccttcagtgtacatagctgtaatttatctttgtagctaagttgctttcaacagaagaaatactgttctccgtaccttcaccccctccttgtttcttggaaagagaggcgggaaaggtaaattctcctcataatactggtcctaagcagttaccctgtaaatagttaatgtgagctccacgggtcaccaatataaagtttcctgccttctgatggacaaaggaagcggcgatggccagaatttgcagggacgctaaatgtccaaaacgtatgccttaaggcatttctctccctgatgcgtggattattttggttactagcccttcataggagatactggtaaaataaattcgagttttaaagttcactcttttgtcttttctgtccacttttccaagattatgagttgtgaccatggatcaaagtacaacatagcatttacttttcagttgcctgggcttattggggctaattttctattctcgttttggaacatagttggatgaggaattaattagatggaagggagattttgacagttggaatttcatctttgcttttgtttaacatctatcatgggtagtgctcagggaggagcatgtgagggtgagatactaaaaaatatatatatgtatatgtgtgtgtgtatatatacatatatatatacacacacaccagaaaagaagtggaaaatagaaaattcagttatgtcctaagtccttagcattacaggaaaatgacagcataaaacctgaaataaaactacaccaggtacctcaatttgtagaagtcttataagaaaaaaataaataagagactcacttggaggttttttttttaactgttttgcttagtgtacacatctgattcttcatgagacacggatgactaaaattccatctcatctaggaagcctttctcctcctctagtcatatttcatcattccatttatggcactcctatttattgcatggaatcttacatgaaatttcaactaagagcgtggatcattttctttttgataatttaataatttcaatcttctgtttcattttaaaggagtaggttgcatctactgaaatttgaagtttatagttagagctactaatgttagtttgggttagaagccatgttagaatccatactgtgagagagtactaaaattttacattacaatcctgaattcattttgaagtgatcatcatcattgtcttccttatcagacattaattgttctgttgtctgaaaagagatttggatacaaaagtgagggaaaaacagggcataaggaataattatatttagattattttaaactcaaaggaattgaactccatctatcccatagtggaaattctgtcacttatatagcaggatagagtgaagagttccatgtacttggaaagtcaaaaaaaaaagttcaaggagaatctgggactttaaggatgggcagagttttagaaagaagtgcaaatctgagcataaggaaaaaagttacataatttattaaataactgacaattctgagacaataaaataaaacggataggtacatttgggatgctggtcatgggagtgtattaaatgtgccaaactaaattaagaccactaaacctgttttatatggaaaagtactgtgactattgtgtaccataaaaaaaaggtttgatcatgtaaaacttatagctctcatgtttgcatatattcaatgtttctgtgtctattttaggcaaatatatggatctgttgtacaaaatttctattagcgtctgaaatttgttgggaaataatctacatgaaaagaaaataaggaagaatcttaaaaatcttccagagctttctgttgagttttactgcccccttctgctgcttgaaattttgtcaacttttttcctaagatgctaggaagattgccagacagattttgtgtttaattttataatgttctaaacattcacatgttgcactgttcatttcagatttgtttcatgaatatgttgaaaagaaatgaaatatttattaattgaagtgataagccattcatgtgagttaaaagaaaatgaacaataaagactcttaatgtccaaaattccaaataaactaacttttttttcccttccttgtactttgagcagggttctactactcatacatacagatccattatctcaggcaagggtcctctttctatttccctcgtttcttctttggtgggtttagtggttcacttagagagtggagatcaccccttgtcttctttctttcatggcatgttggctgaaaaaagagctttgtgtcagggttattcttagtatactttggcaaggttatgccatgaagtttatctcttccttgagtagcagaaatgttacttacagaagatctttacgttagtcctttagtaaagcctgattatttacccattcttagctacacaagaagttttgaggctataaacgaaagcacataatttgttaaattaagaaaagtcctttcacataagtcaatgaagaaacacttaaaaaatctatttctaagttttataaaacactgatctcctttctttttctcaaatatctcaattctttgatggatttttcttttacttcatttttttttgtgattgttcattataatactcagatgagccaaagtagttgaatgagttgaacacagtctttgtattggacctagaaatctcacaaggggacaaggaagggaaagagagtgtgaggtgggggcactggagcaggcaggatgtgaacatacccacgcacagaatatgaggcttaggactttcagtttctgatctggcatgtcagggaggagcttggaaattgtcacttcatcctaaaaacaagtaaaaatctaagcaaactgaaaaatcaacactctcagaactgtcagagaagtgaggcgacaggtcataaccctacttaaaaaatttgaaagacagaccatacaagaagaacaacttactggagcagaaatgcacaggcagaaacctccatgaaaaccagtacctgggtaggaaaacctgaactgtaattgatgaatttctggaggttcagtgcagataagtctgcaaaggaaaaattctggaagactcccacacttttgtgagttttgcttcctggagctctacgaggttctcgcagtgaatatcagagaaaactccccctcagctccatcagagtatagtgttcttaataaggcctatactcaagagaaattattttataatattagagcctaaactgtcgggatttttgtcgcagcctaactgaattagaagaaggaaaatatccaaatttaactgcctctagctttccatacaggggaagaaaaatacccaactccagccctctctttagcttctacattggagaagggaaatacccaattctagcccccccccagtgatcttgtcccacttaaggacaggaaaagagtggaatgaaaagcacttgttgaaagtcaccgttcataggcacaggctcactaaaaggccgagacctgctataggactatagaatgcttcacttcccctgaactcttatcgtcacattacaatgtattgagtttctttcactcagtacatcatgcctggctttcaacaaaaaattagaagtcacactaaaagacaaaaacatagcttgataagacagagcaagcatcagaatcaatgtcaaatatggtagagatgttgaaattacaatacctatgaaattaaaacaactgcaattactatgataagacaacacacaagaataggttggtaatgtaagtagacagatggcaattccaagaaataatcagagaaatgctagagatcaaaaacactggaacagaagtcaacaatgtctgtaagggcttattagtagactggacatggcagaggaaagaatccctgcgattgcagatatataaatagagacttctaaaactgagaatcaaagaaaaaaacacagaagaaaaccaaaacataatatctaagaaatatggggcaactataaaaggtgtaatatacagagaaggaaagaagggaaggagaagagagaaaggaacagaagcaatcttttaagtaataatgataagaattacatctgacttcttctcagataccatacaaagaagaaaagagtggaatgaaatatttcactttgaggggaaaaaacctacaacctagaattctgtaccctacaaaattatctttcaaaagtgaaggagaaataaggttttctcagacaaatgaaaattgaggcattctgtggccagtagatctgctttgtgagaaatgttaaaagaagttattgagataagaaaaatgatacaggttagaaacttggatctacatactaaagaaacaaagagcattagagaagaaataagtgaagataaataaaaataattctttttcattttttttttgagacagggtctcactctgtcacttaggctggagtgcagtagcttgattttggttcactgcaacctctgcctcccaggctcaagcaatcctctcacctcagcctcccgagtagctgtgaccacaggcccatgccaccatgcccagcaatttttttttttgtatttttagtagagacagggtttcactatgttgcccaggctggtctcgaattcctgagctctagcaatccatcggtctcccaaagtgctgggattacatgagtaagccactgcacctggcctatttttcttattttaaatagatataatagataacatgttttgaaataataatagcaataatgtattgaaagattacagcttatgtacaagtgaaatgaataacagtaaagatacaaagaatgagagaaagaaattaggagtgacttcttattattaggtacttgcactagccatgaaacagtattgtgttttttgaaaggagaattggactggttgtaaatgtacattgcaaccttcagggcagccactaaaaaagtcaaaaagaaagataattcatatgctgagaagggagagaaaatagaatgatataaaatactcaaaacctaaattaacagaaaaaggagcaaaaaataggagcagaaagtaagggcaatgaaaaatagaaaacagtaacaaacggtagatattaattattaatttgtctatatcaataatcaatttaagcagctctctgggtaatcacagggatgaggataaaaaaataagtatcaatggtctaaatacatcaattaaaacatagagattgttagagtggatcaaaccaatacccaagtatttctttttattttacttcccaccctaccaagtatatgttttctataagaaccccactttaaatacaaagtcaagtatacattaaaagtgtaagaatagagaaagagagagcatgctaacactaatcaaataaagccagagtagttctgttaatttccaacagggcaaacttctgagcaagaaaaattatcaggaataaagggaaatgttacatgttatggaaaggtaaattctccaagaagacataacaattcttaatgtgtatgtgccaaacaatggagcatcaatatatataagacaaaattgataaaactgcaaagaaaaatagattaattcattattatggttggagacttcaacagccttgtgtcagaaatagacagatacagcagacagaaaatcatttaggacatagctgaactcaacagcaccattaatcaacgagatgtaactgacatctatagactactttatccaataacagcagaacatacattattctctaaggaacatatagcaagataaaccgcattctgcaccataagacacaccttaacacatttacaagaatataaatcatacaatatatgctctcaggccacaatagaattaaacaagaaatgaataatagaaagatagctgaaaaactcccaaatatttggagatcacacggaacacttctgaataacacatgggtcaaagagaaatcccaatagaaattaagaacctcttttgagctaaataacaatagagttgaaatattgtaggatgcagtgaaagcaatgcttagagggaaatttatagcattgagtgctgtaatagaaaagaagaaagatctaaaatcaataatataagcttctattttaggagactacaaaaaagaaaagtaattaaattcaaagtaagcagaggaaaagaaataataaaaaattagagtagatatcaatcaaatcaaaaacagaaaatcaaaaaagaaaatgggtaaaaccaaaaaggtggttcttttaaaagacataaagttaattactctagtcaggctaaggaaaaaaagagaagacacaaattattagtatcagaattgagagctccactgtggtggctcatgcctgtaatcctggcactttgggaggccaaggcaagaggattgcctaagcccaggagttcgaggttagtgagctatgatcacaccagtgcactccagcctgggtaccagaggagaccttgtatctaaaagttttttttaaactagaaatagtagaggagacatcactacagatcccatggacattgaaaggataataaaggaatactatgaacaacttttgaccacagatttgataacctagatgaatttctagaaggtacaatctgccaaaattcacacaataagaaattgacaatctgaattggcctatccctatttaaaaaattgaatcgataattaataaccttccaaaacagaaagaatcaagctcatataagttcactggtgagtactactagacatttaagaaaacattataccaattctttgtaatcattttcagaggatagaagcagaaaagaatattttctaactcattctataaggtcagcattacctcatagactgtaaaggcattacaagaacataaaataacataccaatatctctcatgaacatatatgcaaaacgactcaacaaaatgctggtaatccagtccaacaatatatacaaataattatgcaacatgaccaagtcagatttgtcccagtatgtaaggctagcttaacattaaacatttaattgaaaatctatcacatgaacagagtaaagaagaaaaatcacacaattaatagtgcagaaaaaagcatttgacaaagtccaatacccatcataataaaaacaaacaacaaagtagaaatagagggaagattcctcaagttgacgattaacatctacaaaaaactaatagctaacactgtaattaatgatgggggaccagaagctttcttactaataccagaagtgagacaattttgttctttctcaccattcattttcttttttctttctttctttatttttttttgagatggagtctcactctgtcacccaggctggaatgcagtggtgtgatcttggctcactgcaacctcttcctcccaggtccaagcaattttactgagtagctgggattacaggagtgtgccaccatgcctggctagtttttgtatttttagtagaggcaggatttcaccatgttggccacgctggtcttgaactcttgacctcaagtgatccgcccacctcggcctcccattgtgctgggattacagacaggagtgatccactgtacctgactcatcaccctttttcatcatcatactggaagccctagtcaatgcaataagacaaaaataaataaatagataaataagtaaatagataaatggtatacagattgtgaaggaagaaataaaactgtttttgtttgcaaatgatatgaccatctatgtagaaaatttataaagactgaccaaaaaactcctggagctaagaagtgattatagcaacattgcagcatgcaaggttaacatacataagtcaaccactttcctgtataccagaaatcaacaagtggaatttgaaattaaaaacacattaccatttacattaacaccctccaacattaaatatttaggtataaatctaactaaatatatatgagatctgtataagaaaaatgaccaaactgatgaaaatatcagaagaactaaataaatggagagatattacatgttcatagctagaaagactcatgattgtcaagatttcagttcttcttaaattaatctatagatacaacataatttcaataaaaattccagcatattgtgttgtggatgttgacaaacttattctaaagtttatatggaggctgggcacagtggctcctgcctattatcctagcactttgggaggctgaggcaggaggattgcttgagcctaagagttcaagaccagcctgggcaacatagtgaaactctgggtttacaaaaaaattagctgggcctggtggtgcatgcctgtagtcccagctactcaggatactgggaggggaagattccctgagcccaggatgttgatgctgccatgagctgtgatcaacaccactggtcttcagcctgggcaatagagtgagaaccctgtctcaaaaaaaggaagtttatgtgggaaggcaaaagacccaaaaaagccaactcattactgaaggagaagaacaaagttgcaggactgacactatcttacttcaagacttactataaagctacagtagtcaagacagcatagtatttgcaaaagaatcgacaaatagatcaatagaatagatagggtccagaaataggcccacataaatatagtcaattaatttttgacaagggatacatggcaatacaatggaacaaagatagcattttcaacaaatggtgctagaaaaactgaacatcaacaagcaaaacaaaaaaataaaaaataaaaaagtctcttgatacagactttacacttttaataaaaaagttaactcaaaataggttatagacctaaatgtaaaatgtaaaattataaaagtcttagatgataacatagaaggaaatctagacggatttgggtatggcaatgatttttttttagatacacaagggcatgattcatgaaaaaagtaattgacaatttggacttcagtaaaattaaaaacatctgcttcacaaactcactgtcaaaaacgaatgggaagacaagtcccagacagggagaaaatatttgcgaaaaacatttcagataaaggacagttatccaaaatatacaaagatgtcttaaaactcaaaaataggaaaacaaacaatccagttaaaaaataagtcaaaggcctgaatagacacagtgccaaagaatacacatgtaatacatggcaaataagcatatgaaaagatttaccacaacacatgtcttcagggaaatgcaaattaaaacaaaaatgagataatacacacctattggaatggccaaaatccagaacattgtcaacacaaaatactggtgaggaaatgaaacaagcaaaactttcattcattgctaatggaaatgcaaaatagtataaccattttggaggatggcttggcagattcttacaaaaatgaacatactcttaatacccgatccagcagtcacacaccttgatatttaccaaaatgagctgaaaagtatgtccatacaaaagctgcatgcaaatgtttttggcaactttattcttaatttcaaaaacttggaaacaatcaagatgtacttcagaaggagaacggattaattgtgatatattcagtcagtagagcattagtcagcagtaaaagaaaatgtggtaccatcatatatttaagacatggaggaatcttaaatatatattactaagtgaaagaaacctatctgaaaaggatacctaccgtaggattccagcaatatgatattctggaaaaggtaaagctatggagacagtaaaaggagtagtggttgccagaagttgggattgggggtgaggatgaaaaggcagaacgcaaaggatttttagggcagtgaaactattctataagatactataatggtggatagaaggctgggcgctgtggctcgtgcctgtagtcccagcattttgggaggccgaggcgagcggatcacgaggtcaggatatcgagaccatcctggctaacacggtgaaactccatctctactaaaaagaaatacaaaaaaattagccggacatggtggtgggctctggtagtcccagctactcaggaggctgcggcaggagaatggcatgaacccggaaggcggagcttgcagtgagcctagatggcaccactgcactgcaacctgggcgacagagcgagactccgtctcaaaaaaaaaacaaacaaacaaacaaaaaaaaaaacatggtggatacgtgtctttatacatttttaaaaccatagcatgcacaacaccaagaatgatccctggggtaaactagggactttgggtgatactgatgtgtcaatgtagattcattgattatagtaattgtatcactctggtgaggaatgctgatagcacatgagcttttcttgtaaagaaaggtacaggggttctatgggaactcttcgtactttctgctcaattttgctgtgactctgaactgggcttaaaatgaactcattttgcatattaattctaccttttatagatattacatttcattattagtggtgtgagaaaacaacatccaccacacgagccacaggactgttttgcggaaggcgatgcatatttgtttgctgattcttgataatcattgggaaaaagcttcaaggttaaatgctgtgtagattgaatagtgtcagatgctcattgagatactcatggaaagtttacttcctttcttaactaaaacctcactctaccctaaggacaaggattgctttgcaaacatctgaaaaatgtattccttctctcacccccgtcatttccaaagatggcatttatgtgaagcctctttcttcctctcttgaatcactactctcttgttttagaggttcacatctttcccaatagcttcgacaagcacttcagggtttcttgcttccaaagctttacctctatcccttactcttacctgaagctcaaaaccatttgagaaattgtcccctggatcttttcatattaccgtactaaaaactcaacttatcctcttaacaaaaaatgattttcctttaatattttccataggaatgaacaggttcacaattcaccaagatttattattagtattcatcaacatctaatgtgctacatattttactttcatattttgtttactacctgtcttccccttccaaatatgtaaattccatgaaggtcaaatttttgtctgctttgtttactgttatattccaagcacctagaaaaatgactagcatatactagtactcaatacttattgaataaatggctgaatctatcttctttgaaatcaacttcaaaaattagatgaccttcatttta

SEQ ID NO: 67 - DNA, 31889 bp, Mus musculus
tggttttcaaatttcttccttgtgagttccagaatcaacctcaagttaccagattagtagaaagcaccttcactgtttaggtggtccattttcagtatgaaatagaactcatccctcaacacatatttacagactaatatgtttatttttattcatttacaagtgttaatgtagtaggctattaaactatagttatgctatctcataaagttattcctaagaatacttcaagtgctaaaagtatcggtaaaactggcccctctggaccagccctaaattcctatatgatatgatccagaactagagattgactgcctggccatttcactgttactactccacttctataaacaaggcttgctcgttgcagatgtctagagcagtctctctgtacacatcataactgcaggttttcctgttaatctgcttgggacagtcctgtgagtagctaataaaggctccattcaatttattcaggactttctcaggagtttttctcttcaggtaccccatgacataattgaattgcttgccccctagtttgtcttttaattatgttgatttggtacacttaaacctgtaaaaatatttagcatttacccttcccccacattcacaaagatgagaccctggttctcttctattccccctcaaaaccctgagacccttaaaatggacttatattgtgttttgtcttgtcttgtctgtcttgtcttgtcttgtcttgtcttgtcttgtcttgtcttgtcttgtcttgtcttgtcttgtcttgtcttgtagaggataggttgagtttttagtatggtgagatgaaaagatccagggggggtaattagacatgtggcttttgagattcatgtgagagtatagaggagatgctgtgaagtggccctggcgtcatgggagggatgcaaacctgggagactggaaggcttattcaaaaggaggggagaaggtgtcttcactggcaagtcctttgtggatgtgggaagagggctaggaggagtctgtcccttacgtatctgtccttagggcagagtgaggctctggctgaaaaggaaatagacttcccatctgtgctcagagcataagcagctgtcactgtttagagctacgcattcctccttgaagattttctccagtgattgtgaagagtcagcacacaaacacgcagtgccttcagcacaggcatttccttacagcagtacagatgcagagatgggatcaacaataaagaacagccaaagtcagaagccatcattcataggtagaagttaattttaaaataaagcttatttgtagtctagaaataaagagtagctagatcgtctcagtacctcctctcccgcaggctcctagcaacagcttctgcctgagtgcttctagtgttgttgtcaatgaaaacacactgggacccaaatccatcatacacactacagtttattctacagttgaaaataccatttgtcgaatatgtgatgacttctccccagttgtatgttgaaatcctgtagtatactactgcctcttatattggtgtctgaagttctcaagaaaagaagaagaagaagaagaagaagaagaagaagaagaagaagaagaagaagaagaagaagaagaaccatattgtgttcgattctacaaggaggaatgcaaattagaacttcccgattgagcagtagaatctcacaggttatctgggccacttttagttcctttaatagccgttcattgtccatccttgtgggcactacactaacatccctttcactgtcatataaagcctgttcagatgtgttcttagcagatccccagtttcctccaatcccaaagctaggactatcattaggacacatctaaaacctatagttagagtttcgcttgccttgcataaaccacctacctttggaccctcacaattaagtaagagtcttgatttagactctcttttttctggaagtagtagtttcatgtacctgcatccatagtacagggtattcaagggtaacctgaattcctgttagtatagggccaggtcacttatattgggctcagaataaacaatcccttcccccctttaaggtatgagctattttgcaactacattcacttagtaattaatatgcactcagattcttcattctcttttcacagatcagatctcatttcctgttaggtctgaattatatcccaggactatagtctagccattccagcttagccttttggtaaatacccagtcacatggctgccaaatcatagtaagggtctgtttacttttgtgaaaagaaatgcaacagctgcaagtctctcccacaggctgagccattcttcattcacacaggcagggacggagggctcccttttctctgcagcctttgttgttgtaaaggcactgggtgtgtgccattcttatagataccacagttcattttatctaattgtgtatcttttgtgcttgtgagatttatttatttattttgatttttcaagacagggtttctctgtatagtcctggctgatctgaaactcactctgtagaccaagctggcttcgaactcagaaatctacctgcctctgcctcccgagtgctgggattaaaggtgtgcgccaccacgcccggctgtgagatttatttttatctattgtgttttgtttatttgtttcaagaggtctctttaactagctcaggctggccttgatgtccaagctggtctgaaactcacaatacttccacaggctcaatctcctgagacctgagattacagatatgaggtgatgtgagtgcgtgtatgtatacaaatatatacatgtatgtatttatgtatgtatgtatgcatgtatgtatgtatgcatgcatgtatatgtattatttgttctggtgtctgtttaggtttttgattgacttgttaataggactatttaacttttaagaagtcttacatttttggtagataatatctgatgctttctgcaaatattttttccctatggttgccttctcattctcctaccatcctttgtaaagctgaaattttaaatttcactgcagtccagattattacatttctttaatggatgaagcacttaacatggcattaaaaattgtcattacacttgtgatggttgttcttggttgtcagcctgcctatatctggaattaactgaaactaagcagctgagtacaccttggagagttttttgttccttaaatagcaggaactaattaaaagtggaaacacacacttttactctggatttctttttctttttctttatttttttaaagatttatttatttatttatttatttatttatttatttatttatttatttatttattatatgtaagtatgctgtagctgtcttcagacaccccagaagtgggtcgtcagatctcggtatggatggttgtgagccaccatgtggttgcttggatttgaactcaggaccttcagaaaagcagctggtgctcttacctgctgagccatctcaccagccccttctctggatttcttaaggtaggaggatccaactttaacctgggccacaacttctgacggcagcctatgtaaaagacatggaaaaaggaagatttctctccgtccccacttgccaatattcttgttctggctggcaagtccatccctccattgacattagagcctacttcttcagggttcctgtgtatactccagagcagctgagtcctccagtcttagggattgaacaccttgggaggacttgaagcttcctatgactgacagctgttggaggactagcaagatcacaggctgcaagccattcatataaatccccttgatagataaatggtagatacatagataaataggcagacagacagacaaccagatagatagatagatagatagatagatagatagatagatagatagatagatagatagatagacagacagatagattcattgtttcagtctgtttctctacaaaatccttacgaatacaaatttttggcaacagaagttgttctagaacaaaagaagtataggaatgaattttttaaaagtacctggatgatgctatccaatttgccaatgtgtactatggttaccaaaggctcttctagaagcttggagaatattgaaagcccatagggtgaactattttacaaacttatctgggcagaagcagtagcttatctagatttaccaattgtgattttgtgattttgtgtatacaaaaatttgacaatttgtgggaaaataagaaaaataatgatgctggttcattgctcttatcatttctatataaattgacaatggaaaagaatgagctctctgataaaattaaccaacttgaagcatctcagaatacagtgaaggacagcaataaactcagtgataatactgacaggctccaaataaacagtctaaaggtttctaaatgtgctctggaagagaatcttctctgtagcacccacagagctcaagttgtagaaatcaagctgaaaccctcattataaagttgactaaattacaaagaaaatttaagtgccagccttagagggtgtcgactgtggaacctttgactgaggaaattattccttcaacatctgttaagccaattccctgaaggagatgccagcccaaacaatactactgtcatctccaaggcttacagctaaataagctcaccctttctagttctttctgaatgatggctggctggttcaactcagctgttctggctcaaactcctcttcaagctgactgattcaaataggcttctctcggcttttcactgaattattctgtttggcttaaactacttctggaaatttgttctaatcttctggtccttctcattctctggcttcagctgcctctgctgacctacatgaacctcccaaactgcacggaactcaggaacgaactcaactgaacctgactgtgctgcaggaattgcactgactggaatgattcaactgagatgattctactgaaagttactgtattgcctgaactcaactgctctgcactcattgaactgccctccctcactcaagtcacctccccttcctgtgctgttctcccgggagttggtcgtatcttatctctgattcattctgtcaaatctttctctgactcttcactttgtctgcctctcaattagaagtcattttcaaacatgtctgcttccatctacaaactaactttaccttcattgcttgggattaaaggtgtgttgatatggtagccaaagggattaaaggaatgtactaagggcatgtctgcattccagtcagagcacacagacacagaaggtctttggatgtaatgccttggtagaacagccatgttgctggattaaaatttctctgtatcttccaacttagtttcaggaagattttgctgatgattcttatggacatcctatagaaaagaacaagtatctgttaagatgattttattgctatcttactctattactaagaaaaaactcacacacatttatttatttatttatttattcattcattcattttttttttaatgacacaacatgtcatgtgagcaggctgaccttgaacttgttatgagctgagaattactggactccagattgtcttgcctcaactcccaaggatttggaatacaaatattcagcatcatatctggctggtatacagtttaaaagcagcagcaagggagtaactctggagtggtggctcagtgtttatgaaagcttgctatacatgaagaagggagttagatcccagtaataagttgggcgtcatgactctttcttccagtctcagggagtacacagatacatcaatttacactcacatacctgtgtatacacctacaaacaaacaaataaactttttaaaagagcaacaaacagggacaaaattgtcttgtttggatgttactggaaatgtttctaattccttaccagttatggtattagcttcaagtttggggtatatcttggcaggaatggagacatttaccttctatttccaattacctggagtatgactatctttttttttttccttaaggttgtctatatacatttgggatagtgacatagctttgcatagaagaaataaattccacttaatcatgatgtataattaattatatttgcaggctggtggacttgatttttttaatgttgtgtttaaaagcttatgtattgatatatattgcctacattgtggttttgcctatgttttgtctatgaaccacatgtgtgtacctcttgtcctcagatgtcagaagaggatgttgaatcctctgaagtaggaattccagaggattgtgaaaagtttggtgagtcctgggaatcaaaccccagccatcgggatgaagagttggtgctctgaaccatcttttaagccatctctccagcccacgcgtttaaatcttgcttggctattcatgttcaatattacgctgtagtttgcttgttgattttagtgttagggtcatgctggcctcatagacagagctaggcagtcatgcctctattcttattttctaatacagactgtgtggaagtgatacatgtcctttaaacatttgatggagttcaccagcaagcctgtataagcctgattctttctgtttggcagggtgacattgattcaatgctttaatagataaaagccggcttagcttgttttcttcatacatgaggttttataaaatttgctttcaaaggttggtataaggggctatagaaatggctcagtgattaaaagtactgactgctcttccagtggacccgaattcaattccctggaccaacatggcagcttataactttctataactatagttctagggggtatgatgttctcttctggccccaacaggcaacaataattcatgaagtatacagtgatactcacagacaaaacacacacaaaataaataaataaataaataaataaataaataaataaagcatatacacacatatatatgtgttaaaatatatgtacaaataatatataacaatacataatataatatgatttgtgatatatggtatatattataatgtgatatatgatatatatgtatatgtatgtatatatatatatatatatatatatatatatatatagagagagagagagagagagagagagagagagagagagaaagagaattagtgcaaaggtggcttggtggataagaatacttatttggcaggcatgaggacctaaatttgaatctccatcactcacataaaaaattggacaatcatataccaataaccctagcacttggcagtagagacaggaggatgcaagaactcattactcagtcaacctagcccagaaagcatggttttcattcggtaaaatgccctctttcaaggtaacaaggtagagagcaattgaggaaagcatttatgtattgcactgacctccaaaagaggaagagtctgctctgatctccaaaagcatgcgggaggaatctacatacttacttttaggcaccccatacatacaccatataaacagagaaggaaatcagaggaaacggagatttatacattcaattgagaccataaagccagtgaatagtaatttttaataatgcacctctttgttgttgtttgtttggaaccaggtcttgacatgctaatcttggctgtcctgaactccctctgtagaccggggggctgcatgtgacaatcctttattcctgtctctcttgttcagagaatacttttattatctgcccagatgtttatggtttctgtatggcttcatcttcctgaagtgtttgtgattaggttaatttttatcttattttttcttagttggactggctagagacattgattttattggcctttcaaaagtggcctgtttgtgttgactctctattaatttcctggctttaatttcactgatatctgttcaaatgttaattgtctctgtgtttctgtttactttgggtttaattgatctttctactgcgatgacatgggagccctgacttctgactttcagtctcctttgctcatccatgtgttccctgctataacctcctatgctgctttctctgaattctagacatctcaagttatactttcatttgactcaagatattttttaatatcctctgagcttcctctttaagccctatattattaaaatgtatcttgtgatatccagatatttggggattttccaggtattagtgattcattttcctttttttatttttcccttcttcccctcatctctctcccctccccctcctcttcttccttctcttactccttctcctcttcctcctccttttttaaccttttcttatttatctttttttttgtgggagggtctcttgtaaataagactcagtctttctatgcagtcgaggatgactatgaagccctgatcctcctatctctacatcctaaattattgagttaataagcatgaattactatgcccattttattgccctcagtgattcatattttaattttactcatccatagcctgagaatatacattgtgtagttactattttaagtgtattaaggtgtgcttttatagactaggatgtggtttgtcctggtatatgttccatgtaacttagaagagactttatattgctgtccttgaatgacacagcattagatgttaatcatggccagatgacttacagttgtgctcacctcagctatctgctttgtcatagaactgcctacctctggtgaggagtagtgaagggcgcaccatctctttccccctgcagttttattgttctgccctcatgtgtatgaaggcttcattgttgtacagtgcccataaggatcactgtacctattcttgaagaactgactgctatcaaatgcactactcctctttattacttctacatttctttcctctaaagaatgctctataaaaacaaataaaactattcttgctttcctctattaccacagtatatctttctttttacttttaactttctctttgaatgggatattgtttgaattaaggaatatgtcctttattagccagatggtggtgatacaagtcttcaagcccagcatgtcagaggcagaggcaggcaaatatctgagtttgaggccagctagctccatctatggagtgagttccaggatggccatgactacacagagatacccgtgtcgaggaaaagaaaaagaaataacaattaataaaaagccaaacccaaaacaaaaacaaaaatgtcatttatttccagtgtatgcatgaactttacatttaatatcaacactgcatgtttaattatctaagtgcattataaaattagaacgaaaatctacctaacaatctacctagcatcttaggagaaaaaagttgctgaaaattcaagcagcagaagagggcagtaaaactcaacagaatgttctcaaaggtgttagtacatttccttattttccttttttagaatctcaaaactctttcatatactaacaaaatatattttctacaacagacacttaaatatgtacccaagtgtacagagaaccaccaaaattccacacagttcatcactacacttgctatataataaacatcttattaaggagcctcattaccattgtgctttgccatacagaacagtttgaaccatcttgatttggtttgggacagttaatattcccctgtaaccagtattccaattgtgcctgtacagtgtgctctggcatcccagacttctcaaaagcagccaattacaaaatactttccccttatgtccttatttggacttcctttcaaaactgctcttgtcctccaggtctgaatttcttactgagttctcctgtcattccgtagtatatggaactctccttacatctgaggttacagattagatcaaccaactcaaccatacagataattttacttgcatttcttctatgattatgtttaatgtctttaaatgtcaagtagtctgaaggtgattattctctatgccctgtttttcccctcactttgaatttgtaatgttttctttttttttttttcttttagtttttgtgagacaggatttttctgtgtatagctggctgtcctgaaacgtgctctgtggaccagggaggcctcagagatctgcttagactcctttttctccctcaatgctgggattaagggccaacatcaccatccaccaccaccccctttgccataatctcttttaaaacatcagaatatacttctctacataatgggcatacaattaatattagatgaggatggagttggtcaaagtcagttgaagatttcactagaaaatgttcgtacacagtcaagaatgtggaattttatacagttcctagctgaagttcgtatcaggagctctaacaaacttagtttgacaccatgcacttcccgcatttaaaataaaacagaaaacaagaactatttaaagggattctccaaaagaaaacagtctgtgctttcagttgaaatttcccataagactccgtgtaagaggctgggagtgccatacctggactgattaaacatgactagaacaaaggccctgggtgacatggagttttagtcactgtgtctcatgtagcatcaaattagcttgcacatgaagcaaacagttaaaaaaaaattccatgagtattcttactttctgggagacttccgcagagtcaggtatttgctagagtttcctaagtgctgcttctcatggtcgattggattcccccatgtggatattctcccctttcatttttgttttgttttgttctgttttgttttgagcaggggtcttgctgtgttacccagcctgcttcaaaccattttcctgacttaactgtcctcagaatatagtgtaatttcacactctgtgtcattttttttatccattcacgccaagaacgtacagtttagttgaattttttagtttcctccttttcttattttgctccttttcgctactccatcctcacaccccctccatggccaacacaaacacagtaggaagatatccaacactatcaaaaacatcacctctctaggcaaataattttttatcaaacactgtttctgaatgaagtgaatttttttttaaggttagggagaataaggctagttatggaaaaataactattaccttttgatccgttgccataacatactttcttgtaaacatggacagaaaaagtttttaaaaggtacatttgaaaacaaattctttctagtgatacatcccgtgaaaagagttgctgatcaaaatgataaaagctatgtaacagcagggggaaaataccttaaagcaatgctgtggacacttagcattccgatgaagtggagctcagcatctgtccctgggaaaggcgagtgccaggggctcctgtgactgcagaacccggagggtagttccatgaaagacttcaacctaattccaccagtacagatgtggaccctgacagaggacactcatttcattaaaaatagaagaaattaaattaaccggtagctgtgtgcgtgctctgagcagcgagcacgtcagactgcgccccagtggggagaggtgaggggattcccttagttaggaccttagatcccgggaggggaagctgtgacactcttgagcttttaggcccccactggatgcgcgactgggaggaaaccggagaccccaaagagcgccagactaggcgcagactcagcgaaccacagggcgcctggagggatggagagggcggtgcagctctcttggcaccacctggggcagccaagggcagcttcccggcttccttcgtctctcatttgcgtgggtaaaagcctgccgctgcggttcttgcgcaactcactgaagcagagagggggaaaagttggtgggggttggggaaagcctaagcggaaagacagagtcaccactacgtcacgtggagtccgctttacagacttaaaagcaaggttctccccattagcagccagttgtcaaactgcgagctaagagcttcaggagtcagtcaggactctgctcacgaaggaactcagcactgcatcctgccagctccaccgccaccactactgccacctccgctgccacctctgcgatgctcttccgagctgtgctgctctgcgctgccctggggctcagccaggcaggtgagttgcgccccgaggcgccctgggactcctcaggctcagaccccctttctagcagtgtgggcctggctgtgtattggcaaagagcctggactgcttaagtcctgaggaactgcaacccactttcaggtttcttatttgctaaaaaccaatagtcttaatggcttacaggttgtcattatggtaagacaatctgatcaatacttgtgaaaagcatagatgtgggcaactgaacaagagtggctgctttgaatacctgttagagtttttctatccacagaaaaatccagaatacatttttaaaaatatatttaaaatgctaaaacttgactgttttaattttattttctttacactaaattttgactattgcactaggtcgatccattttaatatttaaagggatgcttaataattctagtctgtgtgtccgagttattttaaaaatgttggtaatgtgaactatgaagttaggtcctctgtgtttcttgcttaagaatacaaagttgcttgctatttccataaacagttgataagacagacttaattaaaataatgacctttttaaatctgggtctacctatgtatttgtcaaacttatcattgtaaagttgacccatagtgacagaattaaatccttaagttaagatgagaacaaccaagagtaactgacaggatatcttatttttttaatgtagcaaatccttgctgttccaatccatgtcaaaaccgtggggaatgtatgagcacaggatttgaccagtataagtgtgactgtacccggactggattctatggtgaaaactgtactacacgtaagtttttcctggggtatcttcctttggaatgtggccacatgtgtaaccatcattctgtagatttgtgtcctatgggggaggggcctgctcattcttcctcctgctttgtctctctccagctgaatttctgacaagaatcaaattactgctgaagcccaccccaaacacagtgcactacatcctgacccacttcaagggagtctggaacattgtgaacaacatccccttcctgcgaagtttaatcatgaaatatgtgctgacatgtaagtacaaccctcccttgttttccagcatcctccaacacaactaggcactagaaacccaaccccaagaactatcctgaccttttcaaagggcttgaagtataccttttctaatctgtttttcccctgaaatgtctaaaatacagtcatgaaaacctgtagtctctattctagttttgacccctgtccttcattcgtgtggaggaagtgtggttcacttgttcattgaataaatacccatggctcacagaattgttcggaacacatagaattgttctgaacctttgaaacaaatggttgactagggtttgggtcagaagagaaaaatagctgtctgtagttattggtgagggccatgcccaaatgtctctgtcatcagctatggaacagggagtgggtagaaactgaaaagtcaagactactggagcagaatgtcctgtgtaaaatttaagctttattgaagatgcattttcagtgctctttaaagttcagccattgtacagcagggtatctttgtctgaaggaaatctagtctctgtacttgctacattgtacaatgataattgatatgcccttgttgttgttgttgtttttcatatgaggaccaatgatttttttttctttaaaatttcagccagatcatatttgattgacagtccacctacttacaatgtgcactatggttacaaaagctgggaagccttctccaacctctcctactacaccagggcccttcctcccgtagcagatgactgcccaactcccatgggtgtgaagggtgagtgtaaagaaatacagacatagcaactgcagtgaggcttgggtgtgtacctagaaaaggtgtccattatgtaaaactgtaaatagttttgtctttagtatggttatccacagaggtttattaaaagtacagatgtagtatgggaaagtaaatctgcattgatgtaatgtcttagccttagtatgttttgctaaatagaactgatgttagttacaattcataaaaaattcaataacaccccctgctttatatcttaacacttgaatttaaaaccttagcccagcctggggtacaagcctgacactgtgcctcaaaacacaacagtcgtattgatgttgtgatcttctttgagacggtgcttctaagtgatggatgctgtcatgtattatacagtcatctgtttgcttgaacaaataggtgaatggatagatacttactttagaatttacatgttccaggaaataaggagcttcctgattcaaaagaagtgctggaaaaggttcttctacggagagagttcatccctgacccccaaggctcaaatatgatgtttgcattctttgcccagcacttcacccatcagtttttcaagacagatcataagcgaggacctgggttcacccgaggactgggccatggagtaagtgggcttaactcagatttatagcaaatccttagggaatgctgacatcttaccatgccaaacaaatcacacccatttttttttaatccaaatgtcatgactactaaaaccataataggtgttccattttcattttctgatttagtaaaaatgaactgacacacagagacatattttaatgtaattttccttacatttttagtttaaaagtttggtccatgaaaagggtctatcttctgtaaataaataaataaattattagtcatcggtggcattgggaagtgaaccttagaagtttgtgcttgccaggcactggtctctgctattgaggcagaagaggtccagcctttacacacacacacacacacacacacacacacacacacacacacacacacacatacaaaatccccttctatgcttctttaaacaatgtaaaattactattatggttataatgaagcaagtggcatatttaatataggatactaatactattcaacataaagaaatatacagacttgtagctctggtagacaaattattttagaattttgtggctatgaaaaagtcacttattgagctagattggtgattaagaacagttgttgcttttgcttaagttcttaacacctacatgacagttcacaaccacctataactccagtcagttctaggagattccatgttttgtaacattttagggcaccagacaagcacatgacatacatacatacatacatacatagaggcaaattctcatacatataaaaataaaataaatcttaagaaaatcacgtggtgaattttaaagacaactaaatcatcaatattgaataagaaattatagtaaaaaatcagtaaattgaactttctccatacttaattttctaggtggacttaaatcacatttatggtgaaactctggacagacaacataaactgcgccttttcaaggatggaaaattgaaatatcaggtattttccttatggtttaaaaatgaccatctgtcatttagacttacatattaaaactattgtggcttttttttccttcttttaactctgttattattgttgtgatttaggtcattggtggagaggtgtatccccccacagtcaaagacactcaggtagagatgatctaccctcctcacatccctgagaacctgcagtttgctgtggggcaggaagtctttggtctggtgcctggtctgatgatgtatgccaccatctggcttcgggagcacaacagagtgtgcgacatactcaagcaggagcatcctgagtggggtgatgagcaactattccaaaccagcagactcatactcataggtgagcaagagagaaataacaagtaagatcatcttcccctcagaaaagaaaaactcttccatttgctatgttttgattccttcttgtgaatagggagagtaaatgtgatctggtaacatccctaccatttgttgtaaggaaactaaagtctctgtgttgtgtaacaggagagactatcaagatagtgatcgaagactacgtgcaacacctgagcggttaccacttcaaactcaagtttgacccagagctccttttcaaccagcagttccagtatcagaaccgcattgcctctgaattcaacacactctatcactggcaccccctgctgcccgacaccttcaacattgaagaccaggagtacagcttcaaacagtttctctacaacaactccatcctcctggaacatggactcactcagtttgttgagtcattcaccagacagattgctggccgggtaagcattgttcctgaaaagcaagaaccagctggtcagtagctttaggatttttgtcatagagataggtttttttttttcttttacttttctactggttcttgtaacatgacacttacaaggtttaggaagggttttaggttcatctaaaattatccagcaaataatgacacctgtctatcttaaaaccaatatttttaaaagatttcagtcatcttatatattagagaagttaatattcagacttgtttatcagcttatttttttataatcacaaaaatcatgttccttatagaatagaagtgatgaggtcaagacataggacttcaggaatttgcctaagaatctcattttgttattcacttgtcttaggttgctgggggaagaaatgtgccaattgctgtacaagcagtggcaaaggcctccattgaccagagcagagagatgaaataccagtctctcaatgagtaccgcaaacgcttctccctgaagccgtacacatcatttgaagaacttacaggtgaggaatggtttctaaattttctaaaaggatcagggattaagtgggaaaagagaacgtgagagggcatttagtgaagggataaactatcttcctcttcctcctcctcctcctccttttcttcttcttcttctagaaatagaaaaggaccgagtttactgagaaagaggagtgggaatggggtcagctagtgagcgggggaaagcctatgctcaacagccaggacaattgtcacccgttcccagtttgatgttcctgtatctctatctttggtaccttccaggagagaaggaaatggctgcagaattgaaagccctctacagtgacatcgatgtcatggaactgtaccctgccctgctggtggaaaaacctcgtccagatgctatctttggggagaccatggtagagcttggagcaccattctccttgaaaggacttatgggaaatcccatctgttctcctcaatactggaagccgagcacctttggaggcgaagtgggttttaagatcatcaatactgcctcaattcagtctctcatctgcaataatgtgaaggggtgtcccttcacttctttcaatgtgcaagatccacagcctaccaaaacagccaccatcaatgcaagtgcctcccactccagactagatgacattaaccctacagtactaatcaaaaggcgttcaactgagctgtaaaagtctactgaccatatttatttatttatgtgaagaatttaatttaattatttaatatttatactgaattttttttcatgtaacatcttccataacagaaggcaatgttcttgaacaatgttacatttgtgaagattccctccggtgtttgtcctttaaatatgtgttacctgaaactgaaaggaaatcagcattcattcctctacataagccagtgagaagggaaatgaattttgatatctttatacttgaatttcagatcatgattagcttaacaagaaccaaggaaaaatgtatgaatatgtgagtgttgttacaagatgaaaaatgctgcaggtatcaacactgttggttacaactgtgtcttctttactatgataggagcatgtaatgtggaattcttcttaaatcttgcatatctttatctcatcaaacaaaggggtccaagttcagttttaaataagcatttaaggcagatactgacaacaatctcattttttaaaatgttgtcttgagacaaataatttgaaatttctaaattgggagtttgaatcacttttgaaagctcttactttcttaagctgtcaggtttgtaccgacatggagtaaacagctatcataaacgtaaatctccaaaactagtagaaattatgtcatgattgatggttaagataccatgtcagggattgtcttttcttagaagtagtgaaagctacttactatgacaatcagaccttccttgtatgtcaaaatgctggtgtggaaggtggtggagcccgtgctgctctgtcttaactatgagtgtgagctttaaagctcgttgatgagtggtagccagcaaagcctagagcaacaaaagcttctacaaaggaactaaccaagaacaaagaagggttcccaattaaagatcacattcagggttaaacttccaaaggagacatcctgatcctggttttgtgctggcctggtactcagtaggtttttgctgtgaggttaaagacttgccaggctgaacttcgaaacagtttttctgttgcacagtatgatgtaacagtccatctctcaatgcaataggtatcagtggcctcgtgagcttcttcacaatattgatatgtcttccagcccattgaacctggactgcagaaggccccatgtcatgtgtgagctcagcctggatgccagcattgctgctcctcttagttccgtttctcgtggtcactttactacgagaaacgctgattgggttttcgtagctgtgttccaggtttttagtatcagaactattctttctttaacctctattcatattttctctacttgaagttttacattcaggaaaacctcagctcaggactactatgtacctcccctttggagggaaaaattattttaggtaaaaggcaaaaattttttaaaaatatttttatttataattatatggaagggccctaccaagatgctagaaatatagggagttcctgacaagaaatttccattcttattctgaagaattgctttcttacttaaaaacaaagacagtttgtgagtagttctgggcaatagggataaatataaaacaataatgatgatcattttctacatctcattatcagctgaggtactgtatattactgaatttattgaagatagttatgtcttttagacattgttgttataaactatgtttaagcctactacaagtgtttctttttgcattatgttggaattgatgtaccttttttatgattacctctctgaactatggtgtgaacaatcaaacaaaatgatgagattaacgttcatggataaattctaagaaaactagtgtatttttttgaaaagtttgaagttagaacttaggctgttggaatttacgcataaagcagactgcatagatccaatattgactgacccaagcatgttataaagactgacattttagacattttgaaggccctgtaagtgtttattaattagttagaacttaattgattaaaaaatatatccaaagcactataggcattagaattcgtgcatcaagaaatgatgacaaataatactgttatttatataaataactaaaaagggtgtctaatgaagaaatatattttattacaaagaaattataaaacattttgaagattatatgctttaaaagtttaagatgaaaaaataatcaaccttagaaaaaatgtataaaaatatataaattgttaatgtcattgattaaaaaaaaaaaaaactagccaacatgatttttgtgaatatcaacctgctgattgaacctgggaattcaggttaagtatgtgactgctacagtgcctcagagaaatttgtatttaaattaacttatgtaaaaaataaatcttagagcaaatgcttgtttatttttatacttatttaagaattgaaaacttctgaaaataaagtttgattgtttctttatatcatggcattgatatctctgagtcatgatccttaaaccattatcttatgtcctttcatctacaataagagtgaaatgtaccttactggtagaacagttgcctaatgcttaggaggccctgggttctagcttcaacactgaacaagaaaaatctaggttgtcccttaatgaaatggttctgctcttgcttacatgggttctaacaagagtcagaacttattacctcagttgctgaagaactgttaaaatatgtgctatgtactacagagacatcaaaagcatgtttaaaaagaaaaaagaaaaacatgttaagcagggtgtggtggcacacacctttaatcccagcactcaggaggcagaggcaggtggatttctgagttcgaggccagcctgatctacaaagtgagttccaggacagccagggctatacagagaaaccctgtcttgaaaatcccaaaaacaacaaaacaaaacaaaacaaaacaaaacaaaacaaaacaaaagcgtattttcactgcctaatctagaaaaagtcaatataatataaaggtagactgggcaagtgagatgactcagggtggaaaggggctctcctccatacccaatgacctcagctcaatacccaaagtccacatggtaaaaggagcgaactggctctcatgaattgtcctctgagctacacacacacacacacacacacacaaacacacacactataaatacactttattgtaaagaaggcaaagactaagatttttttgttacacgggatgtataaaatatgaaaaggaaggtcaaaataaagaggagtggagagagaaaaaggagaggaaaggaaaggagaggaaaggagagaacagaggagaggagaggagaggagaggagaggagaggagaggagaggagaggagaggagaggagaggagaggagaggagaggagaggagaggagaggagaggagaggagagaacagaggaggagaggaggggaggggagaggagaggagaggagaggagaggagaggagaggagaggagaggagaggagaggagaggagaggagaggagaggagaggagaggagaggagtcagtccagcctgctggtacatgcctttaattccagtactcaaaagaaagaggctggtgggtctctgggagcttcaggccagccttttctttatagtcaggccagccagggctacacagtgagactctatcaagataaaacaaaataccaaaaaaactagtgaacaaacaaacagaacagacagaagcttgagcagaaacatacacagccagacaaattgttagaacactgttcatggctcgttttgtatccctactttgggcatcttggtaatttctatagctccacagctcacaagttgcacagttttgctgcccgttctgacccttgggtcccactagtaccttttcccacaatatccctctaaccttacatcttgacctcatccctattacttgctgtactatttcgaagtccttgattttcagcatgctccttgacttcccaacatttcagtgtacctaccaagcctcagtgcctgtcttaagtatgcaactgcagagcccactgctgattcaccattgccaggatatccttatctaccaccctatcatctcttacttctcttttcatcaaactgagactccatattttcatccatcctcttaataactatttttatcttccttcctgcctttttgtagaaatatggggtctcactgtatagccttgactggcatacaactaagttgatcaggctgcactctcacagatatcacctgcttgatctctgagtattagaatcaaaggcttgcactctgtcatgtccagctacatgtttccttttatgatgtttgccttgttatttttctttttttatttaactaataaaatttattttaaaatacacaactcagtattgacatttatctatctatctatctatctatctatctatctatctatctatctatctatctatttattttacactccatattttatacccccctatccaccctccaactgttccacatcccatacctcctcctgactcccctgtctccatgtggatgtcaccacccccaccccacctgatctctaaattccctggggcctccagtcttttgactgttatgtcaatgatttctatggtatcttctgcacctgagattctgtcttctattttttgtattctcttggtgatgcctgcatttatgactcatgatctctttcctgggttttctaactccaggtttgtctccttttgtaatctctttattggttctagttccatttttagatcctgggtggttttgttcatttccttcacctgtgtgattgcattttcctgtaatttttaaagggatttttgtgtttcctctttaagggcttctagctgcttaactgtgttctgtatttctttaagggggttatttatgaccttcctaaagtcctctatcattattatgggtgtgattttaaatcagagtttggcttttctggtgtattggggtatccagggctcgctgtggtgggagaactgagtttccatgatgccaagtagccttgatgtctgttgcttattgcccttgcctttaaccatctagttatctctggtgttaactgttcttgctgtctctgactgtggcttgtccctcctacaagcctgtgtgtcagtactcatgggagaccagttctctctgggcagaatttgggtatggagagctgtgacacagggatagctcctgggtagacagataccagaaggaacctgtcccaggctgttcctccattcctgtgtcctgagggctccaggtggcagaagtggtggtcttacctgtgcttacaggtatgtctgcagtcctgggagaccagctctttcccggtggtatttgggtatggagcaccgtggcacagaatcagctctgggcacttgttatttttcaagatgggagtctcatattgtaacccgggctgattatcaagttgtgacaatcccacctcagcttcccaagtcctggtattacagataatgttccagtacctggcttaaccttttccttatttggctcttcagtaacattcacagtttgctattctcctggtatagtttgctattctcctggtatttctcatctgcagagtgtccctttcctctgctgtatctgtacattaacataccataatacctttcatgttattgttcactcagactcttaagtttagacaataatcactcccaagttcatattttcaggattaacttctaattggcaattagcaaccatcctctcaaatttacaaatgccatcattcattttccatctctctctacacaatgcatgcaccatctaggccaaacagtaattatctcatgttagttagataaccagcatcttctcgttttaagcaaaagctttgtcttctctcccataccttccctagcagctctcctcttgacagcattctatagacaaatcagaattctgtcagtttcctccccaattccacccgtatcaacccggtcagtgtaatcgtctcttaatggacaaccctgctatccctccttttgcccaaaacattcttcttatgagagtttgcatgttttaaatatcaatctagtcatggctctcctgtgtctgaaatcttctagtgacttcttatcctacaacacatagaagcttcttattctatgctgtagggaactcaattgtccatctcctacctacctcattgagctaatatactgctcttcctgtacttgtcatatttcaatttctgctgttgggacaaaatgcttaagactgggtaatttggtcatggctgtggaagctaggcgggccaaagctatggggtttctctagaatgcttctgccccatatgtatcaatggatgcagggaaaatgggcaaactggctatgggaagaggaaggacatcactgtcctgttaagtcatggtggagtgggaaagtacatttatcccttcttaaaggtaaagcccctatgatccagaagcctcagaagcacctggccaccttgcagtaatgtttatagccaattatatttcaacatgagttttgctaacaagtcacatgtaaaccacaggcacacctgtgtttcctacacctgtcatggtgcctttctgggatttgattattagcaatacttctcaagatgatgacactcttccgatttttttctgaaggttttcacatgggtctgtcttctcggaagtccatctcagtccgtgttcctccccctcagacagtcttcctctaacctgctgaactaaaagaacttctcggacagcacttctcaggctattggatgttcttcataacgctcattgcaatcttatctgatactattatgtttagtgtgtttcctatgttcccattctagatattcatgcctgtggcaggaaataaccttgtctgagtcattcatagctttcaaaatactaaatatatttaaaagtgattaaaaacacatgaaggatgtataaggagagactttatttaaaaaaacaatgtgaagtgattcgtgaaaaaatatgacatctttgccagctgagatatcttctctgagaaggtctgccattttcttctataataacaacatcaaaatgcattaacatactatatttctgactaataggagaaagtggtaaaatctgagtaagctcggtgggttgtgccaatgtccgtttcttgggtttgttgtaccatagttatgaagatgtcagcattttgggaggtgtgaagtgcagatcctcttgcctcccttctttgcaatgtcctgttaagggatagtttagttttcaaaattgtaagtggattgtttgtttgtgtgagacagggtctaacccttgcttgcctggcattcattatatagcccaggtgagctttagattcacagcaatcctcctgcctcagtctctccttgatgagtgtagggattatcactatgtccatttttatttggggagtgtttatttattcatttttaagatttgtttttattggttttgtgtgtgtgagtgaatgtggccctgaagggcagaacagggtaccagattccttggagatggagttataagctacccaacaagaagtaattcaggtcctccgcaaaagcaaaagtactcttaaccacttagccatctttctagcaccatttagttttatttgattgtgtgtgtgtgtgtgtgctttgctcacatgtatgtttttgtaccttgcgcatgcctgatgcccacagagaatagaagagtatattgaatacccctacaacgacagttactgacagttgtgagccatctggatgctgagagtggaacccaaatcctctacaagagcaagtgctcataaacactgagccatctctccgggccctctttttttggtttgctttgttttgtttggagatagggtcttgttatgaacccttgccggtagatcaggctgggcacgaattttttctcttcctcctgccttggatttaaagtactgggattacaggcatgtgccaccattataaagtgttcttttccctagtacttatccttggtatttttaattatgcatatccgtctgtttgtccgagtgcaagtaccctcaaatgccagcaacatgatactggaattggtttctgaacttcaggcctcacaattgagcagcaagtactcttacttaactgctgagccatttcttcaggccactgaagttttaaattaaagagcaaacaaacagaaaacaaaaacaaaaacaaaaaaaaacatttttaattttcattgtcaccctgcaaagtaaattcaaatatattattaaggactcaaaatgattgcttctccctcctctttttttctttttttctttcaggccccatagattcattgagccccttcctcctatctggccctctttaaagatcctttcctccctctcccagaaacactgactttttcagaacttaacagccacaggctaaagatatagtaaagaaaagagcttaagataagtagtaaaagttctctgttatgtaatctaagaaataagaatcattttagcaagatccacccctcattaaactcaatcagaattcaagagagatcagattgggtgttgctgtgtttaatgtttaattaaattgaatttaaatttttgttttaaagttttatattaaaattatttgcaatttctactaaacttttttatatttgcattttaattatttttaagtttacattctgtgtgtgtgtgtgtgtgtgtgtgtgtgtgtgtgtgtgtgtgtgtaaaacttgccagagttgactctctttcccattctaccacctgggttctggaaattagattcaagttgtcagacttgtgttcttaccactgtcatggttagggttttattgctgtgaagagacaacatgacagcggcaacttttatcaggagacatttaattttggctgacgtacattcagaggtttagcccaatatcatcatggctggcaggaggcatggctggggcacaggcagacttggtgctgcagaggctgagagttctacatctgggtggagggtgaacaggcagcaagtaggaagacagagatactggactgaacatttgaaatctcaaagcctaccctcggcccccagtgacacacatcctccaaggtgacatttcctaatagtgtcactccttatgggtctcaggggccattttcattcagaccaccactacatcctctgagccagcacatcagctcttgtggtttgttgtctgagacactcttctataacatacttttggaactcactatgtagcctaggctggccttcaattcaaggcgttccttctgcctcacccttccaaatgctcaggttgcagatgtgagttatgatattcaagcgatattttaagcaatgcacaagtcattggagaggtccatgtacattcgctctcagaaatgaatactccaattacatagaagccacatttccaggaagtgctcaagaaaagagtcatgattccacaaaattaagaacacagaacaagccacatacagttcacaccccagtagttttctttcctagataattacaaacaaaagcagccaggagtttgagttaggctaaccttgcaccctggggactccatcactaactctctatctcaggaactcccatcacgtggcctctgtggggatggagttcccttgcctttcacttgcccctattgttccgagtaggtgatgtggtagcattattgcgtgactttcccctggctcttaaccaaaactgttcataatgacgacattcacaaacacagggcggggtatgctcttgagagaatgtcttgcactgacttagcattctgaaagaggctaagaaaaggggccaatgggtaaacactcttgctccttaagcagtaaaaagggtggcgatgactcacatgacaagaatgttcctttcgcccacaccctgaaacctcccctttaaaatgcaaaatctaacattatcatgctatattttatttagacttaatttatctagagtattatctaacctctcactgctgaggttttataatgctccttaatttggaggaaatcctgcttgaaagaaagaacttgatcaatccagtccggtgcgggtggtaccagcagaggcaggaggctgggttttttgctttcttggttttgttttgaggccagctggactctgacttaaaaataagtaaataaatagataaataaataaataaacacataaattgtacttgtataaaatctccaatttgggggactttcaaactggatacattagcaatggatattctttattattttttttaaattcttttcacacctacaaaatgatacatgccataaatattcatttatttatttatttgtttatttatttatttattattatacacaagtacactgtagctgacttcagacacaccagaagagggtgtcagatctcattacaggtggttgtgagccaccatgtgtttgctgggatttaaactcaggatctttggaagagcagtcagtgctcttacccgctgagccatcttgccagccccataaatattcttaaaataaatttacattagtaggttaatttagagcagaaactgtgtttatgtttagcaatttaggattccatttgaaatcactagagagacattgcgattacaatgcaatggtggatcactagacaaattctgacgctgtaaaccttgcaaattccctattgataacactcaggtgatcaagatgtggcggtgccccaggttcccggagttctcaggctttgcaattagacagcctggtttgctctggctcttcccatttccagctttgtggtaaataaaacacccacattcctcatctttaaaaggcaaactagagaacgcagatggagctaggttggtggtgtctgcttagcatgtaggaagaccttcgttctagcctcaccttagagctcgaaatttgctgtggtggtacagacttgtaattcaagaggcctaaacattctccaggtggaggcaggaggatagtcctcagctacataactcattcgaggctagcctggtatatgagatacatcaaaaaaacatgacaatgataagttatttttctgcgattaggaaagtgattcttgttccgccaatacaggcaactgttaaaaatccttatttcaattcaatttcttaactaaattaaatgcttgctaatatttgatcaaactaaaaacgtaaataaaaatgaaagtagaggcatgtaagcagtgaccaggtctgtaatcccaagggttttgtccagtcagagtcagttgttcgcaatttattttttttctgtttcaaactatcactcaaggcaaattgacattaaaataattactatgttgtgtgtggacacagctggcatgttgtggaggtcagaggacaacttgaggttcatcttatgcttttcaggggatcaaactcaggtcctcagacttgccagcaggtgactttacctttattacctaccgagccagctcacaggctttggctgaccttgactttgtggaggactccccccaccccacctcccaccccccactttcctgtgcaggtattagtttgtattaataggaatgagccgcagaattccactaaacttttactgttacaggctgtgcgactctgctaaaaggtacgtacccgaacaaacaactcaaatgtcctcatggaacctcattccgggccctttgaacgtggtctgttttaggaagctaaggcagggggttcaacaccatggaaaggccatcagcagtaaggagaagtatgtatgtacagagatgcagaaggtcatagacatagaaaaacgtttcaaccgagaaaccactaaaatatgatctttactgtaaactcacattttcaagtgacctggaaggttttagtaaaaatctgagagagtggggctggagagatggctcagcgattaagagcattgctgctctttcagaggtcctgagttcaagtcccagaaaccacatggtggctcacaaccatctggaattcctttttctggtgtctctgaagacagctacattgtactcgtcatataaatatatatatacataataaaatctttaaaaaacatttgagagaggaatgagaattcagaactatccctagctttgttttaatggtggttgctgctggtaggggtgggggtggggtgtttttttcctattttttattgctactgttttggttttgattattttttggttgtttgttttcttctgttttttgttttgtttttgttttttgtttgttttgagacactctatggaatcttgacctctgcagcctccactttccaaggacaaatagcacaggcctgtgatatatggggcatatctttctgtcttactttgtttttattttacaaagttcggagtgttatagttctatagagaggatgcttatgtcctcctgaaattcctctgtacattctaatctgtgtcatgacgatctggcatctggggatggggcgtgtacggaactctctgatctgtaaaccttctcacggggactctagagagaactgcttcacttagtttctttccccagagaggagaggagaggagaacacagagagagagcatagatttgctcctgcaggagagttccttggtacatagcacacagcacagcggggctttccaacttcagggtcccttactatttcttagtgtccttgtaccttagggaacaggaatagcttagggaagatagcgtagggaaggaggtagcatcgttttcgatgcctttcaaggtattgctatcacacagtgttctaaatacagtcatgtgagtcactgtgattccttggcatttgtgaagaaaagctgaagtgccacacgagtgttctaatgtcagggctagaataagatacccagtgtcttaaattgtttgatagcctggaaaaaaaaaaaaggtttactttacagaaaacatacggatgagatgaaatgaataaagtaaacaaatgttttttgagggagggggggatgatttcttccctagaaacattgataagcatctttaaaattcctttttctcagctggacatggtgatgcatgcctaaaatcttagcacgtggaaagcagaggcaggcagggctctgtgaatcccaagccagccaaggctacaaacatccactttctctgcttgaattgtgaaatgatacacaaacaaacaagatttttgtgtgtgtgacgatttagtttcctttttaaaaaaaattctttaatccttttttacagtccagtcttcatccccctcccagtttggctcctgacctctccccatatctgtcctccccctcagtcttcaagacaccttaagtctctctctcaagggttaggtgtttctctcactaaggccagcccaggcagtcctctgctatatatgtttcaggggcctcatattagctggtctatgctgcctggttggtggctcagtgtctgtgagatctcagagggtccaggttagatgagattgctggtcttcctatagggttgccctcctcctcagtttcttccagcttttccccaattcaaccacagggtccccagcttctgtccattggttgagtactagtatctgcattggactctttcacctgcttgttgggcctctcagaagacagccatgctaggctcctgtctgcaagcataccacagcatcagtaacattgttaggctgaggggcctccccttgagctggatcccaatttggatctgttactggacctcctttctctcatgctcttctccatttttgcccctgcagttccttcagataggaataattctgggacagagcttttgattgtgggatggcaactccatccctccacttgatgtcttgtccctccactgaaggtgggctctacaagttccccttctccactgtagagcacttcatccaaggttcctccctttgagtcctgagagtctctcacctcccaagtcttcagtacattcattctagagggtcctccctaagttgccttagctttctaagaccagcagcaagccagaagtgtatctgtataatctctatattctacagtcactgtataacttcagctaaaacctctctctctttctctctctctctctctccctccctccttccctctctctttccccacccccccccctctctctctcacacacacacacacacac

SEQ ID NO: 68 - DNA, 31889 bp, Mus musculus
gtgtgtgtgtgtgtgtgtgagagagagaggggggggggtggggaaagagagagggaaggagggagggagagagagagagagagaaagagagagaggttttagctgaagttatacagtgactgtagaatatagagattatacagatacacttctggcttgctgctggtcttagaaagctaaggcaacttagggaggaccctctagaatgaatgtactgaagacttgggaggtgagagactctcaggactcaaagggaggaaccttggatgaagtgctctacagtggagaaggggaacttgtagagcccaccttcagtggagggacaagacatcaagtggagggatggagttgccatcccacaatcaaaagctctgtcccagaattattcctatctgaaggaactgcaggggcaaaaatggagaagagcatgagagaaaggaggtccagtaacagatccaaattgggatccagctcaaggggaggcccctcagcctaacaatgttactgatgctgtggtatgcttgcagacaggagcctagcatggctgtcttctgagaggcccaacaagcaggtgaaagagtccaatgcagatactagtactcaaccaatggacagaagctggggaccctgtggttgaattggggaaaagctggaagaaactgaggaggagggcaaccctataggaagaccagcaatctcatctaacctggaccctctgagatctcacagacactgagccaccaaccaggcagcatagaccagctaatatgaggcccctgaaacatatatagcagaggactgcctgggctggccttagtgagagaaacacctaacccttgagagagagacttaaggtgtcttgaagactgagggggaggacagatatggggagaggtcaggagccaaactgggagggggatgaagactggactgtaaaaaaggattaaagaattttttttaaaaaggaaactaaatcgtcacacacacaaaaatcttgtttgtttgtgtatcatttcacaattcaagcagagaaagtggatgtttgtagccttggctggcttgggattcacagagccctgcctgcctctgctttccacgtgctaagattttaggcatgcatcaccatgtccagctgagaaaaaggaattttaaagatgcttatcaatgtttctagggaagaaatcatccccccctccctcaaaaaacatttgtttactttattcatttcatctcatccgtatgttttctgtaaagtaaaccttttttttttttccaggctatcaaacaatttaagacactgggtatcttattctagccctgacattagaacactcgtgtggcacttcagcttttcttcacaaatgccaaggaatcacagtgactcacatgactgtatttagaacactgtgtgatagcaataccttgaaaggcatcgaaaacgatgctacctccttccctacgctatcttccctaagctattcctgttccctaaggtacaaggacactaagaaatagtaagggaccctgaagttggaaagccccgctgtgctgtgtgctatgtaccaaggaactctcctgcaggagcaaatctatgctctctctctgtgttctcctctcctctcctctctggggaaagaaactaagtgaagcagttctctctagagtccccgtgagaaggtttacagatcagagagttccgtacacgccccatccccagatgccagatcgtcatgacacagattagaatgtacagaggaatttcaggaggacataagcatcctctctatagaactataacactccgaactttgtaaaataaaaacaaagtaagacagaaagatatgccccatatatcacaggcctgtgctatttgtccttggaaagtggaggctgcagaggtcaagattccatagagtgtctcaaaacaaacaaaaaacaaaaacaaaacaaaaaacagaagaaaacaaacaaccaaaaaataatcaaaaccaaaacagtagcaataaaaaataggaaaaaaacaccccacccccacccctaccagcagcaaccaccattaaaacaaagctagggatagttctgaattctcattcctctctcaaatgttttttaaagattttattatgtatatatatatttatatgacgagtacaatgtagctgtcttcagagacaccagaaaaaggaattccagatggttgtgagccaccatgtggtttctgggacttgaactcaggacctctgaaagagcagcaatgctcttaatcgctgagccatctctccagccccactctctcagatttttactaaaaccttccaggtcacttgaaaatgtgagtttacagtaaagatcatattttagtggtttctcggttgaaacgtttttctatgtctatgaccttctgcatctctgtacatacatacttctccttactgctgatggcctttccatggtgttgaaccccctgccttagcttcctaaaacagaccacgttcaaagggcccggaatgaggttccatgaggacatttgagttgtttgttcgggtacgtaccttttagcagagtcgcacagcctgtaacagtaaaagtttagtggaattctgcggctcattcctattaatacaaactaatacctgcacaggaaagtggggggtgggaggtggggtggggggagtcctccacaaagtcaaggtcagccaaagcctgtgagctggctcggtaggtaataaaggtaaagtcacctgctggcaagtctgaggacctgagtttgatcccctgaaaagcataagatgaacctcaagttgtcctctgacctccacaacatgccagctgtgtccacacacaacatagtaattattttaatgtcaatttgccttgagtgatagtttgaaacagaaaaaaaataaattgcgaacaactgactctgactggacaaaacccttgggattacagacctggtcactgcttacatgcctctactttcatttttatttacgtttttagtttgatcaaatattagcaagcatttaatttagttaagaaattgaattgaaataaggatttttaacagttgcctgtattggcggaacaagaatcactttcctaatcgcagaaaaataacttatcattgtcatgtttttttgatgtatctcatataccaggctagcctcgaatgagttatgtagctgaggactatcctcctgcctccacctggagaatgtttaggcctcttgaattacaagtctgtaccaccacagcaaatttcgagctctaaggtgaggctagaacgaaggtcttcctacatgctaagcagacaccaccaacctagctccatctgcgttctctagtttgccttttaaagatgaggaatgtgggtgttttatttaccacaaagctggaaatgggaagagccagagcaaaccaggctgtctaattgcaaagcctgagaactccgggaacctggggcaccgccacatcttgatcacctgagtgttatcaatagggaatttgcaaggtttacagcgtcagaatttgtctagtgatccaccattgcattgtaatcgcaatgtctctctagtgatttcaaatggaatcctaaattgctaaacataaacacagtttctgctctaaattaacctactaatgtaaatttattttaagaatatttatggggctggcaagatggctcagcgggtaagagcactgactgctcttccaaagatcctgagtttaaatcccagcaaacacatggtggctcacaaccacctgtaatgagatctgacaccctcttctggtgtgtctgaagtcagctacagtgtacttgtgtataataataaataaataaataaacaaataaataaataaatgaatatttatggcatgtatcattttgtaggtgtgaaaagaatttaaaaaaaataataaagaatatccattgctaatgtatccagtttgaaagtcccccaaattggagattttatacaagtacaatttatgtgtttatttatttatttatctatttatttacttatttttaagtcagagtccagctggcctcaaaacaaaaccaagaaagcaaaaaacccagcctcctgcctctgctggtaccacccgcaccggactggattgatcaagttctttctttcaagcaggatttcctccaaattaaggagcattataaaacctcagcagtgagaggttagataatactctagataaattaagtctaaataaaatatagcatgataatgttagattttgcattttaaaggggaggtttcagggtgtgggcgaaaggaacattcttgtcatgtgagtcatcgccaccctttttactgcttaaggagcaagagtgtttacccattggccccttttcttagcctctttcagaatgctaagtcagtgcaagacattctctcaagagcataccccgccctgtgtttgtgaatgtcgtcattatgaacagttttggttaagagccaggggaaagtcacgcaataatgctaccacatcacctactcggaacaataggggcaagtgaaaggcaagggaactccatccccacagaggccacgtgatgggagttcctgagatagagagttagtgatggagtccccagggtgcaaggttagcctaactcaaactcctggctgcttttgtttgtaattatctaggaaagaaaactactggggtgtgaactgtatgtggcttgttctgtgttcttaattttgtggaatcatgactcttttcttgagcacttcctggaaatgtggcttctatgtaattggagtattcatttctgagagcgaatgtacatggacctctccaatgacttgtgcattgcttaaaatatcgcttgaatatcataactcacatctgcaacctgagcatttggaagggtgaggcagaaggaacgccttgaattgaaggccagcctaggctacatagtgagttccaaaagtatgttatagaagagtgtctcagacaacaaaccacaagagctgatgtgctggctcagaggatgtagtggtggtctgaatgaaaatggcccctgagacccataaggagtgacactattaggaaatgtcaccttggaggatgtgtgtcactgggggccgagggtaggctttgagatttcaaatgttcagtccagtatctctgtcttcctacttgctgcctgttcaccctccacccagatgtagaactctcagcctctgcagcaccaagtctgcctgtgccccagccatgcctcctgccagccatgatgatattgggctaaacctctgaatgtacgtcagccaaaattaaatgtctcctgataaaagttgccgctgtcatgttgtctcttcacagcaataaaaccctaaccatgacagtggtaagaacacaagtctgacaacttgaatctaatttccagaacccaggtggtagaatgggaaagagagtcaactctggcaagttttacacacacacacacacacacacacacacacacacacacacacacagaatgtaaacttaaaaataattaaaatgcaaatataaaaaagtttagtagaaattgcaaataattttaatataaaactttaaaacaaaaatttaaattcaatttaattaaacattaaacacagcaacacccaatctgatctctcttgaattctgattgagtttaatgaggggtggatcttgctaaaatgattcttatttcttagattacataacagagaacttttactacttatcttaagctcttttctttactatatctttagcctgtggctgttaagttctgaaaaagtcagtgtttctgggagagggaggaaaggatctttaaagagggccagataggaggaaggggctcaatgaatctatggggcctgaaagaaaaaaagaaaaaaagaggagggagaagcaatcattttgagtccttaataatatatttgaatttactttgcagggtgacaatgaaaattaaaaatgtttttttttgtttttgtttttgttttctgtttgtttgctctttaatttaaaacttcagtggcctgaagaaatggctcagcagttaagtaagagtacttgctgctcaattgtgaggcctgaagttcagaaaccaattccagtatcatgttgctggcatttgagggtacttgcactcggacaaacagacggatatgcataattaaaaataccaaggataagtactagggaaaagaacactttataatggtggcacatgcctgtaatcccagtactttaaatccaaggcaggaggaagagaaaaaattcgtgcccagcctgatctaccggcaagggttcataacaagaccctatctccaaacaaaacaaagcaaaccaaaaaaagagggcccggagagatggctcagtgtttatgagcacttgctcttgtagaggatttgggttccactctcagcatccagatggctcacaactgtcagtaactgtcgttgtaggggtattcaatatactcttctattctctgtgggcatcaggcatgcgcaaggtacaaaaacatacatgtgagcaaagcacacacacacacacacaatcaaataaaactaaatggtgctagaaagatggctaagtggttaagagtacttttgcttttgcggaggacctgaattacttcttgttgggtagcttataactccatctccaaggaatctggtaccctgttctgcccttcagggccacattcactcacacacacaaaaccaataaaaacaaatcttaaaaatgaataaataaacactccccaaataaaaatggacatagtgataatccctacactcatcaaggagagactgaggcaggaggattgctgtgaatctaaagctcacctgggctatataatgaatgccaggcaagcaagggttagaccctgtctcacacaaacaaacaatccacttacaattttgaaaactaaactatcccttaacaggacattgcaaagaagggaggcaagaggatctgcacttcacacctcccaaaatgctgacatcttcataactatggtacaacaaacccaagaaacggacattggcacaacccaccgagcttactcagattttaccactttctcctattagtcagaaatatagtatgttaatgcattttgatgttgttattatagaagaaaatggcagaccttctcagagaagatatctcagctggcaaagatgtcatattttttcacgaatcacttcacattgtttttttaaataaagtctctccttatacatccttcatgtgtttttaatcacttttaaatatatttagtattttgaaagctatgaatgactcagacaaggttatttcctgccacaggcatgaatatctagaatgggaacataggaaacacactaaacataatagtatcagataagattgcaatgagcgttatgaagaacatccaatagcctgagaagtgctgtccgagaagttcttttagttcagcaggttagaggaagactgtctgagggggaggaacacggactgagatggacttccgagaagacagacccatgtgaaaaccttcagaaaaaaatcggaagagtgtcatcatcttgagaagtattgctaataatcaaatcccagaaaggcaccatgacaggtgtaggaaacacaggtgtgcctgtggtttacatgtgacttgttagcaaaactcatgttgaaatataattggctataaacattactgcaaggtggccaggtgcttctgaggcttctggatcataggggctttacctttaagaagggataaatgtactttcccactccaccatgacttaacaggacagtgatgtccttcctcttcccatagccagtttgcccattttccctgcatccattgatacatatggggcagaagcattctagagaaaccccatagctttggcccgcctagcttccacagccatgaccaaattacccagtcttaagcattttgtcccaacagcagaaattgaaatatgacaagtacaggaagagcagtatattagctcaatgaggtaggtaggagatggacaattgagttccctacagcatagaataagaagcttctatgtgttgtaggataagaagtcactagaagatttcagacacaggagagccatgactagattgatatttaaaacatgcaaactctcataagaagaatgttttgggcaaaaggagggatagcagggttgtccattaagagacgattacactgaccgggttgatacgggtggaattggggaggaaactgacagaattctgatttgtctatagaatgctgtcaagaggagagctgctagggaaggtatgggagagaagacaaagcttttgcttaaaacgagaagatgctggttatctaactaacatgagataattactgtttggcctagatggtgcatgcattgtgtagagagagatggaaaatgaatgatggcatttgtaaatttgagaggatggttgctaattgccaattagaagttaatcctgaaaatatgaacttgggagtgattattgtctaaacttaagagtctgagtgaacaataacatgaaaggtattatggtatgttaatgtacagatacagcagaggaaagggacactctgcagatgagaaataccaggagaatagcaaactataccaggagaatagcaaactgtgaatgttactgaagagccaaataaggaaaaggttaagccaggtactggaacattatctgtaataccaggacttgggaagctgaggtgggattgtcacaacttgataatcagcccgggttacaatatgagactcccatcttgaaaaataacaagtgcccagagctgattctgtgccacggtgctccatacccaaataccaccgggaaagagctggtctcccaggactgcagacatacctgtaagcacaggtaagaccaccacttctgccacctggagccctcaggacacaggaatggaggaacagcctgggacaggttccttctggtatctgtctacccaggagctatccctgtgtcacagctctccatacccaaattctgcccagagagaactggtctcccatgagtactgacacacaggcttgtaggagggacaagccacagtcagagacagcaagaacagttaacaccagagataactagatggttaaaggcaagggcaataagcaacagacatcaaggctacttggcatcatggaaactcagttctcccaccacagcgagccctggataccccaatacaccagaaaagccaaactctgatttaaaatcacacccataataatgatagaggactttaggaaggtcataaataacccccttaaagaaatacagaacacagttaagcagctagaagcccttaaagaggaaacacaaaaatccctttaaaaattacaggaaaatgcaatcacacaggtgaaggaaatgaacaaaaccacccaggatctaaaaatggaactagaaccaataaagagattacaaaaggagacaaacctggagttagaaaacccaggaaagagatcatgagtcataaatgcaggcatcaccaagagaatacaaaaaatagaagacagaatctcaggtgcagaagataccatagaaatcattgacataacagtcaaaagactggaggccccagggaatttagagatcaggtggggtgggggtggtgacatccacatggagacaggggagtcaggaggaggtatgggatgtggaacagttggagggtggataggggggtataaaatatggagtgtaaaataaatagatagatagatagatagatagatagatagatagatagatagatagatagataaatgtcaatactgagttgtgtattttaaaataaattttattagttaaataaaaaaagaaaaataacaaggcaaacatcataaaaggaaacatgtagctggacatgacagagtgcaagcctttgattctaatactcagagatcaagcaggtgatatctgtgagagtgcagcctgatcaacttagttgtatgccagtcaaggctatacagtgagaccccatatttctacaaaaaggcaggaaggaagataaaaatagttattaagaggatggatgaaaatatggagtctcagtttgatgaaaagagaagtaagagatgatagggtggtagataaggatatcctggcaatggtgaatcagcagtgggctctgcagttgcatacttaagacaggcactgaggcttggtaggtacactgaaatgttgggaagtcaaggagcatgctgaaaatcaaggacttcgaaatagtacagcaagtaatagggatgaggtcaagatgtaaggttagagggatattgtgggaaaaggtactagtgggacccaagggtcagaacgggcagcaaaactgtgcaacttgtgagctgtggagctatagaaattaccaagatgcccaaagtagggatacaaaacgagccatgaacagtgttctaacaatttgtctggctgtgtatgtttctgctcaagcttctgtctgttctgtttgtttgttcactagtttttttggtattttgttttatcttgatagagtctcactgtgtagccctggctggcctgactataaagaaaaggctggcctgaagctcccagagacccaccagcctctttcttttgagtactggaattaaaggcatgtaccagcaggctggactgactcctctcctctcctctcctctcctctcctctcctctcctctcctctcctctcctctcctctcctctcctctcctctcctctcctctcctctcccctcccctcctctcctcctctgttctctcctctcctctcctctcctctcctctcctctcctctcctctcctctcctctcctctcctctcctctcctctcctctcctctcctctcctctcctctcctctcctctgttctctcctttcctctcctttcctttcctctcctttttctctctccactcctctttattttgaccttccttttcatattttatacatcccgtgtaacaaaaaaatcttagtctttgccttctttacaataaagtgtatttatagtgtgtgtgtttgtgtgtgtgtgtgtgtgtgtgtgtagctcagaggacaattcatgagagccagttcgctccttttaccatgtggactttgggtattgagctgaggtcattgggtatggaggagagcccctttccaccctgagtcatctcacttgcccagtctacctttatattatattgactttttctagattaggcagtgaaaatacgcttttgttttgttttgttttgttttgttttgttttgttttgttgtttttgggattttcaagacagggtttctctgtatagccctggctgtcctggaactcactttgtagatcaggctggcctcgaactcagaaatccacctgcctctgcctcctgagtgctgggattaaaggtgtgtgccaccacaccctgcttaacatgtttttcttttttctttttaaacatgcttttgatgtctctgtagtacatagcacatattttaacagttcttcagcaactgaggtaataagttctgactcttgttagaacccatgtaagcaagagcagaaccatttcattaagggacaacctagatttttcttgttcagtgttgaagctagaacccagggcctcctaagcattaggcaactgttctaccagtaaggtacatttcactcttattgtagatgaaaggacataagataatggtttaaggatcatgactcagagatatcaatgccatgatataaagaaacaatcaaactttattttcagaagttttcaattcttaaataagtataaaaataaacaagcatttgctctaagatttattttttacataagttaatttaaatacaaatttctctgaggcactgtagcagtcacatacttaacctgaattcccaggttcaatcagcaggttgatattcacaaaaatcatgttggctagttttttttttttttaatcaatgacattaacaatttatatatttttatacattttttctaaggttgattattttttcatcttaaacttttaaagcatataatcttcaaaatgttttataatttctttgtaataaaatatatttcttcattagacaccctttttagttatttatataaataacagtattatttgtcatcatttcttgatgcacgaattctaatgcctatagtgctttggatatattttttaatcaattaagttctaactaattaataaacacttacagggccttcaaaatgtctaaaatgtcagtctttataacatgcttgggtcagtcaatattggatctatgcagtctgctttatgcgtaaattccaacagcctaagttctaacttcaaacttttcaaaaaaatacactagttttcttagaatttatccatgaacgttaatctcatcattttgtttgattgttcacaccatagttcagagaggtaatcataaaaaaggtacatcaattccaacataatgcaaaaagaaacacttgtagtaggcttaaacatagtttataacaacaatgtctaaaagacataactatcttcaataaattcagtaatatacagtacctcagctgataatgagatgtagaaaatgatcatcattattgttttatatttatccctattgcccagaactactcacaaactgtctttgtttttaagtaagaaagcaattcttcagaataagaatggaaatttcttgtcaggaactccctatatttctagcatcttggtagggcccttccatataattataaataaaaatatttttaaaaaatttttgccttttacctaaaataatttttccctccaaaggggaggtacatagtagtcctgagctgaggttttcctgaatgtaaaacttcaagtagagaaaatatgaatagaggttaaagaaagaatagttctgatactaaaaacctggaacacagctacgaaaacccaatcagcgtttctcgtagtaaagtgaccacgagaaacggaactaagaggagcagcaatgctggcatccaggctgagctcacacatgacatggggccttctgcagtccaggttcaatgggctggaagacatatcaatattgtgaagaagctcacgaggccactgatacctattgcattgagagatggactgttacatcatactgtgcaacagaaaaactgtttcgaagttcagcctggcaagtctttaacctcacagcaaaaacctactgagtaccaggccagcacaaaaccaggatcaggatgtctcctttggaagtttaaccctgaatgtgatctttaattgggaacccttctttgttcttggttagttcctttgtagaagcttttgttgctctaggctttgctggctaccactcatcaacgagctttaaagctcacactcatagttaagacagagcagcacgggctccaccaccttccacaccagcattttgacatacaaggaaggtctgattgtcatagtaagtagctttcactacttctaagaaaagacaatccctgacatggtatcttaaccatcaatcatgacataatttctactagttttggagatttacgtttatgatagctgtttactccatgtcggtacaaacctgacagcttaagaaagtaagagctttcaaaagtgattcaaactcccaatttagaaatttcaaattatttgtctcaagacaacattttaaaaaatgagattgttgtcagtatctgccttaaatgcttatttaaaactgaacttggacccctttgtttgatgagataaagatatgcaagatttaagaagaattccacattacatgctcctatcatagtaaagaagacacagttgtaaccaacagtgttgatacctgcagcatttttcatcttgtaacaacactcacatattcatacatttttccttggttcttgttaagctaatcatgatctgaaattcaagtataaagatatcaaaattcatttcccttctcactggcttatgtagaggaatgaatgctgatttcctttcagtttcaggtaacacatatttaaaggacaaacaccggagggaatcttcacaaatgtaacattgttcaagaacattgccttctgttatggaagatgttacatgaaaaaaaattcagtataaatattaaataattaaattaaattcttcacataaataaataaatatggtcagtagacttttacagctcagttgaacgccttttgattagtactgtagggttaatgtcatctagtctggagtgggaggcacttgcattgatggtggctgttttggtaggctgtggatcttgcacattgaaagaagtgaagggacaccccttcacattattgcagatgagagactgaattgaggcagtattgatgatcttaaaacccacttcgcctccaaaggtgctcggcttccagtattgaggagaacagatgggatttcccataagtcctttcaaggagaatggtgctccaagctctaccatggtctccccaaagatagcatctggacgaggtttttccaccagcagggcagggtacagttccatgacatcgatgtcactgtagagggctttcaattctgcagccatttccttctctcctggaaggtaccaaagatagagatacaggaacatcaaactgggaacgggtgacaattgtcctggctgttgagcataggctttcccccgctcactagctgaccccattcccactcctctttctcagtaaactcggtccttttctatttctagaagaagaagaagaaaaggaggaggaggaggaggaagaggaagatagtttatcccttcactaaatgccctctcacgttctcttttcccacttaatccctgatccttttagaaaatttagaaaccattcctcacctgtaagttcttcaaatgatgtgtacggcttcagggagaagcgtttgcggtactcattgagagactggtatttcatctctctgctctggtcaatggaggcctttgccactgcttgtacagcaattggcacatttcttcccccagcaacctaagacaagtgaataacaaaatgagattcttaggcaaattcctgaagtcctatgtcttgacctcatcacttctattctataaggaacatgatttttgtgattataaaaaaataagctgataaacaagtctgaatattaacttctctaatatataagatgactgaaatcttttaaaaatattggttttaagatagacaggtgtcattatttgctggataattttagatgaacctaaaacccttcctaaaccttgtaagtgtcatgttacaagaaccagtagaaaagtaaaagaaaaaaaaaaacctatctctatgacaaaaatcctaaagctactgaccagctggttcttgcttttcaggaacaatgcttacccggccagcaatctgtctggtgaatgactcaacaaactgagtgagtccatgttccaggaggatggagttgttgtagagaaactgtttgaagctgtactcctggtcttcaatgttgaaggtgtcgggcagcagggggtgccagtgatagagtgtgttgaattcagaggcaatgcggttctgatactggaactgctggttgaaaaggagctctgggtcaaacttgagtttgaagtggtaaccgctcaggtgttgcacgtagtcttcgatcactatcttgatagtctctcctgttacacaacacagagactttagtttccttacaacaaatggtagggatgttaccagatcacatttactctccctattcacaagaaggaatcaaaacatagcaaatggaagagtttttcttttctgaggggaagatgatcttacttgttatttctctcttgctcacctatgagtatgagtctgctggtttggaatagttgctcatcaccccactcaggatgctcctgcttgagtatgtcgcacactctgttgtgctcccgaagccagatggtggcatacatcatcagaccaggcaccagaccaaagacttcctgccccacagcaaactgcaggttctcagggatgtgaggagggtagatcatctctacctgagtgtctttgactgtggggggatacacctctccaccaatgacctaaatcacaacaataataacagagttaaaagaaggaaaaaaaagccacaatagttttaatatgtaagtctaaatgacagatggtcatttttaaaccataaggaaaatacctgatatttcaattttccatccttgaaaaggcgcagtttatgttgtctgtccagagtttcaccataaatgtgatttaagtccacctagaaaattaagtatggagaaagttcaatttactgattttttactataatttcttattcaatattgatgatttagttgtctttaaaattcaccacgtgattttcttaagatttattttatttttatatgtatgagaatttgcctctatgtatgtatgtatgtatgtatgtcatgtgcttgtctggtgccctaaaatgttacaaaacatggaatctcctagaactgactggagttataggtggttgtgaactgtcatgtaggtgttaagaacttaagcaaaagcaacaactgttcttaatcaccaatctagctcaataagtgactttttcatagccacaaaattctaaaataatttgtctaccagagctacaagtctgtatatttctttatgttgaatagtattagtatcctatattaaatatgccacttgcttcattataaccataatagtaattttacattgtttaaagaagcatagaaggggattttgtatgtgtgtgtgtgtgtgtgtgtgtgtgtgtgtgtgtgtgtgtgtgtgtgtgtaaaggctggacctcttctgcctcaatagcagagaccagtgcctggcaagcacaaacttctaaggttcacttcccaatgccaccgatgactaataatttatttatttatttacagaagatagacccttttcatggaccaaacttttaaactaaaaatgtaaggaaaattacattaaaatatgtctctgtgtgtcagttcatttttactaaatcagaaaatgaaaatggaacacctattatggttttagtagtcatgacatttggattaaaaaaaaatgggtgtgatttgtttggcatggtaagatgtcagcattccctaaggatttgctataaatctgagttaagcccacttactccatggcccagtcctcgggtgaacccaggtcctcgcttatgatctgtcttgaaaaactgatgggtgaagtgctgggcaaagaatgcaaacatcatatttgagccttgggggtcagggatgaactctctccgtagaagaaccttttccagcacttcttttgaatcaggaagctccttatttcctggaacatgtaaattctaaagtaagtatctatccattcacctatttgttcaagcaaacagatgactgtataatacatgacagcatccatcacttagaagcaccgtctcaaagaagatcacaacatcaatacgactgttgtgttttgaggcacagtgtcaggcttgtaccccaggctgggctaaggttttaaattcaagtgttaagatataaagcagggggtgttattgaattttttatgaattgtaactaacatcagttctatttagcaaaacatactaaggctaagacattacatcaatgcagatttactttcccatactacatctgtacttttaataaacctctgtggataaccatactaaagacaaaactatttacagttttacataatggacaccttttctaggtacacacccaagcctcactgcagttgctatgtctgtatttctttacactcacccttcacacccatgggagttgggcagtcatctgctacgggaggaagggccctggtgtagtaggagaggttggagaaggcttcccagcttttgtaaccatagtgcacattgtaagtaggtggactgtcaatcaaatatgatctggctgaaattttaaagaaaaaaaaatcattggtcctcatatgaaaaacaacaacaacaacaagggcatatcaattatcattgtacaatgtagcaagtacagagactagatttccttcagacaaagataccctgctgtacaatggctgaactttaaagagcactgaaaatgcatcttcaataaagcttaaattttacacaggacattctgctccagtagtcttgacttttcagtttctacccactccctgttccatagctgatgacagagacatttgggcatggccctcaccaataactacagacagctatttttctcttctgacccaaaccctagtcaaccatttgtttcaaaggttcagaacaattctatgtgttccgaacaattctgtgagccatgggtatttattcaatgaacaagtgaaccacacttcctccacacgaatgaaggacaggggtcaaaactagaatagagactacaggttttcatgactgtattttagacatttcaggggaaaaacagattagaaaaggtatacttcaagccctttgaaaaggtcaggatagttcttggggttgggtttctagtgcctagttgtgttggaggatgctggaaaacaagggagggttgtacttacatgtcagcacatatttcatgattaaacttcgcaggaaggggatgttgttcacaatgttccagactcccttgaagtgggtcaggatgtagtgcactgtgtttggggtgggcttcagcagtaatttgattcttgtcagaaattcagctggagagagacaaagcaggaggaagaatgagcaggcccctcccccataggacacaaatctacagaatgatggttacacatgtggccacattccaaaggaagataccccaggaaaaacttacgtgtagtacagttttcaccatagaatccagtccgggtacagtcacacttatactggtcaaatcctgtgctcatacattccccacggttttgacatggattggaacagcaaggatttgctacattaaaaaaataagatatcctgtcagttactcttggttgttctcatcttaacttaaggatttaattctgtcactatgggtcaactttacaatgataagtttgacaaatacataggtagacccagatttaaaaaggtcattattttaattaagtctgtcttatcaactgtttatggaaatagcaagcaactttgtattcttaagcaagaaacacagaggacctaacttcatagttcacattaccaacatttttaaaataactcggacacacagactagaattattaagcatccctttaaatattaaaatggatcgacctagtgcaatagtcaaaatttagtgtaaagaaaataaaattaaaacagtcaagttttagcattttaaatatatttttaaaaatgtattctggatttttctgtggatagaaaaactctaacaggtattcaaagcagccactcttgttcagttgcccacatctatgcttttcacaagtattgatcagattgtcttaccataatgacaacctgtaagccattaagactattggtttttagcaaataagaaacctgaaagtgggttgcagttcctcaggacttaagcagtccaggctctttgccaatacacagccaggcccacactgctagaaagggggtctgagcctgaggagtcccagggcgcctcggggcgcaactcacctgcctggctgagccccagggcagcgcagagcagcacagctcggaagagcatcgcagaggtggcagcggaggtggcagtagtggtggcggtggagctggcaggatgcagtgctgagttccttcgtgagcagagtcctgactgactcctgaagctcttagctcgcagtttgacaactggctgctaatggggagaaccttgcttttaagtctgtaaagcggactccacgtgacgtagtggtgactctgtctttccgcttaggctttccccaacccccaccaacttttccccctctctgcttcagtgagttgcgcaagaaccgcagcggcaggcttttacccacgcaaatgagagacgaaggaagccgggaagctgcccttggctgccccaggtggtgccaagagagctgcaccgccctctccatccctccaggcgccctgtggttcgctgagtctgcgcctagtctggcgctctttggggtctccggtttcctcccagtcgcgcatccagtgggggcctaaaagctcaagagtgtcacagcttcccctcccgggatctaaggtcctaactaagggaatcccctcacctctccccactggggcgcagtctgacgtgctcgctgctcagagcacgcacacagctaccggttaatttaatttcttctatttttaatgaaatgagtgtcctctgtcagggtccacatctgtactggtggaattaggttgaagtctttcatggaactaccctccgggttctgcagtcacaggagcccctggcactcgcctttcccagggacagatgctgagctccacttcatcggaatgctaagtgtccacagcattgctttaaggtattttccccctgctgttacatagcttttatcattttgatcagcaactcttttcacgggatgtatcactagaaagaatttgttttcaaatgtaccttttaaaaactttttctgtccatgtttacaagaaagtatgttatggcaacggatcaaaaggtaatagttatttttccataactagccttattctccctaaccttaaaaaaaaattcacttcattcagaaacagtgtttgataaaaaattatttgcctagagaggtgatgtttttgatagtgttggatatcttcctactgtgtttgtgttggccatggagggggtgtgaggatggagtagcgaaaaggagcaaaataagaaaaggaggaaactaaaaaattcaactaaactgtacgttcttggcgtgaatggataaaaaaaatgacacagagtgtgaaattacactatattctgaggacagttaagtcaggaaaatggtttgaagcaggctgggtaacacagcaagacccctgctcaaaacaaaacagaacaaaacaaaacaaaaatgaaaggggagaatatccacatgggggaatccaatcgaccatgagaagcagcacttaggaaactctagcaaatacctgactctgcggaagtctcccagaaagtaagaatactcatggaatttttttttaactgtttgcttcatgtgcaagctaatttgatgctacatgagacacagtgactaaaactccatgtcacccagggcctttgttctagtcatgtttaatcagtccaggtatggcactcccagcctcttacacggagtcttatgggaaatttcaactgaaagcacagactgttttcttttggagaatccctttaaatagttcttgttttctgttttattttaaatgcgggaagtgcatggtgtcaaactaagtttgttagagctcctgatacgaacttcagctaggaactgtataaaattccacattcttgactgtgtacgaacattttctagtgaaatcttcaactgactttgaccaactccatcctcatctaatattaattgtatgcccattatgtagagaagtatattctgatgttttaaaagagattatggcaaagggggtggtggtggatggtgatgttggcccttaatcccagcattgagggagaaaaaggagtctaagcagatctctgaggcctccctggtccacagagcacgtttcaggacagccagctatacacagaaaaatcctgtctcacaaaaactaaaagaaaaaaaaaaaaagaaaacattacaaattcaaagtgaggggaaaaacagggcatagagaataatcaccttcagactacttgacatttaaagacattaaacataatcatagaagaaatgcaagtaaaattatctgtatggttgagttggttgatctaatctgtaacctcagatgtaaggagagttccatatactacggaatgacaggagaactcagtaagaaattcagacctggaggacaagagcagttttgaaaggaagtccaaataaggacataaggggaaagtattttgtaattggctgcttttgagaagtctgggatgccagagcacactgtacaggcacaattggaatactggttacaggggaatattaactgtcccaaaccaaatcaagatggttcaaactgttctgtatggcaaagcacaatggtaatgaggctccttaataagatgtttattatatagcaagtgtagtgatgaactgtgtggaattttggtggttctctgtacacttgggtacatatttaagtgtctgttgtagaaaatatattttgttagtatatgaaagagttttgagattctaaaaaaggaaaataaggaaatgtactaacacctttgagaacattctgttgagttttactgccctcttctgctgcttgaattttcagcaacttttttctcctaagatgctaggtagattgttaggtagattttcgttctaattttataatgcacttagataattaaacatgcagtgttgatattaaatgtaaagttcatgcatacactggaaataaatgacatttttgtttttgttttgggtttggctttttattaattgttatttctttttcttttcctcgacacgggtatctctgtgtagtcatggccatcctggaactcactccatagatggagctagctggcctcaaactcagatatttgcctgcctctgcctctgacatgctgggcttgaagacttgtatcaccaccatctggctaataaaggacatattccttaattcaaacaatatcccattcaaagagaaagttaaaagtaaaaagaaagatatactgtggtaatagaggaaagcaagaatagttttatttgtttttatagagcattctttagaggaaagaaatgtagaagtaataaagaggagtagtgcatttgatagcagtcagttcttcaagaataggtacagtgatccttatgggcactgtacaacaatgaagccttcatacacatgagggcagaacaataaaactgcagggggaaagagatggtgcgcccttcactactcctcaccagaggtaggcagttctatgacaaagcagatagctgaggtgagcacaactgtaagtcatctggccatgattaacatctaatgctgtgtcattcaaggacagcaatataaagtctcttctaagttacatggaacatataccaggacaaaccacatcctagtctataaaagcacaccttaatacacttaaaatagtaactacacaatgtatattctcaggctatggatgagtaaaattaaaatatgaatcactgagggcaataaaatgggcatagtaattcatgcttattaactcaataatttaggatgtagagataggaggatcagggcttcatagtcatcctcgactgcatagaaagactgagtcttatttacaagagaccctcccacaaaaaaaaagataaataagaaaaggttaaaaaaggaggaggaagaggagaaggagtaagagaaggaagaagaggagggggaggggagagagatgaggggaagaagggaaaaataaaaaaaggaaaatgaatcactaatacctggaaaatccccaaatatctggatatcacaagatacattttaataatatagggcttaaagaggaagctcagaggatattaaaaaatatcttgagtcaaatgaaagtataacttgagatgtctagaattcagagaaagcagcataggaggttatagcagggaacacatggatgagcaaaggagactgaaagtcagaagtcagggctcccatgtcatcgcagtagaaagatcaattaaacccaaagtaaacagaaacacagagacaattaacatttgaacagatatcagtgaaattaaagccaggaaattaatagagagtcaacacaaacaggccacttttgaaaggccaataaaatcaatgtctctagccagtccaactaagaaaaaataagataaaaattaacctaatcacaaacacttcaggaagatgaagccatacagaaaccataaacatctgggcagataataaaagtattctctgaacaagagagacaggaataaaggattgtcacatgcagccccccggtctacagagggagttcaggacagccaagattagcatgtcaagacctggttccaaacaaacaacaacaaagaggtgcattattaaaaattactattcactggctttatggtctcaattgaatgtataaatctccgtttcctctgatttccttctctgtttatatggtgtatgtatggggtgcctaaaagtaagtatgtagattcctcccgcatgcttttggagatcagagcagactcttcctcttttggaggtcagtgcaatacataaatgctttcctcaattgctctctaccttgttaccttgaaagagggcattttaccgaatgaaaaccatgctttctgggctaggttgactgagtaatgagttcttgcatcctcctgtctctactgccaagtgctagggttattggtatatgattgtccaattttttatgtgagtgatggagattcaaatttaggtcctcatgcctgccaaataagtattcttatccaccaagccacctttgcactaattctctttctctctctctctctctctctctctctctctctctctctatatatatatatatatatatatatatatatatatacatacatatacatatatatcatatatcacattataatatataccatatatcacaaatcatattatattatgtattgttatatattatttgtacatatattttaacacatatatatgtgtgtatatgctttatttatttatttatttatttatttatttatttattttgtgtgtgttttgtctgtgagtatcactgtatacttcatgaattattgttgcctgttggggccagaagagaacatcataccccctagaactatagttatagaaagttataagctgccatgttggtccagggaattgaattcgggtccactggaagagcagtcagtacttttaatcactgagccatttctatagccccttataccaacctttgaaagcaaattttataaaacctcatgtatgaagaaaacaagctaagccggcttttatctattaaagcattgaatcaatgtcaccctgccaaacagaaagaatcaggcttatacaggcttgctggtgaactccatcaaatgtttaaaggacatgtatcacttccacacagtctgtattagaaaataagaatagaggcatgactgcctagctctgtctatgaggccagcatgaccctaacactaaaatcaacaagcaaactacagcgtaatattgaacatgaatagccaagcaagatttaaacgcgtgggctggagagatggcttaaaagatggttcagagcaccaactcttcatcccgatggctggggtttgattcccaggactcaccaaacttttcacaatcctctggaattcctacttcagaggattcaacatcctcttctgacatctgaggacaagaggtacacacatgtggttcatagacaaaacataggcaaaaccacaatgtaggcaatatatatcaatacataagcttttaaacacaacattaaaaaaatcaagtccaccagcctgcaaatataattaattatacatcatgattaagtggaatttatttcttctatgcaaagctatgtcactatcccaaatgtatatagacaaccttaaggaaaaaaaaaaagatagtcatactccaggtaattggaaatagaaggtaaatgtctccattcctgccaagatataccccaaacttgaagctaataccataactggtaaggaattagaaacatttccagtaacatccaaacaagacaattttgtccctgtttgttgctcttttaaaaagtttatttgtttgtttgtaggtgtatacacaggtatgtgagtgtaaattgatgtatctgtgtactccctgagactggaagaaagagtcatgacgcccaacttattactgggatctaactcccttcttcatgtatagcaagctttcataaacactgagccaccactccagagttactcccttgctgctgcttttaaactgtataccagccagatatgatgctgaatatttgtattccaaatccttgggagttgaggcaagacaatctggagtccagtaattctcagctcataacaagttcaaggtcagcctgctcacatgacatgttgtgtcattaaaaaaaaaatgaatgaatgaataaataaataaataaataaatgtgtgtgagttttttcttagtaatagagtaagatagcaataaaatcatcttaacagatacttgttcttttctataggatgtccataagaatcatcagcaaaatcttcctgaaactaagttggaagatacagagaaattttaatccagcaacatggctgttctaccaaggcattacatccaaagaccttctgtgtctgtgtgctctgactggaatgcagacatgcccttagtacattcctttaatccctttggctaccatatcaacacacctttaatcccaagcaatgaaggtaaagttagtttgtagatggaagcagacatgtttgaaaatgacttctaattgagaggcagacaaagtgaagagtcagagaaagatttgacagaatgaatcagagataagatacgaccaactcccgggagaacagcacaggaaggggaggtgacttgagtgagggagggcagttcaatgagtgcagagcagttgagttcaggcaatacagtaactttcagtagaatcatctcagttgaatcattccagtcagtgcaattcctgcagcacagtcaggttcagttgagttcgttcctgagttccgtgcagtttgggaggttcatgtaggtcagcagaggcagctgaagccagagaatgagaaggaccagaagattagaacaaatttccagaagtagtttaagccaaacagaataattcagtgaaaagccgagagaagcctatttgaatcagtcagcttgaagaggagtttgagccagaacagctgagttgaaccagccagccatcattcagaaagaactagaaagggtgagcttatttagctgtaagccttggagatgacagtagtattgtttgggctggcatctccttcagggaattggcttaacagatgttgaaggaataatttcctcagtcaaaggttccacagtcgacaccctctaaggctggcacttaaattttctttgtaatttagtcaactttataatgagggtttcagcttgatttctacaacttgagctctgtgggtgctacagagaagattctcttccagagcacatttagaaacctttagactgtttatttggagcctgtcagtattatcactgagtttattgctgtccttcactgtattctgagatgcttcaagttggttaattttatcagagagctcattcttttccattgtcaatttatatagaaatgataagagcaatgaaccagcatcattatttttcttattttcccacaaattgtcaaatttttgtatacacaaaatcacaaaatcacaattggtaaatctagataagctactgcttctgcccagataagtttgtaaaatagttcaccctatgggctttcaatattctccaagcttctagaagagcctttggtaaccatagtacacattggcaaattggatagcatcatccaggtacttttaaaaaattcattcctatacttcttttgttctagaacaacttctgttgccaaaaatttgtattcgtaaggattttgtagagaaacagactgaaacaatgaatctatctgtctgtctatctatctatctatctatctatctatctatctatctatctatctatctatctatctatctggttgtctgtctgtctgcctatttatctatgtatctaccatttatctatcaaggggatttatatgaatggcttgcagcctgtgatcttgctagtcctccaacagctgtcagtcataggaagcttcaagtcctcccaaggtgttcaatccctaagactggaggactcagctgctctggagtatacacaggaaccctgaagaagtaggctctaatgtcaatggagggatggacttgccagccagaacaagaatattggcaagtggggacggagagaaatcttcctttttccatgtcttttacataggctgccgtcagaagttgtggcccaggttaaagttggatcctcctaccttaagaaatccagagaaggggctggtgagatggctcagcaggtaagagcaccagctgcttttctgaaggtcctgagttcaaatccaagcaaccacatggtggctcacaaccatccataccgagatctgacgacccacttctggggtgtctgaagacagctacagcatacttacatataataaataaataaataaataaataaataaataaataaataaataaataaataaatctttaaaaaaataaagaaaaagaaaaagaaatccagagtaaaagtgtgtgtttccacttttaattagttcctgctatttaaggaacaaaaaactctccaaggtgtactcagctgcttagtttcagttaattccagatataggcaggctgacaaccaagaacaaccatcacaagtgtaatgacaatttttaatgccatgttaagtgcttcatccattaaagaaatgtaataatctggactgcagtgaaatttaaaatttcagctttacaaaggatggtaggagaatgagaaggcaaccatagggaaaaaatatttgcagaaagcatcagatattatctaccaaaaatgtaagacttcttaaaagttaaatagtcctattaacaagtcaatcaaaaacctaaacagacaccagaacaaataatacatatacatgcatgcatacatacatacatgcatacatacatacataaatacatacatgtatatatttgtatacatacacgcactcacatcacctcatatctgtaatctcaggtctcaggagattgagcctgtggaagtattgtgagtttcagaccagcttggacatcaaggccagcctgagctagttaaagagacctcttgaaacaaataaacaaaacacaatagataaaaataaatctcacagccgggcgtggtggcgcacacctttaatcccagcactcgggaggcagaggcaggtagatttctgagttcgaagccagcttggtctacagagtgagtttcagatcagccaggactatacagagaaaccctgtcttgaaaaatcaaaataaataaataaatctcacaagcacaaaagatacacaattagataaaatgaactgtggtatctataagaatggcacacacccagtgcctttacaacaacaaaggctgcagagaaaagggagccctccgtccctgcctgtgtgaatgaagaatggctcagcctgtgggagagacttgcagctgttgcatttcttttcacaaaagtaaacagacccttactatgatttggcagccatgtgactgggtatttaccaaaaggctaagctggaatggctagactatagtcctgggatataattcagacctaacaggaaatgagatctgatctgtgaaaagagaatgaagaatctgagtgcatattaattactaagtgaatgtagttgcaaaatagctcataccttaaaggggggaagggattgtttattctgagcccaatataagtgacctggccctatactaacaggaattcaggttacccttgaataccctgtactatggatgcaggtacatgaaactactacttccagaaaaaagagagtctaaatcaagactcttacttaattgtgagggtccaaaggtaggtggtttatgcaaggcaagcgaaactctaactataggttttagatgtgtcctaatgatagtcctagctttgggattggaggaaactggggatctgctaagaacacatctgaacaggctttatatgacagtgaaagggatgttagtgtagtgcccacaaggatggacaatgaacggctattaaaggaactaaaagtggcccagataacctgtgagattctactgctcaatcgggaagttctaatttgcattcctccttgtagaatcgaacacaatatggttcttcttcttcttcttcttcttcttcttcttcttcttcttcttcttcttcttcttcttcttcttttcttgagaacttcagacaccaatataagaggcagtagtatactacaggatttcaacatacaactggggagaagtcatcacatattcgacaaatggtattttcaactgtagaataaactgtagtgtgtatgatggatttgggtcccagtgtgttttcattgacaacaacactagaagcactcaggcagaagctgttgctaggagcctgcgggagaggaggtactgagacgatctagctactctttatttctagactacaaataagctttattttaaaattaacttctacctatgaatgatggcttctgactttggctgttctttattgttgatcccatctctgcatctgtactgctgtaaggaaatgcctgtgctgaaggcactgcgtgtttgtgtgctgactcttcacaatcactggagaaaatcttcaaggaggaatgcgtagctctaaacagtgacagctgcttatgctctgagcacagatgggaagtctatttccttttcagccagagcctcactctgccctaaggacagatacgtaagggacagactcctcctagccctcttcccacatccacaaaggacttgccagtgaagacaccttctcccctccttttgaataagccttccagtctcccaggtttgcatccctcccatgacgccagggccacttcacagcatctcctctatactctcacatgaatctcaaaagccacatgtctaattaccccccctggatcttttcatctcaccatactaaaaactcaacctatcctctacaagacaagacaagacaagacaagacaagacaagacaagacaagacaagacaagacaagacaagacaagacagacaagacaagacaaaacacaatataagtccattttaagggtctcagggttttgagggggaatagaagagaaccagggtctcatctttgtgaatgtgggggaagggtaaatgctaaatatttttacaggtttaagtgtaccaaatcaacataattaaaagacaaactagggggcaagcaattcaattatgtcatggggtacctgaagagaaaaactcctgagaaagtcctgaataaattgaatggagcctttattagctactcacaggactgtcccaagcagattaacaggaaaacctgcagttatgatgtgtacagagagactgctctagacatctgcaacgagcaagccttgtttatagaagtggagtagtaacagtgaaatggccaggcagtcaatctctagttctggatcatatcatataggaatttagggctggtccagaggggccagttttaccgatacttttagcacttgaagtattcttaggaataactttatgagatagcataactatagtttaatagcctactacattaacacttgtaaatgaataaaaataaacatattagtctgtaaatatgtgttgagggatgagttctatttcatactgaaaatggaccacctaaacagtgaaggtgctttctactaatctggtaacttgaggttgattctggaactcacaaggaagaaatttgaaaacca

SEQ ID NO: 69 - DNA, 202144 bp, Homo sapiens
ttttcagatggtagttcaactggggaagaatctgctttcaaactcacattatgtgttggcagaattcacgtccttgtggtttcacaacctagggcttcaatttctttctggatgtcagctggagggcaccctcagctcctagaggctgcctgcagttcaaatagaaaataattctctgttgcagaagttatggccttgctccagaacctcaggggtgtgcctcctattgggactttccagggacaccagatagcatttatctacagcaaatacctctgacaccactggatctgctggattatatagttcaagtagcagctttcaccacagcctggagctaatcctgagatgtctctgactacggtacccactagcaactggacattttctaagtctcctgataaatgggttgaagctgtattcccaaagacagtacatgctgccttcaaaatcagaggaggcccactaagtgataagccactttcttagtggcagggggtgagaagtgcaataaattgtcatttacattaaaggtgatgctcccagcatacccagagcactgaatcttaacaacttgatcaatgtggcaagccctcaattatcttggagtttatctcccattctttgggttacatgtattttactggccacttagcctgtctactcaaagtgtagtctacagacagatgttggctggtgaacacttggttactagcctgtggaaagataaattcataaattgaaaatctatatttagaaattttatagcaatttgccattgctgtgacttccaagcacatgatcagaagactaatctcattgaacaaagtatagatcattgtgattattgtcaaactcatatggtgatttgcacatgcagcaagatacctactgttcaagttcagttatttccaaaagtattgctccaagacagtttggaaaaaataaaaaaagaattggagagtttcagaagcactgatccagagtatttgcccctttgtactttgtactccctcccggacagagagcaggagaattaaaatagccctgggccagaaagtaaacgtgtattcttatcttttgtatatgagggcaaactgcttttgatccttcctgctgatgggaatcaagaaaggcacatttaccaagttagtaactgcataccaaggtcaatgttgattttctcaggggaagataccacatgctgtatggcagcgcctcttggagctaatacctggttaagagtatagttgtctactgtcatctgccatgatcccattttttgcaggggtcagacgggagaattgaatggtaatataagggaaactacaacccctgcattctttaaatctttgatggtgatgtaaatctttgcaattcttcctagaatgctgtcttgcttctgatttactatcctgacttggggtgacagtggcagtttcaaaggcttctacttggtcctcctacataatgactattaatccatgggtcagggagccaatgtgaaggttttgccagctaagattgactaccttaattagacattcagtgatttaaacataaaatgcattcatgggcaatcagatccactgtgagttggaattgagcccaaactccactggtccctattctaactggagaattacattggtatcagggtcagctcagactttgtatctaacagttcttgaatacttgatattcctctttcttccactgcatgctctcacctagcaaatggccacgagtcattttggggagccacctatcaaaaggagtcattacataacttataggcaagagaagacttctcaagcttgaggtggtgcttctgccagccagagggttcagagcactagtgggctgcagtgagcacattccaccttgcagaagccatttgtgtgcatttctttttaattctgtgtttggtgacattatgctggtagcttgaaattgaccaaggtgggagtgtttacataacagaaattggcaaatattaaaatgtccttccccaccaccctctcccctgagaactggttgttaaatttctttccagtacattacagagtcaggggtaacatagaagattcaatattctcaggctcatctatccaaatgccctatcctaggtcttagggtaatactctttttcctttcaagaacaagatgtgggctaggagaccctgaaagtccatgcatttggttgccttttcaactcttctgcccttacaatcagcttccgtgacttcctgtagcctaaagcaaactacactaaatattactaaaaattgccagtagaggccctctggccttcacggtgtgacttaaggtgacaggtggctgccctgaggcatcattttgttttacaaggtatacaattccatcaacagaatcaagcccctctatagtccttacagttattgtccccacactgttcaaacagtatggctactacctatcccaatgccccaccttctatctgcactgcatctcaattagctacaggtgggaagcctttgtaatcatggtatcactgtgttgcttcataactacccactcactgtgccatgggtctttattgccacacggtcggtaagtaacccaactctagcattccatcctgagtgtctgcaggacgctcctggtgccaagtcttttagcctgggttctgtagaaaacagagcctgagtgtagtttgagagaaactggagtgaagacgaacgggctgggcaaagaaggaagagaaactattaataataaaatagtgtattaccgaactagctacctcttggtatcaagcccgggtgattggtcagtatcatgagggtcatattttgagaggtagtatggactactgtgtttcaggacaatctgtctgggtggaggaaggagaggagtttatatgctggacccatcttgttttgattagatttaccccaaggacattaactccactgcacttacggctacactttgttagaagcccaacagttaggcactatctcagccctcttggggtgggaggtgagatgtgtgtggcttggggaaagggaggggaaccactgggatgtgccaatgtaaagtctgttgcttcagtagtctctgggcagggcccatacagttggttgctatggtggcagttggggaaaacaagtggtcaatgaccctggagttaggccaggctgtttggcttataggtgacatatacactgcttgatatgtctaccacactgcccttcttgaatcttggttttcggcatttctttaattctatttagtgttcttccaataaattctcattttttggttgctaatcagagccgatttctgtttcatgaggccaaggaaacaattttaagcaatattttatactctctttagtgctccaaacactgttgtatacttatttggtgctaatgctcgatgaactgcagaaatttgtctatgtactgtaccacttatctatcgctgtataacaaattgcccccaaattaatgactaaagcaataatgattcactggttcttctgctgatcttctctggtaggtgggtgggtataggctcagcctctttctccatgtggtctgtcatcttcatagggactaacccacacttcttacatggcacctggatttcaggacagcaagccctaatgcacaagcacttatcaaggtgcttgctgagatcctattggccaaacaagtcacaaggccaagcccagcatcagtgtggaactctgcacaaaggcatgaatgtcagtaggtgtgattcattgtaggccatcagtgttagtctaccaccaggtatttacattgttctttagagcagagacttccggtggtcccccaacagctgttctcccttgcttctgtattaagagatccctgaattctgttaatgaactcatgattgtcaaaaaaagttttttttccctgtaccccacagtaaggtgtggctttgcatccacgttttgatcaatgggatgtaagcgaaggtgtattgtggcagtttccaggaattttccttaagtgagaacaggcgtgtgcctctggctttttctttatgccttccagcaccctgctgtttaaaacgtaggtacgacttttggctgccatcctggacccttaagtaccctccagggatgatagagttatgagctgaaggtgcctgtgtccctgaggacttcactgagcagaaccttcacttagtcctagaattcctacctctagacttttacctgggatactaatcttttatttaatctattgttattttgggttctgttattagcagctaacataatcctgtcatactattgaaatatagtctctctatgtttttaggtcatactcgacagtatgtaatttttttttttttttgagacagagtctcactctgttgcccaggctggagtccagtggcgtgatctcagctcactgcaaactccacttcctgggttcaggtgattctcttgccttagcctcctgagtggctgggactacaggcatgagccatcacgcctgggtaatttttgtatttttagtacagataggatttcgccatgttggccaggctggtcttgaactcctggcctcaagcgatctgcatgccttggtctctcaaagtgctggggttacagatgtgagtcaccaaacctggcccacagtatgtaatttcttaccttccgctcatcttcacccaaaacattctgatagcccttattgattagaagaggaggagaatgcattaagtttagttggcagaaattgtgtgaatttaaaatcatgcatttagagaaacatgtgtggctcatcaagccattaagaaaacaaaaaagaggaaactacaaaatgtttgcattcctgtagcccacaagagacaaatctagaacaatgctggggtctggtcaagtagggaaagctctcagtaagaccaagcacaaaccccacttctggtttccttggtttggggctgtctcatgttaatgatatttttcatgagaaaaaccacatgcaaatgaaacaattcgttgtccccacttggaggtgcagtggtggtggtggggagaactagggaagggtttgtgcatcagacaaaggttgggattacaagggttgtagatgaacgagatgtgcctttagttacagccacttcttgagtgctgtatgtctatgtgactcctgatgacttggtcaaagaaaatatcaacacattgccttagctgttttccttgatggggagaaatcgacacacttggaaatggaagaatttcctctcttgttgcagtggctttgtgcattggcttgagctgcagtcatctggcagtttgttgcttcagtcactggccctggcccttgccactgccaggcagagttgagcctgcactgaagacatgagaatactggatcaatacaaacgttatggaaaatgttttaactttttctttttttaaaaggcctgcctgttatctttatacctctgttacccgccccaccaccccagaaatgagccagagcctttgtgatggctagatttgtttgaacatttaatctccttccccatctgttttgagaaatatctagcctctttatcagaagagagcttaaagtctcaccaacattcttgccccaggtgtcatgggctgaactgtttccctcaaatttatattttgaagtcttaactcccagtacctcagaatgaaactgcatttggagatagggtctttacggaggtaattaagttaaaatgaggttgttagagtcattcattggaaaagtatttgtcaaatgtctactatgtgccaggcacatgttaggcatgcagccccactggttaggagaacagatatagacctaccttcagagactgtctggcttcgtggacatgtagcctgtgtagtcacttagttctccatgttagaaagaccctgtggttggtttaatgctctgttgccaccatcttgaaattcttagtaatttttcaatgaggagttctgcattttttttcctctggaccctgcaaattatgtaattggtcctgctcatggaaattggtatagtaggagaatcaatcatattctctgcacttaggagtgtggtttggtggcatggagagaaggtcagtgtagcagaagtagtacagtataaaaagatgaagatgataatattcacaatggcgggaaggagtggagtctgctgctgggggatgaaaagatacatgagtggaacagcaggggttcttttttgttttctttacttttcctcccagaccttattattaaccttgaataattcagataaactgaacaggtctctgttccttgaaacctgaaagaatctaacatgcacatatgggaagttatttaagtcatgggattgaaatagagcaagaagagaggaggattgaagacgcttgaagaccagtgtttcccacactatctgtgaaggaacttttcattctttttcattaactgtttgtcatgaagtgatattaacactttggaatgtaaaatagaaacaaattgcaaaaaattataatgaaaacagaggcacaccaaatattgtacaagctcacattttttagattaaacagaaatagaattacatttcaataaaaattatcagaacaaacataaataaaagaaaaaattacaaaatgtacattgcttattgaaagtgtccagatagataattaataaagagaattgccattatcctcctaatatttatcacctcacagccgtaacaactaacaaaaagttgggagtgaagtagtaatttcccactaaacaacatgaatgttaatatttgaagttttaatgtgagaaatgagtgggctctttgcttgttaaattatctaatctaggttggattggtgacatgctacttgcaggagatgatgtatatctaaattgtttttatattttattttaacaacactagtagtagaaaaactagtctctcaaaaatatgttgaagggaacagaagaagacttaaagcaatttaacaatatcaggataatcacttttaacttttatccttaatgatggaaacaatgcgttattttcaaaattcatcttcaatctttcatcagtagccagtttcaaaaactgtcactcaagttatctttcaatgaaataaacggattttggatccatgaatttcttgcatgtggagcttgttttgatagaaaatactcagatattttatcaaatttataattagttttttaatattttgtatataaatgtcctttaagtttgatggctttattgtttcattagtctgtaatgattttagcacttcactatgagttatggctacaaactcaataacaagggattatacttctgagtaaaattagtacaaactcctatttgtttaattctttggaattacttctctgatcattatttagtttactactgtgattactaacacattactgatgtgtgtcttgtattggcaaaattggacagtaaggattgttttgccatctataatttagggttaaaaacaaatgacacaaattttactcccctaatttagctaagaatttacaaaaaataggcttgattaaaaatgaaaatgattgtaaaaataacaagttatataagtaaataaatatttacattttcatagatttttactcttgggttgcaggtgacaaaccttgaaattttactcattgtaatatcgtactattgcatatgacagggacacaaccatgccacctgcaactcaagaaccaggttgaagaatacctgaactgtttaacaagcaatgtccaatgatcatgcactcggatattcctgaaatgtcaaattgatataaacactgctaagcacttatccttttaatttctgtacttatttccttgtggactaaacacaaacagttcgcagactgtcactggtccaagaactacactttgagtagcattactctagggagcacttgcattgaagggaccggcagaaagagaactaatgaaggaatttgtgaagtaacaagggaggagaacaaggagaccatagatttgtggaagactagggaatttttaagaggaagtggttaactatattgactgcaagaaaggtcaagtaggttgaggaccaaaagaagccatgggattgacaactatcatcagtgacatttgaaagagtgatttcagaagggggctcttggtggtagtgaaagaaagccaggggccagcaggctgagaaattggggaagcagagagaaccaatggggactacccttctaagaagctagatggttaagaaatggaaatagtgtggtagcttgggggtataaaaactttgaaggaaggctttttagaacgatgaagactttttagacccttccccaaattttaatatcactgaaggagtctcaaactgaagagagttccctctctagatagaaaatctaagaaatacatatattttttgtaggagtcttacagcaatcttcttaaaattaccaagcaggttggaagagatccatgaatttcaagaagttcagggggaatttttttaagactctgctgaaatatatatatatatatatatatatatatatatatatattttttgagatggggtcttgctcttgtcgcctaggctggagtgcagtggcatgatctcagctcactgcaacctctgcctcctgggttcaagtgattctcctgcctcagcctccagagtagctgggattacaggcacctgccaccacactcagctaatttcgtatttttggtagagatgtggtttcaccatgtttgccagcctggtctcaaactcctgacctcaggtgatccacccgccttggcctcccaaactgctgggattacaggcgtgagccaccgtacctggtctagactctgccgaaattctaatacttctttggtaatgcaacagaaaactaaagattttgatggtgaactcaattgcttctgagttgtgtggatgaaaatatattttattattttttccttcaacttttaagctcccaggtatatgtgtaggatgtgcaggtttgttacacaggtaaatgtgtgctatggtggtgtgctgcacagatcaacccatcaccatggtattaagcccagcatccattagctctcctgatgctctccctctccccacccttccccgctacaggccccagtgtgtgttgttccccttcctgggtctattttatggtatgtatgtgtgtatgtgtgtgtgtgtgtgtgtgtgtgtgtgtgtgtgtgtatctatttatgtgtatatattatgatatatacaccacacttttttcaaactattattttaggtttagggatacatgtgcaagtttgttatataggtaaactgtgtgtctctggggtttggtgtgtacagattttttcaccacccaggtaacaagtgtagtacctgataggtagttttttgatcttctgtcctctcaccctacaccctcaagtaatcccccagtgtgtgttgttcccctcttcatgtccatgtgttctcattgtttagctcccacttataagtgagaacatgcagtgtttggttttctgttcctgcgttagtttgctgaggataaaggcttctggctccatccatgttcctgcaaaggacatgatctcattcctttttatggctgcaggaaaatatattttacatactagtgaacatagttaaattaatccatggtcaagacatatattcttttgtaaattgagaaatctctttatcataattgtaatatggtaataaataaatctagattacataaatgtaatctagatgttgataaactggttttaaataaagcaagtgatatctacgtatgaagagagtttacttcagttcctagaactttccttcactttcctgccatccctacttttagtaagcaagcatttactgtgtgtgtaacactgtgctaggtactaaggcaatgatgatacccaagatttggtctctatcctgaagataagcacaggagaaacattatcagtcatgatgctttctgttgcaaacaagtgaaaacctcagctcagcttaggtcagctccagggctggccaaatcagaggctcatttataacactgaggatccagattcttttgaaattcctcctgcaccaatatcagcatttctaccttctctgtaggttggcttgcctcacgttacaatggctgcagcaatcagaagtgtcacatcctcagtaatacttaatattattactattatttaataatatttagaactgtgccatccctgtttcaatttatcaggctcccagcagactactccttatctttcaaatgtcaaaactgcatcctgagctcttgcctaaactaatctggggtgaggtgaatggaagtagcactttaattgtattcattctttgtagctggacctgggcctgggccctatctcctgacatttgcccacaagaaagatttctgaagttaggtaggactggctgttgagtaggccagtgcttgccaaacctttacacatcctcacatatgtcataatatgcagataaaaagataatcccttatacaacttgctgggataaactcaggaggcttacagccatgacctgcttgaaggttcttcctgccttagaccttgctcagctgctccaggatgaggggatttacatcacagcacaactgtattttattcacagcataaaccatctctttccttctcagttgacgagttcagatgggcaataacagtgtctgccaaagagaaaaaaaaatgtattcaaactagataatctattggtacaaataccgagacacagaagtgataacagctttaagccaatgtttgatggtggtagtcccagcaagctcttttctgatgtctttgtgcctttgcacatgctccttctctgtcactgttttcttcatcaaacataatataatggacaagtggaatcaaatagaattgagttcaaattctctgctacccatcggccctggtattggacaaattaactcctctgagcctgtttcctcatctgcaacgtagactagctaatactacccattggaaagcgttgtttcttagctaatgcatgcaaggcttaaaacctagatgacgggttgataggtgcagcaaacctccatggcatacgtatgcctatgtaacaaacctacacgttctgcacttgtatcccggaacttaaagtaaaaaaaaaaaaaaaaaaagaaaagaaagaaagaaaaagaaaaaaaaggctgtttctggggattaaataagacaattatgtaaggtggccagcacagttcctggtacatagtaaatgtcaggcctgcctgacagacttctattcagcagctactgctcccctgaaaatcttcctcagacgtttccacggtgcttcccgttcttacaccactacaatcctttattacactactatccgttcattccccacagctccctcccttcctttccctaaccagtgatcccaaaaggccagcaagtgtctaacattttctatcttctaagtgactggtaaagttccgcacctatcagcgctccaagtttgtttttgttttggccgactttgcaaaacggattgggcgggatgagaggtggggggcgccgcccaaggagggagagtggcgctcccgccgagggtgcactagccagatattccctgcggggcccgagagtcttccctatcagaccccgggatagggatgaggcccacagtcacccaccagactctttgtatagccccgttaagtgcaccccggcctggagggggtggttctgggtagaagcacgtccgggccgcgccggatgcctcctggaaggcgcctggacccacgccaggtttcccagtttaattcctcatgacttagcgtcccagcccgcgcaccgaccagcgccccagttccccacagacgccggcgggcccgggagcctcgcggacgtgacgccgcgggcggaagtgacgttttcccgcggttggacgcggcgctcagttgccgggcgggggagggcgcgtccggtttttctcaggggacgttgaaattatttttgtaacgggagtcgggagaggacggggcgtgccccgacgtgcgcgcgcgtcgtcctccccggcgctcctccacagctcgctggctcccgccgcggaaaggcgtcatgccgcccaaaaccccccgaaaaacggccgccaccgccgccgctgccgccgcggaacccccggcaccgccgccgccgccccctcctgaggaggacccagagcaggacagcggcccggaggacctgcctctcgtcaggtgagcgagcagagccgccgtcgcctcacgcgggaagggcgccccgggtgtgcgtagggcgggcgccaaggcggctcggcggggatccgtcctcgccaggggccgggtcccggcgggaggaggcgccctccctgccccccgccacggcggagcgtctgcagaatggtgacaggattctgggttcttgggcgaggggtctcggcttcaacttgacaggtgtcgggcgggtggggctagggtcctgagcgaagtgacaggtgcagttccctcttgtgaggctcggaggcagagggtcgttgcgagcgtccatcagacgcaaaaaatgaaaaataaaaatacaaaaatggtgtctgtgggagagtttttcaccggagaattggagtactccggtggtcgtctgactttctgttttggttcacgcgatgcaacagttgggaagtattttcttccgggcgtgcactgcatctgaagtccatttgtgggagaggccgaccagaaagccttggacaagaagcgcagggtcctgagtgtccattgcccacaggatactcggctcaggagctttgcggcgtttccttagaacaataatgcatcgaggccttggggactcaaagccatctgtagtgattgatggagcgtaactctttagaggaactgaaacatgggcaaaactttcatgagacatttaccagaagtgcttgaaagtttctaaacttttttttttcctgtttgatgaactcttcttgcgtgttagtcggcttcggcttgtctcattatttcttccattttgccttttgactttgaaccagcaaggatcttggtgtcccctctttttgcctttgtttttggcacaaaattagtggttctgtgcgcaaatggaaattttcgttttcccttattaagtggaatctaaatttaagcaagtccatacgaatgcactagatcttgaagggaagtatttattgtattacaacatcttacttttcttgatttttctactttatggttaaatagctatgattgaaagagtgtaattgtcattattgtcagcactggttctactttgagacaagttcattgcagagggaatgggacttgtttctgtttttcactattttctctcccattcttgtctatcaccaaatcctttcaccctcacccatttctttccactcggtatacactaacaattcacggcagaaaagattgaagtgggatttaggaaatggcccctggaaggctattaaaaatttatatatttaaatggactgtcttataggtcagttaaaaaccatattcgttaaaaaaccaaaataacaacaacaaaaaattaaaaaccacgtctggggcatgttctgggaaaagacatggctttagtttctgattaaattctgatgtatccaattcttgcaaatttcccttgggaaaatgcagtaatggctactctaaagaattccatgttatgcacacagctttggaagcatactctaatgtagggtaaccaggaatattgacgttgtggccactgcttggaaaaaagaggactgtttctttcattttttaactcattttatatattttaagtaatggaactataaaaaattctcttataagtcaaaaccatacaagatacagtctgttcttgattatccatacccacaaagggtttcattaacatagacagttgaactctataaattaaccagcaagggtagaaccgctgccgtgcagtctgatactgagcatcttgcctggagatggaatcaaggctcagtccaactgcacctccagtgacagattccattcctgatttgagagtttagatcttatttctgttgccttatctctggcctaagtaatgtagctggaagggaaactgtcactaggaacagcataccacattcattgttgaaataatcaaaggttaatcatgtttcgagctgggtgtgatggcgcgtacctgtagtccatgctactcaggaggctgaggcaggaggatcacatgagcttgggagttggaggccagcctgggcaacaaagcaagaccccagtctttaaaaaaacaaaaaagctgaccaggcatgttggctcacgcctgtaatgccagcactttgggaggccaagatgggaagattgcttgaggccaggagtttgagaggagcctgggcaacaaaacaagaccctgtctctaaaacaaattttaaaaaattagccagtggctgtggcacacctgtaggctcatctactcaggaggctgaggtgggaggatcccttgagcccaggagtttgagactgcagtgagccatgatttcaccactgcaccccagcctggatgacagagtgaaaccctatttcaaaacaagaaaaaaaaacaaaaactaattatgttttgaaggaggaattggcagtctagaatagtggtcaagggcatggattatagagttagactgttgggctcacatagtggtttacctcttaccggctgagacctcaggtaagttctttaacttctccaatttgacagacatctgtaaatgtctacttttacagatgagaatacttatctaaaagggctgatgtcgggattcagtgaaaccatatgtttaaggtactttctacaggatcatagtaaatactcaaaaattattaattattcttcatactattcttattagtagataacacatagaaattagatgaatgaaaatgaattagccaacaagaatttattaaatgcttgtctttgttaaggggaaaggacaaaaataagcagtcgcatcatgtaagatgtgctagtaggtagagagatatatgaaacattgataagagaagactacagtttaacaaagtcactggcgttgaattgtataatattatctatgggtttttatctttttgttgttatctttatcctattttcccaaacagctttagctattacatttactttccttcacagaagtgttttgctgctttgaagtatatttgacttaccatgcaagcaaatatttttcactgtgtggtatccttattttggaatgaccatgaaaaagataatcatatgtttaaatttgaagtgtaatgtttttctaagataaaataagatcttaaagtatttaataatgttctttttcacagtagtgttatgtgcaaactattgaaacaagtatgtactgaatcaatttgatttataagtatatgccaattatatgattattttcatttggtaggcttgagtttgaagaaacagaagaacctgattttactgcattatgtcagaaattaaagataccagatcatgtcagagagagagcttggttaacttgggagaaagtttcatctgtggatggagtattggtaaggattttcttaaaacgttttgaaatttttttttctcattttaaaaacaacttcaaatcactatacaaaaattgaaagatagaaaaatataaagacaataaaagctaataataattccattacccagaggaaatttacctctgctaacattaaaaatgtttgaggccgggcacggtggttcatgcctgtaatcctaccactttgggaggctgaggcaggtggattgcctgagctcaggagttcgagaccagcctgggcaacatggtgaaaccctgtctctactaaaatacaaaaaaaaaaaaaaaaattagcagggtgtggcgtgcgcctgtagtcccagctatttgggaagctgaggcaggagaattgcttgaacccaggaggtggaggttacagtgagccgagatcgtgccactgcactccagcctggcaacagagcgagagtctgtctcaaaaaaaaaaaaagtttgaaaaaaattcctccataaatgcctcccaccaaactattttaaagcaggtcttagttatattttattcactatgatacaaggacttttaaaaaaacaccgccataccttataaaataatttttataccttctaatatgcaatcagtgttcagatttcctgactgactcagaattagttttgttagaattcaggatcttgaaaatatattgatatattcctttcattttttctttgcgtaagtatagatgtatatgtttaataaaaggagcaaataattactagagttttatatgtactggggcaatagtataagaattttacatagccgggcatggtggtgtgtgcctatagtcccagctacttgggaggctgaggtgggacgatcacttgaacctgggaggtggaggttacagtaagccaagatcgcaccactgcactccagcctgggcaacacaggaagaccctgttgcaaaaaaaaataaataaaaataaggctgggcgtggtggctcaaacctgtaatcccagcactttgggaggcccaggcaggtgatcacttgaggtcaggagttctagaccagcctggccaacatggtgaaaccccatctctactaaaaatacaaaaattagccaggcatggtagcagatgcctgtaatctcagctacttgggagggtgaggcaggagaattgcttgaacctgggaggcagagtttgcagtgagccgtgatcatgccactgcactccagactaggcaacagagaagactccatctcaaaaaaaaaacaaaaaaaaccccagaactttacaaatctacgaataactcatttaaaaatcattgagatatgaaatataaaatctttttttatgtgtaaaatgtgaaatgttcatttaacagatgaagacactgagtagagtgaggttgagtaacttgaccaaggtccctaggaaataagatctcaaatataaatttgagattatacatgtagttatgtatagttacctgtagttacacatagttttgtattttcctgtttttttctcatatgagcattttcttattaaagtttttttgtaatatagtttctagtgatagtataatattttagctagtggatgtattttaatttgttaactcttactggatatttgggttttttccaactttttgatgctataaaataatgtaataaacatttgtattcgtaagaataatgcctggcacaaagtgagtccttgataacttgttaaataaattaatgaatgaatctctgattattttattagaataaattcttataagttgaattactaaatcaaaagctatgaacatttttatgactcttgatgattattgctagattacacttcagacagatacttttaatgaatttactttctcaacatagtagtataagagtatatatctgtttttactgatctgattaacacagcggaatgtgtttatgtatgtcccataagaaaattgtttaaaaccattaaataaaatctctggcagtaaaaaggagaaaacaagtgtcatgatttccaaagaattgaacatagtctcacatttcttatgtaaaaagagaggaatactgaagtatcttgaatgtatgacttgggtattataatccccaggcatctaatgtatattttaactgacttgggtacctcatgtacaaagctgtttttgtgcatatacaattaaatgggatcagagctccttcacttttctcttcctaaaatactagatttttagtgttcagaaattttggaagggatagctgattataaagagcattagtgaatatacatactgtagttttcaatttataagtgcattgtgttccaaatctgtttgcaagtttgatatagtagttaggtttccagcctggttcacataacttatttttttttgtactaaactataacaataatagttttaacagtagaggctcttttgagcttcagaattgaatacatatataagcaaatgttactgctttattaccctttttcatcctggctttgtctctaccttccctgggaactggcccagtttgaatcttatttcctaatggagctcataatggggactaggatgtgtgaaattatttatggctaggtactggaggaaggtaagaaaggaatttcatgttatttttgggatttgaggtgtgcttttgaagggtatgatggaagatgatgtcctgttgtcctgttgtaaatcaacagacttttccttgaaatatgattttaagttagagttacgtttttgaggtttggcctgagaatttaaccttcatttatataataatatctaagggagaatgtgatacagtgtgttctaagaagcaaatgtaatgacagaataaatgtgtttccagtgcagctattctagtggcagttgtctctcttctttgaaacaagaggaggaatattgtcaaaaaggaaaccctttttaacaatagaaagtaggtgatgtttattgggatagaggatgggttaagagcaaggattaagagtcaaacagatataccatgtccgaactccattatcttgaacatgttatctacaattttcaagccttagttttcttacctgtaaaagggactgacagtaatttctggatcttggagttatgtgcagattaaataaattaatgcatataaagctcttattagagtcaatgagtatgtatattaggtcttgcaaacagaataattttacttaagaaataccccagaaaattttatcattgatgtatttttttttaggagaacttaggatatcagttaaaatggttacaattttaaatgcattgtagtgattttgatgtagtaatgtttgttaaaattcttatttttaagtactttagcatcagaaaagttgtttatgcatacatgaaagcatatattaatccctttaaaggaaaagtttgtggtattttgtctagaaaagtgttttctttttttaaaataaatatttagtaaagtgtaataataaagattagctttgttcataaggttagattgtatttatgctgattatagcatatgaataggactttccattaagaaattggctaaggtgatgttcatattgtgacttaaggtgaatcagctgttagaattttggtttactttctgcatcttgattggtagtatggtagaatggaaaatgccttggacctcaaggcaggaaactttggttgtaattatattgtagctatatgattttaggcaaattggttaattctgtgagtctcagtttgctcacctgtaaggcagaaataatgcctgaatgtgaacctcataggctttttgttatacatacatatatatgtatatgaaatgtatgatatacatatctcaaagagctttgggatatattgctcttgatagaaccacttacttatttttgtgatatggtggttatattttaaataaatacagtcatgtgttgcttaacaatgggaacacatctgagaaatgcatcattaggtgatttcatcgttgtgtgaacatcatagcatgtacttacacaaacctggatggtatagcctatgacacacctatgctgtgtggtatatagcatgttgctcctagtctgcaaatgtgtacagcatgttactgtactgaacattgtaggcaattgtaacacaatggtaagtatttgtatatctatacatagaaaaggtacagtagatcatccatatccttactgattttctttctatgtgttttactaattattgagggagaaatatgaagcctccaactataattagaatggtccttttaaattctgttttttattaatgtattttttattttattttattttgagatggagtcttgctctgtcacccaggctggagtgcgtggcacgatctcggctcactgcaacctctgcctcccgggtccaagcgattctcctgtctcagcctcccgagtagctgggattataggcatgcgccaccacacccggctaatttttgtatttttagtagagacggggtttcaccgtgttagtcaggctggtctcgaactcctgacctcatgatctgccctcggcctcccaaagtgctggcattacaggcgtgagccactgtgcctggcctttattagtgtattttaaagctttatccttgggtacatacaagtttagaatttttatgccttttaggtaaattggtacctttatcattatgtaatgtgcttttttatccaaatttatatcttttgttctgcagtgtccacatatcgattccacttttcttgtgatcactctttacaatgtgtatcgtttaccttcattttgattttaacctatttcttttttatatttaaatggatttttgttgttttgtaatcagcattcattaaaaatttttagctgaatactttttacttttgttagggttccctgtgtctcttcctttcatgttgtgccacagatgagccattatttatatcttttctctcattggaggttcctttttttaggggaaattaaataatctgaaatataaggaaaggatatgttgatttcaagaaaggttgtttttgttccttatctggcttgttcttgttgtgagggtgggagcaatactctttgcagctttctgcattctaggaagaagtggaattttacactaccatttgctttctttacaggtttaccttggtattcagtgtctgtccataggactaattaaaactataccagactccttctattttaaacctatccgttcagtctcaagttatctttttgcattgcctctcacgtctgtcccttcatttcttttaccagcagtgcttggtttttactgtttgctttggttttaatttcctttttatttttttaatttcagaaggtggaagcttatgtcattgacttgagcattttttatgcatgttttagtgcctctttctgactagtctcttcttttctccatccaatccatcctgtgcctgatttttagaaaagactggtgtacagtttgccccttttgctttaaaatttatttttcattgttacaacccactctcagtagcctccattgtaacaccctcccatgctcccaccaccattatgaagaagtaaagtccaaactttctcagtatttgtagttcttcatggtctgtgctttaaccttccttccagtcttattttttatttccattgttggcccccaatgcctgtgttctcttcccttccatatgaatcttccatatgaatatcttccatatgaatatgatagtattcatattcatgcgatctcccctttttttggaatacccttcttttttcttttagcctaaattctgtttttaagatgcagttaaagcttctcctttatgcatatctcttataagatatattatttgcagacttttccccccattctgtgagttgccttttcactttcttgatgatgtcatttgcagcgtaggattttaattttgatgaagtccagttttctattttttttttggtggtggttttttttttggttgcttgggcttttgatgttgtatctaagaaggccttgactaacccaaggtcatgaagacttattctgtgctttcttctaaaagtcatatggtttttagttcttgtcagtcttgggtttttttttgttttttttttttgagttaatttttgtgtatgatgtgaggaagaggtctaactccagtcttttgaatgtggatatccagttgtctctgcaccacttatggaaaagactattctttcttcattgaattgttttggtgcccttgatgaaaatcagttgactataaaaaccagggtttatttctggagtctcagttctattccattgctctgtatgtttattctttttttttttttttttttttgagacggagtctcgctctgtcgcccaggctggagtgcggtggcacaatctcggcttcctgcaagctccgcctcccgggttcatgccattctcctgcctcagcctcccaaagagctgggactacaggtgcctgccaccacgcccggctaatttttctgtatttttagtagagacggggtttcactgtgttagccaggatggtctcgatctcctgacctcgtgatcgcccacctcggcctcccaaagtgctgggattacaggcgtgagccaccgcgcctggccgtatgtttattcttatgatagtaccatactgttttgtagtatgttttatagctttgtagtatgttttgaaatagggaagtgtgagttcgacaactttggttttctttttcaagattacttttgttactcttggtacttgaatttccatgtgaatttttaggatcaatttgtcaatttctgttttaaaaaaaggcagctgggattttgatagggattatgttggatctagatcaatttgcggaatattgcattcttaacaacatgaagtcttcagatgcatgcatatggaatgtcttttcgtttaagtctttctttcaccagtgttttcagttttcagagtataaatcttactaaatatttattcttggtgatattattataaatggaattgttttctttcctttttggcttattcattgtaggtggatagaaataaaatctattttttttggataagagcagctaaaatcagttgggcacggaggctcacgcctgtaatcttagcactttgggaggccgaggtgggtggatcacttgaggtcaggaatttgagaccagcctggccaacatggtgaaaccctgtctctactaaaaatacaaaaaattagctgggtgtggtggcatgcgcctgtagtcccagctactctggaggctgaggcaggagaatcgcttgaacccgggaggcggaggttgcagtgagccgaagtcgtgccactgcactccagcctgggcaaaaaaaaaaagaaaaagcagctaaaatctatgtatttaacaaaaatctctaatacagtaccattttatttattatagtcctcatgttgtatattagatctctggacttgttcatcctatgtatttgctacttcgtatcctttgaactacatcttttcaaaggatgaaattgggtaatgtgatgcctctagctttggtctttttgtgtagggttgccttgactattcgggctctttttcagttccatatgaattttaaaatagattttttttttctttttcctaactctgtgaataatgtcattggtagtctgatagaaacagcattgaacctgtaaattgctttgggcagtgtggccattttaatgatattgattcttcttatccatgagcatggaatgtttttccatttgttcgtgtcatctctgatttatttgagctgtgttttgtaattcttgtagagagctttcacctccctagttagctgtattcctagatattttattctttattgtggctattgtgagtgggttgcattcttgatttggctctcagcttgggtattggtacacaggaatgctagtgatttttgtacattgattttatatcctgaaactttgcttatcagctgaaggaacttttgatcagagactatgggattttctaggtgtaaaatcatcatctgcaaacaggaatagtttgacttccttttttcttattccgatgctctttatttccttctcttgtctgattgctgtggctaggacttccaataccatgttgaataggagtggtgagagagagcatccttattttgttctgcctttcaaggggaatgctttcaacttttgcctcttaagtatgatgttggctgtggatttgtcatagatggctcttattattttgaagtatgttccttcaatgcctagtttgttgagctatataccacactttctttatccactaatcggctgatgggcacttcagttgattccatacttttgcagttgtgaattgtgctgcaataaacaagtgcaggtttctttttgatattatgacttcttttattttgggtagatacccagtagtgggattgctggatcgaatggttgatctgcttctagttctttgagaaatcctcacactgttttccatagaggttgtgctaatttacatttccaccaacagtgtataagcattcccttttcactgcatcctcgccaacatctattgtttttttactttattttccatataaaaaggggtttatttagatgttagaatcatctagtgattcagaaagattggacatgaatccacccaggcccagggctgagctgcagagcagccgctgacatccgcggggatttcacatgcaacagggagctctcacgtgcttgctggccattgtgctttaaatcgttttttccagcggacagctgtgactgcagttttcaaatgtgctctggcctccaaggaccaggggggcggtggggggcgggggtgtcctctgtataaaaagtgctgtcctgcgagcttcccgacggacactttggggcatctgagcgattcccggggagggcagctctgccttcctcaggctaccactgcagccaccgacggacattctcaccagcaatcaaccaaaaaacatcagagtctctgtgaacttggctgcgatgataagaaccaaatgttttctaatctaagacttgtatgcagaacacaggaaattgcaattaggaacaccctacaaaattgaacaacagtattttctaaaaatattttttacatcactttaaataatttacagaaagctacagaaatcatatttaccaggacacatctgttaaataaaagcattgtttcatgttggtgtacgtctatacagggctatgtataaccgactcctgtttctcctccctgcaaccacagaaccatcacacacacacacacacacacacacacacacacacacacacacacacacacacacacacacacacggatacacgcacagatacgctcctttccacaaatgcacgcaaaccgggacgcaaacccacaactcgagggcttagaccttcactgctgagctgccgccactgtcctccgtgcgcggagtgtcgctgaagtcactggcgtcactaaccaaggcgtgcccgcccaaggtgccctggtcctggtcgtccctatcgatgacccttcgtcaatacctcaggtctaaaatgctttcctccgagcccgagttcctcctgtcgggcaaactccgccctgtctgtgccttgctgcttggccagggcccgccgtccttcttcgccagcaagtgtgggcttccaaagacagggctgggcccggcctgggcctccctgaaggcagagaaggacgggccctgtggaggcagccccatgtcgggctgaagaggctggcctgcctgcccccctgggagacaccctttccaaaatggaagagctgggtggacagcgcggggagaagcccacaaggggtaggctgggcaggccccaggcggggccctcggaccccttgtctttcccgctcccgacgccccgcctccactccgcatctctactttccgagcgcagcgcgcacgggttccggtgggtgaagtcgctcgagggcagggtgtggtcagcctgggctccagagtccctttcagcttcctggctaggggtcaggaagccccggctcccgcagcccatgtgaaagctccccccagcacctccggcctcggtgcccgctgtggcactgctgggcagctgaataaaagcacttctggcagcatgctcggcccctcgtgagcgctggtctttctgaatgtaaacatttctcctgctcgctgagagccccttggcggagacactgccactggtgctcctgggcggtgccggatccccttgggcgggagcagcggggagccccttcctgccctggctgaacaggtcggctgtgccctgtgctccagcgctctctgcacctcatggcccttctgccggctgtgggacccccctggcccactgactccgcgtgcacacgccaggcggtggggcccgctccttcctgcacagcaactctggcctgaatgagccccatttcccgagagcagcagggccctctgcctgaacttctgaactgctcagactccttggccttttccgccaaaaacttactaatctacagttcgatgctctcgtcactgtccactgaactcctgtcgtcagacagggagccggggctgggagctgggccctggcattccctggggaaatggattcccttcagaggcggaggcagaggcgcatcccctcactcggaaggccggggccgtgtcctggctcctgacgccctcctgcttcgtcttctctgccatactgccacagacactgggaggtttgttccctggaccctcgccgctgtctctcttggacttggagagtcagctattaagcaccggcgggcttctgtctttccagtctctcgggagcccgcccagctgctccaggaagtgcatctgggcagtgctgaacctgaccttcctgcacgcagccctgggttccctgcacctcttcttgagctttcgcttggaccttaagtccttgatggccgtgtccaggtcctcgtcactgtccagggagctgctcttgtcttcggagctctccttctcgtccaggtgcctcacctcgtctgtcttaccctggccctgcgtcatgcgagtgtcgccgggccccttggctgcgccctcccctcccgggacctcgctggctttgccctggacgggcaggtcccgcccctcatggccgggcacggctcacgcctggctgtggtcggcatcctggccaccatctttcaccacctcccgcgttttcttgggcgtggacggcctcatggcatggccgccgcctctacgtttccttttgcagctcagcagcgggtccggtgttttagagaggggggccttggggccactggtctggctgttggggccaggcggtgaaagtgggccctgggcagcctgcgagcagctctcacctctggccagcaaactccccgactatgccttgagggtcaaaacgtctggatttcctgatcgatgctgtcgtcgctgtccacggagctactgtcgccgtcagagcgggaaggcacgttcagggagtagaagcgtgggcttgcagaaagggacctgttgctgccttacatgggggccggcagggtagtcttggaaatgcccaagattgcttccgcgcgcgtcagttcagcggacgtgtctgcctggcacgaggaccgttctacaaactcgttcctggaagccgggctcgctggaggcggagctttggtttccttcgggagcttgtggggaatggtcagcgtctaggcaccccgggcaagggtctgtggccttggtggccactggcttcctctagctgggtgttttcctgtgggtctcgcgcaaggcacttttttgtggcgctgcttgtgctgtgtgcggggtcaggcgtcctctctcctcccggcgctgggccctctggggcaggtccccgttggcctccttgcgtgtttgccgcagctagtacacctggatggcctcctcagtgccgtcgttgctgctggagtctgacgcctcgggcgcctgcgccgcacttgtgacttgctttccccttctcagggcgccagcgctcctcttgaccccgcttttattctgtggtgcttctgaagggctgcagggggctgctggcttcgggctgcccttgttctcctgcttggtcgtgaccctggacttgaggcttctgggctgcacgttcgtctttgctaaccggggaggtttgcgaaaggcgaactctttatgggcgcccttcagaccctgccgatgcgccacctttgcggctagctcttcgtgggatttcaagagtgacttggtcgaattttcgtttgggtctggttttttatctattgaccccatcacatttttgggtcgcatgctatctcttctcattcagaagctgttctatttccgccttaatgctctgctcgaaggagtcgttgctgctcgctctgaccgggaaggcagaaccctagtcctcactggatctcacctggctgccagggccaccacctgagccaggtacaagttttggggggacacacggaagtcggggcactgccgtgagatagttctggcttacatctactgccactgcctgcagccctggaaggctgggctgcgcctggctggcccctgccagccccgggctgtgcggctccactctttgcctttaggtactcccggatggcttccgcaatgtcccggtccacggaatcatcattgaatctagcaccaacgggccaaagtctgcagtttcctcctccctcatggggtcaaagtcagcaacaagaccacaggcaggcaatgcgggctgctccttgtgcacggtgggcttggcagctggcttggcgtctgccctgtggcccctctgtgcagcgcgctcatcggtggtgccccgagcaaccccgctgcgctgcagcgtgctgatgagcatctgcacccgggcgctcaccgacacgctctccaccccctcgtcagcctccgagaagcacccggggaacctaaagctccctggtgggccaaaggcctcccatttggactggggagcaacccctggagtagcgttcctgagaaacattctagcagaaggggagggacgcgcagagggacgacgctttatttctctgccagcttcatatactcaaaaggttggcagcggggtgcagtggctcaagcccgtaatcacagcactttgagaggccgaggcgggcggatcgcgaggtcaggagtttgagacccgcctggccaacatactgaaaccccgtctctactaataatacaaaaattagccgggcgtggtggtgtgagcctgtagtcccagctactcgtgaggcagaggccagggaatcgcttgaagccggaaggtggaggttgcagtgagctgagatcgccccactgctctccagcctgggtgacagagcgagactccgtctcaaaaaagaaaaaaaaaaaaaagagtggcaagtggtgcccatgagataaagtctgcaaatgcttctttgcagtttaaaaaggacgacgactataaacccaggatcaggacgacgttacgcatagatttattcttgacctgaccaacgagctcttgaaattctctttgcaactaggtcgactgtgaaactgcagccagtgtccccaaacgccccaaggataaggcctttatcactccgacgcatcctctctctgctttttaaatagacttttgactcggccaggccccctgccacccaccgcgctgaccctgcctgcgcttgcgtcccgcgtcccgcatccggggggaggcggcgggcccgggtctctggggctggcccatttacttagttttgtttttgttgcatttgcttttggtgacactccctttttgatattccacatataaatgaggcaataattttctttctatgtctgcttatttcacttagcataatggtctccctgtccacctcggctcccgcgcggggaggaggggcaagggccctccgcccgggccccgcctccccgcgcgccgctgccaccgccccgcacctttttttgactttttaataatgctcattctgactgtgataaggtggtatctcattatggttttaattggtatttcccttgtgattggtgatgttgagtatttttcatgtttcttggccatttgtgtatcttcttttgaaaaatgtccgtttggctgggcgcggtggctcacgtctgtaatcctagcactttcggaagccaaggcgggtggatcacctgaggtcaggagttcgagaccagcctggctaacatggtgaaactccgtgtctactaaaaatacaaaaattagctgggcgtggtggcatgcgcctgtaatcccagctactctcgagactgaggcaggagaatgacatgaacccaggaggcggaggttgcagtgagccaaggttgcgccattgcactccagcctggacgacaggagtgaaactgcattgcaaaaacagcaacaaaaaaaatccattcatctagtttgtccactttttaacaggattatttgttttcttcttgctgattttcttgagtttcttgtagattctggatcctttgttggatgtatagtttgtaaatattttctcccattctgagggttgtctcttttctctgttgattatttattttgctatgcagaaactttttagtttaagtcccatttacttagttttgtttttgttgcatttgtttttggtgacaccccctattttttagattccacatataaatgagatcatgcaataattttctttctgtgtctgcttatttcacttagcataatggcctccatgtccacctgtgttgtggcaagtgacaggatcacctttctttttatggctgaataatattccattgtttatatatactacattttgtttatccacttctctgttgacagacacataggttgtttccatattacttagctgtatatagaaatacaggtggtttttgtatgttgattttgtactctgaaaacttggtgaactaatttattagcttcaatagtttcttagtgaattccttaggattttctagatgtaaaataatgtcatttgcaaatagagatagttttacttcttcctttaaaatctggataccttttatttctttttcttgcctaattgctttgtctaaaatctccaatagaatgttgaatagaatgatgagaaggacattgttgtctcttcctggatcttagtgggagaccatccagtttttcaccattaagtagatgttagctgtggggtttttgtagatgcctttcatcagttgaagaattttttatttctagggtgttgagtgttttgttatgaaagggtgttggattttgtcaaatgatttttctgcttctattgatataataatgtagttcttgttctttattgaaatggtgtagtatattagttgattttcaggtgttaaaccaacattgcatctctggaataagtcccacttggtcacaatgtataatccttttgatatgttgctagatttggtttgctaatttttttttttgaggatttctatacgtgtatttataagagattttggtctttagtttttttccttgtgctgtctttgtctgattttagtatcaagataatactggcctttcacagaatggactgggaagtgttccctcctcttctgttttgatggggcagtttgtgaagaatagatattaattcttctttaaatatttggtagaattcatcagtgatgccatctgggcctggacttttctctgtggaaagtttcaaaattactaattcagtcattttacttgttataggtttattcagtttgtcagtttctttctgaatcagtttttatactttatatttttctaggaatttgtctacctcatctaagttacctagttcattggcaaataattgttcatggcattgccattataatcctttttatttctgtaaggttagtagtaatttttttttatttcattcccgattttggttaatttgagccttctctcttttatcttggtcagtctaactagaagtttctcaatgttggtgatttaaagtttttttttctggtttcattgatttttctttatttctctattctctaaaaaattttgatcaaacgatttttccctgttttttcactacccaatgtttatacttaatgtgtgtattggataactctattaaagttcatcatcatgtactttcatcatgtaatagtcagatatatcttatatataattgtactgcctacttttagaattgcttgttctttaaggctttgacttcataaaagttttcactcttggccaatattatttactacagcgtgttttcttcttcatgaggaaccatggaagaaatctttggtccaagacccattaagctttcctggagaagctaactaattaatttaatttaaccttatagatactatgaatcttataattgtttgttactgttttaactgccagctttcatgatagcatgcattttgggggatactaacatttttcttgtcatttttttcacctttctatattttactttcacaattataagtaaataaagacttgttttaacataaatcacactttatagtaataaagagcggatctctgttgctctccttttttactttaaaattttttatttttaattattatggagacataataggtgtacatatttatgggatacatgtgatgttttgatacaagcatataatgtgtaatgaccaaatcatggtagttggagtatccatcatcttaagcttttatcatttatttgtgttaggagcattccaattctaatcttttagttattttgaaatatacaataaattattgttaactatagtcactgtattgtgactatatagtgtttccatagaacactagatcttgttccttctatctaactgtctttttgtacccattaaccaactcctcttttatcctcccatccccactacccttcacagcttctggtaatcatcattctactctgtctccatgagttcaatatttttttttttttttaagctcttgcttgtaagtgagaacatgtacttgtccttctgtgcctggcttatttcacttaacatgatgttctctggttccaaatgacaggatttcattctgttttatggctgaataacattccattgtttatatgtaccacattttctttatccatgcatccattaatgggcattcaggttaattccatgtcttggctgttgggaaaaatgcagcattcaacatgggaatgcagatatctctttgatatactgtttttatttcttttggatatatacccagtggtgggattgctgtatcatatggtagttttatttttatttttttgaggaacctctaaactattcttttatagtggctctactaatttacattgccacaagcagttgtgcttttgttttttttttgtttgtttgtttttgtttttgtttttttttactgttttaacataattatttggagcttcattcatgatggcatatgcatcaacaatttatttattctcattactgagtagtatctcactgcatgggatttgtttttttttttaagttcaggggtacatgtgcagttttgttacataggtaaacttatgtcatgggggtttgttgtacagattatttcattgcccaggaatgaagtccaatacctactagttgtttgtcctaatccgcttcctctcccaccctccaccctctgataggtcccagtgtgtcttgttcccctgtgtgtgtccatgtgttctcattatctagctcctacttataagtgagaacatgcagcatttggttttctgttcctgcgttagtttgctaaggataatggcctccagctctatccatgtccctgaaaaacattgctctttttctattcctagttatatccatagaaatgaccattgatagtttttgcttactctgtccctccagtttttccttcctccagcatatacacaaggattttaattttacccaattgaagtcttacttatctacaccttttaacaagtcatcatcagtaattttggaataggcattagattcacatggttcaagattcaaacgaaagaaaagtataaacagtaaaaagtctcctcattcctttccctaagccacccacttctcttcagaggcaactaataaaagtttctagttttgcattattctacaccttgcttttttcatttagcaatatatcttgaagagcacatctccctctgtatttagcttaatccttttagtggattttttttttattttttgggtatatcataatttatttatgaatttcattgttgagagacatttagtttgtttttgaatgtgtaatactacaaaccgttgcggtgaattatccttatatatacattttcatgcacaaatgagagtacttttatagtgtagattcctagaagtagaactgctaggtcagaaggtattcacatttaaaaattttaaatttgctcatagaatgaagtctttgctcatagaatagtctttgctcaaatctcactttaccaaagaggcctatcgtgaccactctgcttaatactgtaacctgcccctacttctccctgaacttctctatccattgcactctattccttttctagcatagtatatggtttacctatttatactgctttttggttactgtctttttccctctgctccaagaaacaggaatgtttgttttgttcactaatatatatttctagcagttagaatagtgtttgatgcttagtaggcatttagtaaatatttattgaataaatcgaatacataagcaaacagtatccaaaattatcctccgtaaaaatgcctaatttcttttttttcctctgtatctcaatgaataaaaaaaaatactgtctttctttacccacttattttggatttttttggtcttgttttttgtttgtttgtttgtttttgagtttgacaaatttattggtattttattaaagacattcatctcagttgtttctctctcccagcttgaccttaggttaatatttcatttgggtcaagaaaagaatatcagaagaggtatgttattttaacaaacaggaaaatggacaaaaatggatagtttgcctacattaaagtgagttaaattcaagtatcttgatataattaaatcatataagaactaagagttctatatacatttccattgttttacctggggcttattctaaacttaaatactagttaacaaagagttaggaatatacacaggttgcttctctgagttattaccgactaaaagagctcagcgagcagttaccaccaataaaacggtctgaagctgcctccaaatacaatattgtagtaggagttttcaaggaaatttttatactgtatttttttttgtctgtgactgtgcttttaaagatgtgtttaactgtcacattaaaaaaaaagttcgtatacaatacaaaaatacaaaaagaaaacaccctacaatacacaaattcacaaagtatgtgtggtgagattccaaaaaatgtttgaagatgcattttctttccttctatttcagtatctaaaatgtgctttttgagaggccattggtcaatatgtatacatttaaaataaaccatataattttactagtaagaaagccagtagttaagttcaattcaaattggatttcacaagttagtaatttaaatccttggacaaagttacagaaagtgcatcttcttgttttccatcttcatacaatgttaaattttttttttttggtgtttataccttttaaaaaataaaagcagccaaatacttaagcaatatgtacatttaaatttttggtggtggtttgtattttaaaagaaacagttttcttatgattcgcttcaagttctggtggaaatgcttacaggaactagctaataaacaaaaaacaagagaagcacattcaaaatactgatttactttggtagcaaatggtttttctttgaagattaatgaagatagacaagacccattaaggtgaagtgggctatttcaaatattcaacagtttacatataaaaaagttattttaagagctaagcgtctgtatccactgatagcaatgcaacacctagtttatgatgacttgaaagaaaacaaatgcccatgaagaaaaaagctgtattttaattttatctaaatgtactttcagtcaatagttcagtaacattttcctcccaatacaatactccctctctctataaggctattcctgggagccagacaagtttaggtaataagggagttaagagagtaactgcttgcagttttaaatagacaattaactttttgcttccctcttaatgtgctaatagttgtgtctaaaaaaataggcaattcttaaaaaggtaccatttctgatttctttattatctgtaaactttggaaactaatcacacaaaactaccaaattagcaaatgtcttgaaatctgtatacaaaacataaattacctctaatttcaaactctcatttattggtgtaccactcaatcttttaaaaagatgaaaaagaaaaaaaaagtggctccaaaggtagtcttataccattcttaaaaaaaggaaactgttctttttaactttatacccacccacaccccaatttcaaaacatcatttaattgtcttggtcatagacatttcgaagatgagattttatattccactcccatagcttctggttatcagaaaacccatgctttcctttattgaaggagtttggtccagctgatgttggtgtatcccttgcaatattcttcatcctcatctttgcttctggaggcctttcctctgattcactatcttcatcttcattaaaagctgctgctactgaaagagtttttggagcaagagttggaacagtttctttaggcttacttgatccaagtttgatggatatgggtgatgctttctttgtcgtctgactacctatggcaaatccaaagttggagatctttgcaggctttgttggaggtctgcagcttcttcttcagctgatcgcttctcagcgctgcggctggaactttcctctccattactccagcagctccagctcattgcgacttttccggcttctcctctcccgccttcccatcagccatttcccccgccgcattgtttttttaagatttcagaaatctttctaatacaagttgggatataaataattagatatagaaaatagctacaaggtatttcttttaactttctccacccccagctcccagcagtcaagagtcaagccctaagtcttgtcctttctgtcagaaatagatacaagaaggatacagcaaacactgctataacacctctctcataggattcaaatcagtgtggagattattataggctccagatgagttaggatatctttaagtctcaatttaataaaactaattgttttcctgtgctttaaatatctctccattctatataaatataatatagatctaacagatgtagtcttgaaatagatggctataatgtcagtgaagtatttttttccttatttatatacattataactttccttatttatgtacattataattttaaaggcctgatagtcataattattgatgttcagattggtagttatttctgtctcttatgtattcaactataaacatttaatcaagtttatgagacctagatatttagcagagttttggagtaaattattttattaaacaaagaatataaaataaacatttctacttatgttcctgttttaatttacctcatttatatgcatcttgatattgcattttcatattctaaaaactatttttaaagacaggttgattcagaattacagtgtacttgaaaatcatcaggtacctattattagttttcacccacattgaatctgtgtttcagaaactgtctaccaaactttgtttattaagtaattattttccctagttttattcaagatatacaaagctgccaactagtgcttttcatcagcatcaggtaaattgtgttactatactgcgttgaattttagcaaaggtaaagtatttgctattttagttattgtagctttattgaaagcaaacatataggttttttaaagtattggaaaactcgccagattatcattatatgacttggaaccctagaaactcccagaccacgagacttaatggttaatgatctctttcagttctctttcaacttggaattctcttattccaatgccaactcattgctcttttggaaagacccattctttcctctattgtcttggtacctcctcaggacatattccccaaagtggaaatgtcagtttaagataattttcagcattgtgtagaataagaatggttagacagctgatgtcagcaagatggtggaatagtagcgctgtccttcagaaacaccaattttgacaactaccatagaaagaatgcctttatatttgagcatacatggaacattctccaggatcaatcatatgtcaggccataaaacaagtattaatatatttaagaagattgagataatatcaagcatcttttctcaccataatggcataaaactagcaagcaaaaataacaggaaaactgggaaatactcaaatatgtgaaaattaaacatgttcctgaacaaccaatagtcaaataagaaatcaaaatggaaattaaaaaaaaaaaatgtgatacaaatgaacatggaaacagcacatcaagatttgtggaatgcagcaaaacagttccaataggagatttcatagtgataaacaccaacatgaaggaaacagtaggaccccagataagtaacctaactttacatctctcagaactaggtagaaaaagaacaaataagcccaaagtaatagaaggagggggataagaaagatcacagcagaaataaatgaaagactcaaaaaacaatagaaaagagcaacaaaatgaagagtttttttgaaaagataaacaaaattgataaacttttagctagaataagaaaaaaagaagattcaaataaataaaatcaggaatgaaagaggagacattatgactgatatcacagaaatacaaagaatcctgagaatactttgaacaaattatatactaacaaattggatgacctgaaagagacagattgtttgccacatactacctgctaagactgaatagcagaagaaatagaaaatctgaatgaccaataacaaataagggactgaatcagtaatcaaaaatctaccaatagagaaaagcctcaggacctgatggcttcactggtgaattctaccagacatttgaagaataccaatccttctcaaacgttttcaaaaatttgaataggaggaaacacttccaaactcatttaacaaggctagcattaccttgataccaaagtcaggcaagggtatcacaagaaaagaagattataggtcaatatccctgatgaacatatgtgcaaaaattgtcaacaaaatattagcaacagcacattaaagggatcatacatcatgatgaaattggatttatctctgggattcaaggatggttcaacatatgcaaatctataaatataccacttcaacagaatgaaggacaaattatgtgatcatcttaatagatccagaaaaagtgtttgacaaaacttaacattctttcatgatgaaaactctcaacaagttaggtataaaaggaatgtacctcaacacaacaaaggttatacgtgataagcccacagctagcattatactcagtggggaaacctaaaatcttttcctttaagatcaggatcaagacaaggatcatttgtcacttgcattcaacatagtactggaaatctagccagagatattaggcaagaaaaagaaataaaagacatttgctacagtttgaatgttttccccctctaaaactcatgttgaaacttaattcccaatatggtagtattaaagatggggcctttaagaggtgattgagtcctgaggcctctgcctttatgaatggatcaatctattcatggattaattggttttcctgagagtggcatcagtggctttatcccaagctaacatcttagcatgctcagttctctcaccatgcgataccctgcaccacctcaggactctgaggactcacagctattattcaaaaagtcagaagataacagatgttagagaggatgtggagaaaagggaactattgttcaatgttagtgggaatgtaaattggtatgtcttttatggaaaacagtatggaagctcctcaaaaaattaaaactaaaactaccacatgattcagcaatcctaccttttggtagatatccacaggaaatgaagtcagtatgttgaagagatacatacactcccatgttcattgcagcattattcacagtcgcaaagatatggaaacaacctaagtgtctgtcattagatgtatagataaaatgtggtacagattgttttaaactaatgattggttatatcctgataaacccattgtaagtcaaaaatatcttaagttaaaattgcattaagatcatgacaaacccagttgaaaaatcgcaaattgaaccattgtaagtcaaggactatctgttatatatattggaattttattcagccttaaaaaaggtaggaaatcctgccatttgcaagaacacggatgaacccgaaggacattatgttgtattagtcagacacagaaagacaaatactgcatgatctcatttatatgtaaaatctttaaaaagtcaaatacatacaaacagtaaaaaggtggttagcaggggtggggagcctggggagaatgtggagatgtttgtcaaagggtacaaactttcagttataaaatgaataagggttagatgtggcagctcacgcctataatcccagcacgtttggagaccaagataggaggattgctttaggccagagttagagaccaacttgggcaacatggggagacccccatctctacgaaaaattaaaaaaaattttacaggcggtgacatgtacttgtagtcccagctacttgggactctgaggtaggaggagtgcttgtgcacccaggaggttgaggctgcagtgagctattattgtgccacagcaatccagtctgggtgacagagtgagaccctgtcatgagacctgtctcaaaaacaaaaacaaaaaaagtagtagttctggacacttaatttacagcatggttgattatagttaataataatgttttgtattcttgaaattcactaagagaaatcttaagtatccttacgacatacacacagacaaaatggtgactatgtgaagtgatagatatgttaattagcttaattgtagtgcagtagtgcccccttatcctcagaggatatgttccaagaccctcagtagatgcttgaatccacagatagtacttaaccctatatatactatgttttttcctatcctgtacatatatacctgcattaaagtttaatttgtaaattagccacagtaagagattagtaacaatgactaagaaaatagaacaattatgacaagatgctgtaataaaaagtatgtgaatgtagtctgtttctctcaaaataggtactccgctcacctgttttcaaaccatggttgaccatgggaaactgaaactgtggaaagtgaaaccgtggatatggaatgactgatgtaatcacttcttattgtatagatgtatcaaaatatcacattgaacaccttaaatataaactttttcgtttgtcaattgtacctccataaagctggaaaaaaatgtgacctcatttgtttgttggtgatttccttttttgaaacagcacatgtcatatttggtaaaaggagttgatattgttaatccatataattggatctgagttgtaggaattaatctccttactcaatggttttcaaccttgtttccaagagtagtagatatcagttttgtagctatttttcagaaaagctaattagtagccctttgagtatggtggcagttttctttcctatatggttatacctttttggatggatcatttttgggctttgagctcaataatctaagcagagagcttgaccagaaacttagttctaggtaggttatgtatcatctgttcagaaaatgaggtctgtaatgtcgttctttgtgtgtgtgtatgtgtgtgtgttacccttattgatacttaccagtttgctattaatgtgtgaatgggagctgaagaaactatagtggaaccaacagtcttaacttacactttggtggttcagttgctgcttgtttctctgagcatatggagaaaaaaaagaaaaaaaaacaaagagagaaaaagccactctgtagctactgccacaactttttttttttttcctttttagaactacgctagtgttagtgctggacactacaaggctcttggggtaaagtagtgaattagatacaatatttctgccttcaggatgcttacatattcatagttgagatagggacaaatgagcaagcaagcaagtcacagttcagttaagagctgacaggtttatgaactgagttccataggagtttttcaaatttattttaatttttctgatcatatgctgcatgatctgtaagagttcttaagggagggagtcccaggtgctcaacttttgggcagatggccaggtaaatctgaatttgccaggtacatgtttttctggaaatagaatcaactttcttacccacaaaggcattgtgtaactgggtgactgattcacatggtgttcacccctgcatgttgtttcaaaaatgtgattgagtacaagtaaggtcagtttttacattcctcttcttggctttgccactcttgccttttacttctgtgcacatccaagaatgtccttaacactagactgctgtaagctcatattatacaggtgaaattttctagcgtcttagcctgttattccttctgttcctacgtatcacctaggtaaggaggaaatctaggagcaaaagataaaggcagttcttccccctatttctctgtaataccttcatatttcatttaatgtaaccctactgctaattacttattacagtctcatgaactatgcgtaaggatatatcttttgaccctgaggtagagcacaaaagcacatgtttcttatgacttattttcatctttcatatttcacaaagtgcaagctagatagaacattatttttaacttttgaaattgcaacttaaatttatgtcagttgtgacagcatacatagtagtacttttctgatagttccaggatgatttatgtcaccacttggtggagctcttttataagtaagtgcattgtttaaaaaagcgagtataagttgtcactaattaggggttatcattagattggttcaaatgaactcaactaaatgatggtataattggtaatctcttcaagtactgagtgtagattttgttttaaactgtaatgtatgtgattaaaattttgataaagatttttctcgagtatttctaatttttctctctcctgctttatgtaaatgtagcacttattgacttttctcctattttacaattgtagataatttaaaaaatgtatgcaggattaataaggaaaatgaaaactgttcgtaatcctaccatgtagagataatcgtgaacattttaatatatattttcattttctcttcttttttgttttttcacaaaattggaatcaaaatatgtgcagaactttttattctgtttttttcttaacgttatatgttgggtatttttacatatccctttaatattccttgaaactgttttgggtttttatattattctatgatatagctctatcacaatatgtttaaccattctgttttaagatttttaggctcttcctactatttttgctattataaataacttttcaaacatctattacactaaatctttttttaatttttaagttttgtgggtacatatcaagtgtacacatttatgggacatatgaaatgccctgatgcaagcatgcagttctgttactctaaatcttgactcaactctatttttacttgttaaattcttagctataaaactgaggtattttaaggatttttatgtaccttaacaaaatgtccttcaattgacattattctcaaatatgtttgttgaaaatatgtttgttgaaagtacctttttttttttgcaaagtgcttgttctttgcccattttccccccattttttgttctttttttggtgtgtgtgggggaattgttttggctaggtaagaattacttttcttctgtttcaacaatttttaaagtgctatcctgagtccttttcataattttcaagaaaacacatcagttacagattttaggttgcaaattgttgttggaaaaggagacctggaccttaaaagaggaatcaggctggaaagcagaatgagatatgagaatcatctgtatatgagatgatgagggctgtaggagtggatgagagtgctgaggaaaaaagagaatggtgggaaaaaagcccatggagttgagaaaccccatgaaaaagttgtgagaggaaaagagaagagaatgaggatgtgagggcatttaaaaaagctactgaaaaaagttgcatggaggtatactgaaggagaaaaattgcaacagtgtcagatgctgcatagaggtctttctggattttgcatccatgttcatcagggacatcagtctaaaattctctttttttgttgtgtctctgccaggctttggtatcaggatgattttggcctcataaaatgaattagggaggattccctctttttctattgattggaatagtttcagaaggaatggtaccagctcctctttgtacctctggtagaattcggctgtgaattcatctgctcctggacttcttttggttggtaggatattaattactccctcaatttcagaacgtgttattggtctattcagggattcaacttcttcctgatttagtcttgggagggtgtatgtgtccaggaatttatccatttcttctagattttctagtttatttgcgtagaggtgtttatagtattctctgatggtagtttgtatttctgtgggatctgtggtgatatcccctttatcattttttattgcatctatttgattcttctctcttttcttctttattagtcttgctagtggtctatcaattttgttgatcttttcaaaaagccagctcctggattcattaattttttgaagggttttttgtgtctctatttccttcagttctgctctgatcttagttatttcttgccttctgctagcttttgaatgtgtttgctcttctctagttcttttaattgtgatgttagggtgtcaattttggatgtttcctgctttctcttgtgggcatttagtgctataaatttccctctacacactgctttacatgtgtcccagagattctggtatgttgtgtctttgttctgattggtttcaaagaacatctttatttctgccttcatttcgttatgtacccagtagtcattcaggagcaggttgttcagtttccatgtagttatgcggttttgagtgagtttcttaatcctgagttctagtttgattgcactgtgatctgagagacagtttgttataatttcttttcttttacatttgctgaggagagctttacttccaactatgtggtcaattttggaataagtgtgatatgctgagaagaatgtatattctgttgattttggatggagagttctgtagatgtctattaggtccgcttggtgcagagctgagttcaattcctggatatccttgttaacgttctgactcattgaactgtctaatgttgacagtggggtgttaaagtctcccattattattgtgtgagagtctaagtctctttgtaggtctctaaggacttgctttatgaatttgggtgctcctgtattgggtgcatatatatttaggatagttagttcttcttgttgaattgatccctttaccattatgtaatggccttctttgtctcttttgatctttgttggtttaacgtctgttttatcagagactaggattgcaacccctgcctttttttgttttccatttgcttggtagatcttcctccattcctttattttgagcctatgtgtgtctctgcacgtgagatggatctcctgaatacagcacactgatgggtcttgactctttatccaatttgccagtctgtgtcttttaattggagcatttagcccatttacatttaaggttaatattgttatgtgtgaatttgatcctgtcattatgatgttagctggtgattttgctcgttagttgatgcagtttcttcctagcctcgatggtctttacaatttggcatgtttttgcagtggctggtaccagctgttcctttccatgtttagtgcttccttcaggagctcttgtaaggcaggcctggtggtgacaaaatgtctcagcatttgtttgcctgtgaaggattttatttctccttcacttatgaagcctagtttggctggatatgaaattctgggttgaaaattcttttctttaagaatgttgaatattggcccccactctcttctggcttgtagagtttctgctgagagatccactgttagtctgatgggcttcgctttgtgggtaaccctacctttctctctggctgccttaacattttttccttcatttcaactttggtgaatctgacaattatgtgtcctggagttgctcttctcgaggagtatctttgtggcattctctgtatttcctgaatttgaatgttggcctgccttgctaggttggggaagttctcctgtataatatcctgcagagtgttttccaacttggttccattctccctgtcactttcaggtacaccaatcagatgtagatttggtcttttcacagagtccggtatttcttgtaggctttatttgtttctttttactcttttttctctaaacttctcttcttgcttcatttcattcatttgatcttccatcactgataccctttcttccagttgatcgaatcagctgctgaagcttgtgcattcatcacgtagttctcgtgccatggttttcagctccatcaggttatttaaggatttctctacactggttattctagttggccagttgtctaatcttttttcaaggtttttagcttctttatgttgggttagaacttccttctttagctcggagaagtttgatcatctgaagccttcttctttcaaatcgtcaaagtcattctccatccagctttgttccgttgctagcgaggagctgcgttcctttggagggggagaggcactctgatttttagaattttcagcttttctgctgttttttccccatctttgtggttttatctacctttggtctttgatgatggtgacgtacagatgggggtatggtgtggatgtcgtttctgtttgttagttttccttctaacaggaccctcagctgcaggtctgttggagtttgctggaggttgactccagaccctgtttgcctgggtatcagcagtggaggctgcagaacagtgaatattgctgaacagcagatgttgctacctgatcgttcctctggaagcttcgtctcagaggggtactcagctgcgtgtggtgttagtctgcccctagtggggtgtgcctcccagttaggctactcaggggtcagggacccacttgaggaggcagtctgtccattctcagatctcaaacttcatgctgggagaaccactacgctcttcaaagctgtcagacagggacatttaagtctgcagaggtttctgctgccttttgttcggctatgccctgcccccagaggtggaatctacagaggcaggcaggcctccttgacctgcggtgggctccacccagttcaagcttcctggccgctttgtttacctactcaagcttcagcaatggcgggcgcccctctcctagcctcgctactgccttgcagtttgatctcagactgctgtgctagcaatgagcgaggctccgtgggtgtgggaccctccgagccaggcacaggatataatctcctggtgtgctgtttgctgagaccattggaaaagcgcagtattagggtgggagtgacccgattttccaggtgccatctgtcacagcttcccttggctaggaaagggaattccgtgaccccctgtgcttcccaggtgaggtgatgcctcgccctgctttggctcacacttggttggctgcactcactttcctgcacccactgtctgacaagccccagtgagatgaacctggtacctcagttggaaatgcaaaaatcacctgtcttctgcatcgctcacactgggagctgtagactggagcttttcctattcggccatcttctagtctttaatttttcatctgtatgatgagaagtgaatccaatgacttttttagattgaaaaattttgaatcaaactcaactaaaatgaacaaaatatatgaaactacaataatgaagacgttatgatattggtgaaaaaagacaagtaaatcaatggaacagaacagataatccagaagtagacccacatatatatattattataagttcattttctacagaggtgcgaaggtaatggaggaaggatattcttctcaacaaataatgctggagcaattgggtatccaaatgcagaaaatgaacttcaatccttacctcacaccatttataaaaactaaccagaaatgaagcatagacctaaacttctagaagatgacataggagaaagtcttaatgagcttgggttaggcaaagatttcatagatacctaccactgaaaacataacccataaaagaaaaaaaatgaataaattgagcttaatcaaaattaaaaacttctattccttgaaatatacttcttatggaagtcaaaacacaagctgcatctgaaataaaggttacattttgctcataggaaagttcttcaggtccttaaaaatcagaacctacttgtagaacatttcacttatgcattttatcatatcagatgatcctgtgtttcattgttttgactactaaatgttctaataaaattcgctgttttaaaaaaatgaataaacaacatactaaattttagcaactttcgcttcattttttaatctttaaaagagagagagagaaaaaaaaaggctggaattgatgaaaggacatatattgagagcagttattgcctgagtgcaaagaaacaaaccaaaatggtaagaaataagcataaaaatttaaagactatggtagttggggttatttattaaagagacaaacaacctttgacatcttattagttcccaagaaattgaccatattaacataaacacaaatacagaagttgatttttgttcattttattaaaatatatatttttaattagtcttgaaaacagtgaagcagtgtatactttgtatcttcaatttcagaaacagtaagtatgtaacatagtttcaaaatcagatttattgaggtataatttacatacacaaaatatgccaattttaagtgcacagttcaatacgttttaacagacatattcactcatataatcaccaccattaagatatagaactttttgatcactccagaaagttctttcattcccctttgcagtcatttcccaacacctcccctctgttccgcaggcaactacagatctactttttgactttaaagattggttttgccttttctagaatttcatatgaaaggaattattcaatgcatccttttgagtctggctttttctcagtgtaataattttgagatttatctatattgttatatatattaggacatttccttttgattttcaaataacattccattgtagggatataccccaatttatttttccatgcacttcttttttttttatatttgggttgtttgtagtttttggccattatgactgaagctgctatgaacattcacatataatgttttcatttctcttgggtatgaatatctgggagtagaattgctatgtgttatgaaaagtgcatatttaactttataagaacttccaaacttgttttccaaaatgattgtgccattttacattttcaccagtgatgtttaagtgttccattgcactacatcctcactgacccttgatattgtcagtcttttacattttagctattctagtgggtgtataattgtaatttaagttgtaaaatatttacatcccaagtagctaaaattaagaaaaagtttagagttggatggtggtaaacctttaattacctgtaaaatttggtaatctggaacaactcacttatcctaaagcttttatataattgatatttcaaaataatgtaagatggtattacatgctttttagctctattgtaatctccagttaagagtaagtaaatagttccaactatttaatgaacattaatttgacatttcttttgtttccaacttaatgtaatccaaaattacccataaaatgtaatatttaggggtggtatatattgtggggaaaaatgtgttctaaagataatgaaaaagtactctagtgataatgatagccatcaatcattaagaactgactgtatactatatactacgccaaaggctttataaatataatttcatttaattgttacaaaatggggtacatattcttattttgattttacaaagacagttaaggaactgaaacatgaaatacaaggttaaaaataattgaataaataaattgataaaaggaatgaatgaatagagcaaggaaagaataagcgaataagaacgtgggcttgtttttttcaaacaaattatatgttatggactctagatctcttaacttagcttcagtgacattggattattgaaaaatgaaactattttgaggaattgactgacccctaaagtttccacaataacttatttaattttttatctttctaatacttttttgccttataatataaaatttgaatgtttgttattagtgtgaaatgaaatcctttcaaatatatgccatcagaaggatgtgttacaaatatacagtattacaaacatttattttgtatgctgaataagaaaaaatcagttataatacagttttaacatagtatccagtgtgtgaattatttaatgaaatatttgatctttattttttgttcccagggaggttatattcaaaagaaaaaggaactgtggggaatctgtatctttattgcagcagttgacctagatgagatgtcgttcacttttactgagctacagaaaaacatagaaatcaggtaaagtttcttgtataaatataagcctctgccataaaaggaaacgaattctggattttcctctcaatagacttttgtgaattagtgagaaatgctaaaataaagtaaaacaaaaagaacttggaccaaatagtgaactgccattctctcatggagccgttatgaaagtgtatttatgctgtatttctttaagaggtagcagtttgtgtcctggaaaaattttcattgtgtctctcactattcatgtgtaagctttcttaattgtggctgttaataaagtgaacagaaaagcaaggatttgtaaataggcttgttttatattaaaacctttatataagtagtttgagtttatcttaaaggtatttaggtaagatttattaaagcctaagattgttttaactagaggatattataactaaatgctttttttcagattatatattgatttgaacatgctacaatacttgaaccagttaattacttaataggtgtttgttgttgagtttataagcctcataagaagagtttattaatgtgttttcaataatgtatgaactttatcttcagaaagtatccaggacttccagtcattttctttgcaacatatttacaaaaatgcaacagtatgtatttttaccaaataggtaattatgtttctccttgaacaaagacatctagaattaaacataattgatattttatttaaacgagatagattaaattgttgcatttttgaaatactttttttgctatatctaaataaaatgtggaaacaaaggccttgtatatttgtaaatatacaaaataatagaaatgacataaatagttcatagagtcaatacctgcaacaccacaggcactcactgcttctctcccttccttgttttcttcccttaagtttcccctagaaaaaaggctttgttgtaacaattcagttttcatggtaatctcaggacaggtattgccatatacctcaaaaaaactggaactgagagtagttctttaataaatgctattctgaggctgatttctttttctttggatatatctgcacttttgttcctttctcttttctcttctaatcaacattctgatcttctattctttgtcatttctactctttctttatttgctttttcacatagcttgtcatggctcccccattcctttctgtatcataggaactttaataaccttttggttcccctgctgattagctgaagcttttatttccccagtgtttgattggtccagcccatttttttgagtgagggctataactcattggttgctggacagcctatggatgggtcaggtgactatcttttgtttcagttagctgctttggtataattccttatacaaaattcatgattagaaattagcatgtgagatgtagttgatgattgctatctttaatatcctattggaaaatgtatatattgatgtttcaaatacgttaatttttatggaaaagagtaacgaagagtgatttaaagttattatttaaactgcttaaattatttaaatcaactttccttttccaaaaataattcaattctaaaatcattggtggggcaaataaagtatgcattttggtgtgtatctctgacaggagggtgccacagggcccagagcaggatgttagagtcaaagtagggtgaggagggcatcctttgtgtgggggcaacctgatggggctgctttgtgtgcagtgtcagagactaagcagggtgtgcaggcagccggtgcacaagtgaggtgaggagggcagcctgctgtggggagtcagaacccttccacagtgaggaagtgtctatgctaaggggtggggtaagtccagaactgggagtcagttctgagaagaacagaaaagtgtccacacgggggagggggtggctttggagatagaaaatggttacttacagggggattgattaaatgagtaagtaaactgaggatgaatgggttccaggtttcccactgtcaatgaagagttacaaatatagaaagggaaacactaaaatgaagcatatggttttatattggaattggatgaatggatgtgaactcatgttttttaaaacacatagacagatacagaataaatatacgcatatctcttcttgacccttcgttttcttatattctcaatgatgaatagatataagcataggtatatagataatagaggtgtaagttgaaggctaattatttttgcaaaaagtaattccttccaaaggatatagtagtgatttgatgtagagctgataatcttttgaattgaaatatctatgatttgaaaacgaaataacacaaatttttaaggttactgatttacttttttctattctttcctttgtagtgtccataaattctttaacttactaaaagaaattgataccagtaccaaagttgataatgctatgtcaagactgttgaagaagtatgatgtattgtttgcactcttcagcaaattggaaaggtaaagtaaacattttattaggtttacactctgattttttatgtcattgttcacaattagattctgggaattatttaacacatttagtaaagttagtaagtattaattcttagacttgtcccttttaatgttagctcattaattcttagctttcttatttatccagtaatatgcattctgaatgcttcctggaaaattaaccgttttattatcctttcatgtcttccatttgttttcaaaaactttaagcttatctcccattttagccttctttgccagaaaacttctagttctgaatagaatggtgacataaatttaaacttcttcctaatagtgttatttagtttggaacgagaaaacacttgcaatggatggtgtatgtgacctatactataaagtaatgatttgtactcccaatggtggcttagaggactttttccattacagttcgagtaggagcataattaatatgcttaggttaagttttttctatacttttcatcaaaactgtacttccctaccccaaatgtttcagcccttaatttggcatatgtctgttatcatgtttgttttgaggctcatttcatttgcggttaagagaatatgaaagttacagtgttagctaaataagcaattgtgtaatagcatggtaaagggagaagggtaaaagaggcatggccctattctggagagaatgaggatggagatagaggtggaaagaagcatctccttaggaggatggctctattttctccccctttttcttttttgaccactaaaacttcacaactgtggtggaggatgagaaaaattagagaaaaaactcaaaggcctagggcttttgaaggactgtcttttcttgcccctggttttaattgtaatatggtagcattggccatctttttttttttttttttttggtcttttcttgatgagaatagaagctttttgcacaagaaaaagggaaatttttaattattaatggagataaattatctaaataatttgcataacaaacatgaactaattatagaatacttggaaaacacagaaaggcataaataaaatatgaatcgaccaaaatgtcaacagtggagagaatcacttttcatattttagaatgtttctttcctttgggtattgtttcacattgagtagaatattatatatatgtgtgtgtgtgtgtgtgtgtgtgtgtgtgtgtgtgtgtgtgtggcttttaaaatttacctaattgtgactttctaaatttttttctattctttaaacttgtttacaacctttttaattcatatctggtagcttattttaatatgatcctaaatacaatgttgctttagagtttttttggtacaatattatttaggcccctgaaaaactggaaacaactgatattcacagctgaagttaaacaatacatattaaacatatctaaacataaaatgttataaatataaaataaaatgtgataaagaataatggcaatattggcaagtgcttctaatgttaaacaaatgaagcaggatatactctgattatgactgtgtgtaaggaagaaacctagaccactaacgcatagaatgaaatgactggagagaagtttaccacaatgttaacccaagttttatatgagtaacttacatttgtaaggaggatgtattacctttctagtaaacaaagcaagcaaaaacttctttaagccaactttaatgagtattctatacatataagtactttaagatctataatcatcagggtttttttttttctagatatagaatttggggactcattggtaggagtgatttggggtacagttctgattttttttcctgctatagtaatttcgactggatgcttccaagttgtttgctctgctgtctgagataaggaatctgcttggatatttgtttctgttgtaagaagcaggaattacatagtggacaaagcattacattgtatatgtttaagggtgaagggtaactatagtggtgattttggtcagagaaaaaaccatagaaggcaatgtccgaatagggtttacaggaaaaatagaaattcaccaagcaaaatgagtgggaactgggagcgagcatcttagagattagcatgtgtacaaagccaaagcagtgatatcaggatgtactttgatattgctaatggctgaaaggtaagaagggatcagattggtagtaatcttgggctttgccctgcaggcagtggaaactccttgaatgattttaaactagggagtaacagttggatttggcctcaaaagaccactcaggactttgtaaaagggatttaaaatttttattgacaaatcatatgagataatttaaagagtaaactttactaaccttaggtggatcagctgggtgttttctatcttatttataccttttttttgaagactaattgagaggattaactgtaattatatattaaagtgatgtgagatgtcataaattgggaaaatctacttgaactttgttttataatgctatatattttttgtttttaaaatatatacttcttaaaagaagataaataaagcatgagaaaactactatgacttctaaattacgaaaaaatgttaaaaagtcataatgtttttcttttcaggacatgtgaacttatatatttgacacaacccagcagttcgtaagtagttcacagaatgttatttttcacttaaaaaaaaagatttttatggaataatctcaaacatcttgatagttagggttagtttgatcgattatagcaggctacttcataaattaagcccatagatttaagtcctgtgtagattatttatcttctcacaaagaaaatagtataaaatacatgccttgtactacaaagaagaactaataaggtggaattgattcaggacagcatatcaccaactctgagaaaaatgcaacaaatgcaaattcattgactaaatctttattgagggtctgttacaggcactttattaactaataatcagcataatttctgtgtgagaataaatgtaaaaatctgtattaaaatttccaaatgattattttaaatgtataatgcatgctctaacagtatgcccatgtagagctccagagttttttcttggaaacagaatgagtagtacatgagattttctgcctcattggagtagtattgaagataattaatataaagggaaattgtatatttactgattaattgatatcaatctattaattccaacaagtgaatgtctctggaaagattatcaaggcaaagtgttaaattggcaaactaaagtcatccaaaccttcatttttctgctcacagtgttgataattaatcagaaaaaagagcaaaaaatattaaggtaatttgaaacaaagtatgttataacatactatgttttttatatatttttatattagaattgaaatattcagtatttcttttacaaaatttttctttcaaaatgtatacttttttttcttaatttttttttttgcagcttctcatggtcaagaatgtatactattctgtgggctaaatatcatatcttagaattataagacatagaaacattaaatgaatagagataaactcaggtgtaaattatgcaattaaaatggactgcattctattatgcatttaactaaggtcattttttttttaatgcacaaaaagaaacacccaaaagatatatctggaaaactttctttcagtgatacatttttcctgttttttttctgctttctatttgtttaataggatatctactgaaataaattctgcattggtgctaaaagtttcttggatcacatttttattagctaaaggtaagttcattatatttattaaatgctaatatttcaaatgtaataattaaattggcattcctttggactaaattccccaatttttattgagtaatgtactcctccctcattctctgcttggcttattaactgttagcaagttcctataattctggtactagaaacaaccttggaaatgctttatttaatttttgtttctaatattccatcttccctccctttcttttttttgaagaataatgatgttactgttttcataaaaatgatatttgctcatgataaataattcaaataaaataattttggtcacaaaagcacaaagaaaaattatctaaaatccacccagggataatcggcattaaaattacataattgggatgcagttaaggtatagaatttttattatttttgtttgtttatgcaaacagtgttaacttgttatcagttgaaataatgggttataagatagtatttgcaagcctcatagtaacctcaaaccaaaaaacatacaatgtagacatgaaaaataaaaagcaagaaactaaagcatatcatcagagaaaactactttcactaaaggaagacagaaaggaaagaaagaaggaagagaagaccacaaaacaaccagaaaacaaataacaaaatgacatgagtaagtccttacttaccaataataacgttgaacataaatggactaaagtctctaattaaaagacacagactggttgaatgatggaaaaacaagactcatttgatctgtttcctacaagaaacacactttgcctataaagacacataccgactgaaaataaagggatggaaaaatatattccatgcccacagaaaccaaaataagagcaggggtcactatacttatatcagacaaaatagatttcaagaacaaaactgtaaggacaaagaaggtcattatataatgataaaggggtcaattcagcaagaggatataacagtgttaaatatttatgcaactaatactggagcacccagatatataaagcaaatattattagagctaaagagagacataggccccaatacaatagaaatagctggagacttcaacaccccactttcagcattggacagatcttccagacagaaaatcaacaaagaaacatcagacttaatctgcactatatagaccatatgaatctaatagatatttacagaacatttcatccaagaatatacattcttcttgtctgcatattgatcattctcaaggatagaccatgtgttaggcttaaaacattaaaaaagcatgaaataatatcaagcatattctctgatcacaatagaataaaactagaaattaataacaaggtattttggaaactgtacagatacatggaaattaaacaatatgctcctgaatggccatgggtcaatgaagaaattaagagggaaattaaaaaaatttttgaaacaaataatggaaacataacaaaccaaaacctatgggatacagtaaaagcagtacagagggaagtttatagctgtaagtgcctacatcccaaaagaggaaaacatctttttttaaaaaaacttttaggttcaggggtacatgtgatggtttgttacataggtaaacttgtgtcacaggggtttgttgtacagcttacttcatcacccaggaattaagcccagtatccaatagctattttttctgttcctctccctcttcccactttccaccttcaagtagaccccagtgcctgttgtttccatctttgtgttcttcagttttcatcatttagctcccacttataagtgaggccatgcagtatttagttttttattcctgcattagtttgctaaggataatagcctccagctccatccatgttcctgtgaaggacatgatctcattcttttttatgggctgcatagaattccatggtatatatgtaccacattttctttatccattctgtcattgatgagcatttaggttgatgccatgtctttgcttttgtggatagtgctgcagtgaacattcacgtgcttttgtctttatggtagaatgatttctattcctttgagtatgtactcagtaatgggattgctgggtccaagggtagttctgcttttagctctttgcggaattgtcagactgctttctacaatgtttgaactaatttacactcccaaccaagagtgtataagtgttctcttttcttttgcaacctcaccagtatctgttattttttgactttatagtaacagctattctgactggtgtgagatgatatctcattgtggttttgatttgcatttctctaatgatcagtgatatggagcttttttttcatatgcttattggctgcatgtatgtcttcttttgaaaagtgtctgttcatgtgccttgcccactttttagtggggttggttttttttctcttgcaaatttgtctaaattccttataaatgctggatattaaacctttgtcagatgcatagtttgcaaaatttttccccattctgtaggttgttcatttactctgttgattgtttcttttgctgtgcagaagctcttgagtttaattcaatcccacttgtcaatttttgattttgttgtgattgcttttggtgtctttatcatgaagactttgcctgttcctatgtctaggatctattttttttttttgagacagagtctcactctgtcacccaggctggagtgcagtggcacaatctcggctcactgcaacctctgcctcccgggtttaagtgattatcttgcctcagcctcctgagtaactgggactacaggtgtgcaccaccatgcccggctaatttttgtatttttactagagatggggttttactatgttggccaggctggtcttgaactccctacctcaggtgatccatgcacctcagcctcccaaagtgctgggattacaggaatgagccaccacacctggcctggccatcttcaatccatcttgagttgatttttgtatatggtgtaaggaatgggtccagcttcaatcttctgcatatggctagccacttatcctagcaccagttaatgaaatgggagtcttttccccattgcttgcttttgtcagctttgtcaaaaagatcagctggtcctaggtgtgcaaccttatttctgggtgctctattctgttccattggtttacattattctgaaaaaaatgtgcctgtttttgtaccagtaacatgctgttttggttactgtagccctgtagtatagtctgaagttggataatgtgatgcctccagctttgttctttttgcttaggattgccttggctattcaggctcttttttggttccagttgaattttaaaatagtttttttttttttatttctgtgaagaatgtcattggtagtttgataggaatagccttgaatctgtaatttttttggggcagtatggccattttaatgatatttattcttcctatccatgagcatgggatgtttttccatgtgtttgtgtcatctctgattgctttgagcagtgttttgaaattcttgttgtagagagctttcacctccctggttagttgtattcctatgtattctttttgtggcaatttttaatgggattgcctttctgatttggctctcagcttggctcttgttggtgtgtagaactactagtgatttttatacattgattttgtatcctgaaactttgctgaagttgttgatcagctgaaggagctttttggctctaagactacagggttttctagatatagcatcatgtcatctgccacagagatagtttgactccctctcttcctatttggatgcccttcatttctttctctcacctgattcctctgattaggacttccaatactttgttgaataggagtggtgaaaaagggcatccttgtcttgtgccagttttcaaagggaatgcttcaagcttctgcacattcagtatgatgttggctgtgggttagttataggtgaaaaaaagaggaaaaactcaaataaacaatctaacattgtatcttaaagaagtacaaaaataagagcaaatcaaacccaaaattagtagaagaaaagaaagatcgagcagaaataaatgaaattgcaatgaaaaaattgcaaaagatcaatgaaacaaagtgtttttttaaaaagttaaacaaaattgacaagcctttagctagattaactaaggaaaaaagagagaagatacaaataagatcagaaatgaaaaaggagacattacagctgatactgcagaaactaaaagtatcattagtggcttctataagcaactatatgccaataaactggaaaatatagaagaaatgggcaaattcctagacatgtacaacttaccaagattgaaccaggaagaaatccaaaacctgaacagaccaataacaagtaatgagattgaagccataataaagtctcctagtaaagaaaagcctgggacctgatggcttcactgctgaattgtaccaaacatttaaagaagaactaataccaatcctacttacagtattctggaaaatagactaggaagaaatacttctaaactcattctacaaggcctgtattaccctgataccaaaaccagataaagacccattaaaaaaagaaaactataggccagtatttctgaggaatattgatacagaaatcttcaacaaaacactagcaaactgaattcaataatacattagatagatcattcattatgtcgcagtgggatttatccctgcaatgcaaggatggttcaacataaacaaatcaatgtggtatgtcatatcaacagaatgaaggacaaaaatcatatgatcatttaaattgatgctgaaaaagcatttgataaaattcagcatccttcatgcccaaaaccctaaaaaacctgaggatagaaggaacataccttaacgtaataaaagccatatataacagacccacagctagtataatacttaatggggaaaaattgaaagcctttcctctaagatctagaacatgatgaggatgtccattgtcatcactgttattcagcatagtactggaagtcctagatagagtagtcagacaaaagatataaagggaatccagattggaaagaaagaagtcaagttatccttgtttgcagctgatacaatcttatatttggaagaacctaaagactccacaagaaaactattagaactaataaacatgttcagtaaagttgaaggatagaaaatcaacatacaaaaatcagtaatgtttctgtatgccaacagtgaataatgtgaaaaagaaatttaaaaagtagtcctgtttacaatagccacacataaaataaaatgcctaggaattaaccacagaagtgaaagatctctatgatgaaaaccatagaatactgatgaaagaaattgaagagcacaccaaaaaaatggaaaaaaattttatgttgttcatggattggaagaattaatattgttaaaatgtccatactacccaaagcaatctatagattcaatgcaattcctatcaaaataccaatgacattcttcacagaaatagaaaaaacagtcctcaaatttatatggaactacaaaagacccagaatagcgaaaactatcctaagcagaaagacgacgttgcttgacttcaaattatactacagagctatagtaaccaaaacagcatggtactggcataaaagcagatacatagaccagtggaacagaacagagagcccagaaacaaatccacatgcctacagtgaactcatttttgacagtggccaagaacatatgctggggaaaagacagtctcttcaataaatggtgctgggaaaactggatatccatatgcagaagaatgaaactagacccctatctgtcaccatatacaaaaatcaaatcaaaatgattaaggacttaaatctaagaccttaaactatgaaactgctataagaaaacattggggaaaatctccaggacatcagtctgggcaaaaatttcttgagcaatacctcacaaacacagtcaaccaaagcaaaaatggataaacgagatcatatcaagttaaaaagcttctacacagcaaaggatacaatgaatgaagtgaagagacaacccacagaatggaaaaaatatttgcaaactacccctctgacaagcaattaataaccagaatatataaggaacccaaacaactctatgggaaaaaatctaataatctgaccaaaaaattggcaaaagagttgaatacacatttctcaaaagaagacatacaaatgacaaacaggcatatgaaaaggtgctcaacatcagtgatcatcagagaaatgcaaatcaaaactacaatgaggtatttatctcactgcagttaaaatggctgatattcaaaagacaggcaataacaaatgctggctaggatgtggagaaaagagaacccccgtacactgttggtgggaatgtaaattagtacaactactatggagaacagtttggaggtttctcaaaaaaattaaaaattgagctaccatattatccaacaatcccactgccaggtatatacccaacgaaaggaagtcagtatatcaaagaggtatctgcactcctatgtttgttgcagcactgtttacaatagctaagatttgaaagcaacctaagtgtccatcaacagatgaatggataaagaaaatatggtacatatacacaatggagtactattcagccataaaaaagaacaaggtctagtcatttgcgacaacatagatggacctggagatcattatgttaaatgaaataagccaggtacagaaagacaaacatcacatactctcatttatttgtgagatctaaaaatcaaatctgaactcatggacctagagagtagaaggatggttaccagaggctgggaagggtggtggaggtttgggagaggtgaggatggttaatgggtccacaaacatagaaaaaatgaataagactttatagcacaacagggtgactttagtcaataataccttaattgtacattttaaaataacttaaagagtgtaattggattgtttgtaactcaaaggataaatgcttgaggagatggataccccattctgcataatgtgcttatttcacagtgcatgcctgtatcaaaacatctcacataccccgtaaatatatgtactatgtacccacaaaaattaaaatttaaaaaattatgtaattgtcattccagatatcttcatatatacattttgattaaaaagatgggtagttgagtgcattcacgaatataattttctaaaactaggttcatattacagtgctacctttaaaatataaaaattaatttcactgaaattttatagaagagagaaatggaaggaattgcttaaatttagataagtattttgtcactttaagtgatattatttctaaaattatttctctaagattatgaaaaaatgtgaaaaaattaagaggttacaatctttatttaagtttgtgtttttatttaaagcaatatactttaatctggtttgaagaaggttactatcttcactcttcctggtgcctccccctctccattttcagattagtccattttattgttatgacattatcaagtattataacatttaaattctattttgtcactataattattgcatttggttagtctcagttctgtatttaaatggattctaaggttatcataactcctatatcatagtttctccatttctcagttctttatttttattcatctcttagctggctgtattttacaatcaacaagtttttaaaaatatgctttttggttccatgttctttatgtttgacatgtttaggaatcatgtctatagcttttatacttgaaggacagctttgtcatgtattctattcttgagtcatattttgtttccctcaggacaatattttctggcattgaacattgctgttgagaaagctgagactagcgtaattccgctcctcatttacttcctgaagaattttttttttaatttgaggtttaataccttaaacaggataacatttcttgattttgttattctgtattagctttttttttttgaacaccgtatccctttttaaactgaaggttctgctgttcattttagaaaatcttaacatactctatttaaaaatattctattcagctaggttgttctataccattgtattttgggaacattttcttatgttggattgcttttattctccctatttattgtcttctctcatattattctgaatttttaaatctttttcttacatattggctgtttttatctcaagcattttttccattttgagctaaactatttttgtaatggtgttatttggtcctcatcttttttcttagcttgtctagttccttccttttatataatttgttcattaatttcctttttatgatacatttttattgaattggatttataatagacgaattattcaataatatgtatttggatcactaaacaaatatattgagaatagcaaatggattttaaccctcctgctaacccagatcaattgctagtggcttcccggcccattgtgttaagaaggactctagattagcatcaggtctctacagggaggggtacacttagtgatgtgatggctgccaagtaaaagctatgaggtggtgatggtgatgctaccctcttatctcagaggcacgtttacatttcatatagtacattacaggtgactaaaggtcatggttgtgcatcagagagggtaagatgatgatcaggagaagcttcaatattaccatttatttattgattcaacagttagttatttattagaatttacaatgtctcaagcatgatattacgtgctaggttaaagtggtggaagatgtatatgttccctgctcagctagaacttacagtcaagtaagggagatagacattaaatgaacaatcacagaaatacttaactacatttgcgataaggaatgtaaagggaaagtgtaatcccccaatgggttcttcctgctggctgcacagacaaaatcaatccaccaagattgtggcattgcagtagagatagtttaattgaccactaggctgacccatgtgggagaactggagttatcactcaaatcagcctcagctggttaagttcttagtgcaagcactcatagggcattttcttcttttagattatctttcagattgggttctctgtctgatttttttccccttcttatgttgtgattcttttttgattttctatgtttacataatcactgtgcttttccccctcgtattgctgggactgtatatgtgtaaccctgatttgatgttctgttttctctgatttaatgtgagtgaatatcccttcactctgcacttaatctgtgacttgtttatgttccccaaagagctatggtatgggagcaggcatttttattatatctgcttttagtcaggaggtaagggagaaagtagataattcaactgtaatgatacaagccgttgttctgagtttttgttagaatgaactttataacagaacacttctagtggcagttttatcttttttctatagcaggattgttttgggattcaaattgtccccagttcaacacagtatgcagagtctctgtgttgtcagaaaaataagctatagttgtttacttcctccattttactcttctcttatcagcagtttctccctccaagtcagagaggcaaaagatgaggataccgtttgagttagtctcgctcagtcagtctctcatttgatattggtaccagcactttaatacctaataaaatgaaagcaaaagaatgtacttgagagagattctttcatctgacttcaccgtttttacctagaaatccttgatatcgttctttaccactatggtattttaaaataacttatttgtgaatatattgcagacatattttttgcaccataccattgtatctagaaaacctataaagatgcaacgttatctgttttctcacaaagtttctgcacatccagtgtttgctgagattattactggtttagcagtcagatactcagaaaatagaaagtgaatcaaattgaacttctcttttaaaaataatgtatgacatggagccataagcaaatttgtaatagctgtgttttatcatgatttgtatattttatgtagctacactatttgttttcttaggtatctgttatatgcatttattttctcacagccatctagttgtatatatattctaataactttaaagattttatggtgaacaattattttatagatgactttaaatttatatactaattttgttatctcttaatggttttggttattgtaagattttagaggggttgaaattaaaaatatataaggtttagatataaataattggaataaaatcataattttataaataaaataattattttaaatttttagataatgagaattaattgaatcattggaattagaataaattctaataaacttagtaattttatataataaatatacttataaaagtggaattaaaaatttgaattctaattattataataaaatattatacaaatataaataaaatatttataaaattagaattaaagattagcatttatcatacttcaaaatctttctctggagtaatacattctatagttcttaaaattagaaataaatttaaaaagcaaaatttatagtgattttagacataaagaattaattataacagaaatacttaaatgtaaaattctcagagtagacttaacacttgatttataattccataactttacatatttctattttacatattttataccttttaaaacagattttttttttttttacaaaaaaaagaaagaaaatctttaccatgctgatagtgattgttgaatgaataaatttatggatatactctaccctgcgattttctctcatacaaagatctgaatctctaactttctttaaaaatgtacatttttttttcaggggaagtattacaaatggaagatgatctggtgatttcatttcagttaatgctatgtgtccttgactattttattaaactctcacctcccatgttgctcaaagaaccatatagtaagtatttaatttatgccccttttactttctcattcagcagttgcttattgaatgtctagtgggtaccaaacatggttctaaggctgacaggatgataaaaaataaatcagacatggactttgcccataagtagtgtaagttatagaaggaaagataagacatggaaacaaatgattagagtatatggtagaaagtggtttgggtcaaaatacaacaaatggaggtttgggagacaagaaagtttttccagctgtggaagaccaaagaataccatataaaagaagtagtatttgaaattaacatggaagagtggttaggattggggaaaggcattctcagtaaagtgttgggggagggcattcccagtgaagaaaagcaagaaacaagaaaaagatatgaatgaaattgcatggggaagagtggcctattctaagggaacagcttaactaagtttttattactattggatgttgtaataactatgtatttttttgtatataagctataactcatactatttcagtgggtgatgagtgatgagatgggaagtatatttaaataaaaataacttgctaatataattagatagcattaaggaagtatgagtaaggtatattccttttagcctagaattgcttcctttcatggcttcaagagtaggatttcaaagtcacttattatattattatatacagaaaaatgtaaacttacttaaggtcagactaattccttgcttctgaaatgatgaaagtattaatgctaaaaataatagataacatggaagtttcaaagtgttgttgaaatggatggaaggatgaaggctcattaaactttgtgaacaagaatttagtggaaaaattaagtatggagcagaattttgaagatgtgttgaacatggtttggcagagaaggcagaaaccttcatttagcagaaaccacatgcaaagaaagaaataaaaaaaattctatatagaaaacaaatatacttcaaattttctcccaaattttataaatttcctttatataccctttccccacttttttcaatgttataactttaataagttgatgttgcaagttactttaggttgacaatctttgttcttttggataattcaaatgtacatgtgaattctctaagtgctctgttaaagagcaatcagcatggggtattattgaactgactgaatatggtaactcttagttaatttttgttgtagagaatttcaaatgaatacaaaaatagtagtataataagcctccatgtacttatcatgtaacttcaacagataatttacagttaatctgtagccccattgcctgctcagttcccccagctgtattattttgaagcacatctttgcataccatttcatccttatacatctcagtatatatctctaaaaaatactttttaaaaagcataattacagtgctctttgttatcacacctacaaatcaataaatagtgactccttaatattactgaatatctagaaagtgctcagattttcttgtaaaaataattaaaaaatttttttacagtttgaatgagaatctaaataagatttatactttgtgtttggttgacatgttttaaaaactcttttaaaagtttctcttccatcctttctttttttccttgtaatttattttttaaataatcagattgtcttgagttttccacagtgtggtttttgctgatcatattctgtggtatagtttaacatgttcttctgtcctctcaatttcttgtaagttgttgattggatctagaggcaatacatactttttatacttaatcatctgtaattttttttttttttttttgaggcagagtctcactcactctgtcgcccaggcctggagttcagtggcgcgatctcagctcactgcaaactctgcctcccgggttcaagcaattctcctgcttcagcctcccgagtagctgggactatgggcatgcaccaccacacctggctaatttttgtatttttagtagagacggggtttcaccgtgttggccaggctggtcttgaactcctgacctcatgatccacctgccttggcctcccaaagtgctaggattacaggcgtgagccaccacacccagccatctgtaatatttttaatagctgaacctgtatttagtttggattgggaatgctgaaaataatccaggagattttttttttaaatcacagtttattatcatattattatatttactataatatattttatacctatcttttaaagacatcataatttactaaaacttaaaatattgtttttatgctatgtctagaaattgaattcagaaatatttgctaattatttttaagactctaggacagaaaacttttttttcctcttgcagactaaaatacgcttagatttagtttgaaagttggctatttccatgccttctctttgtatttgtttatgagactgtagtttacagttctttttgggagcagagtagaagagggatggcaaaaactaatattagtacataatttgtagtagatatggatgaaattgttatccttctaatgaaacctaataagtaaaagtagtagaatgttaccaagattatttttgacctaagttatagttagaatacttcattattttatatgatggatgtacaattgttcttatctaatttaccacttttacagaaacagctgttatacccattaatggttcacctcgaacacccaggcgaggtcagaacaggagtgcacggatagcaaaacaactagaaaatgatacaagaattattgaagttctctgtaaagaacatgaatgtaatatagatgaggtaatttaacttcatgatttctttaaaacagttaaagtagatttagatgtaagttctccctaacaatatttacttcttttgttatgagcatgttttttttgtaattagtgctaactcttttgcagtagcaaaatatttagaaaaaattaattcgttatatttagttactttgattttaaagagagtagctccctcactctggaatcactgaaaagtatataatcaagacaatagttttcaaatgtagtttttttttttttttattcctctgaggttactgatacccctaatgttttaaaataccctgccaaggctgggcatggtggctcacacctgtaatcccagctctttgggaggccgaagtgggaggatttcttgaggccaggaggtctagaccagcctgaacaacatagcgagactctgtctctacaaaatacatatttaaaaaaatgaactgggcatggtggcatgtgcctgtagtcccagctacttggaagactgaggcaaaaggattgcttgagcccagaagtttgaggttacagtgagacatgattgcaccactgcactccagcccgggcgccagagtgagactatgtctccaaaaacgaacaaacaaaccaaaaaagccctgcttagaaaactctagtgctctagtgttttagtttagtgataagtgataccaacattaaatttctgtttggccttctataattactctctttctaaatattacagcacataatgactgctggagaatacatatgaattcccaggaattacttgtcttgttcatagaatgtggatgttagaaggaatcttacaaataatgtattcaatctcctttttataatgagtaaacaagcttccagggactgatagcttattatttacagcgtctacattagactttgggatatctggtactattgcttctttcctttttaccatacagtttttctcatagtttgttttattgtccacaatcactaacaccagatagcagtaaaaaatgttacatctttgaaatttctctgttaactttgggaaggagtgagagtgtggtcctaaaatctagtttaagaagtattagaatgatttatcaagatatatcatagtttttgcactatggcttactaatttcaacaaatatacagttgactcttgaacaacaggtttgaattgcatgggtccgtttatacacagatatatttaattacatatattagaaaaaattttggagatttgcaataatttgaaaaaatttgtagcaaaccgtgtagcctacaaatacagaaaaaattaagaaaaaggcatgtcttgaatgtacaaaatatatgtagatactagtctattttatcatttactataccataaaatacatacaaaactgtagctgcagatgcctgctgtttcaggcggacgatttttgttaacagatgacataaacttactgtaaatgtattttgtcttcttacaattttcctaatattttcttttctctatctttatcataagaagatgatatatttagtatgtatatatagtacatatacaaaatatatgtgaattcaatctttatgttattggttggcttccagtcaacagtaggctgttagttaaattttgggtactcaaaagtaatcgataggtctgtagtctcagctacttgggaggctgaggtggaaggatggcttgagcccaagcatttgaagctgtaatgcatgtgattgcacctgtgaatagccactacacttcagcctaggcaatatagagagaccccttctctaagaaaataataaaaaataaaaaagttatacacagattttttactgcatgggggattgacacctctaacttaccctgcattgttcaagagtcaagagattagattttgttttaaattttaatgatcatgttgtaacttcatctttttcaggtgaaaaatgtttatttcaaaaattttataccttttatgaattctcttggacttgtaacatctaatggacttccagaggtaatctgaaaggaaatttaataaaatattaatgttttgagactgtggagggaggataattgtctaactttcttagatcaatttactgtgtatcacattttttttttgcccaagaagaatctagccaagtagaattgtggtgaaactaacttttgtatagtaacaaaaagcttttgagtatataatcaaatgtattagcatcattttgtgatttatactagaaatcaatctttattgaattttttccaaaatcaaagtatagacttttaaacttctaaataccattaaatagctaaattttaatagctaaatataaaccattaaatttgctttggtaagcctcattaagcgtaggaaccatgattaatgccatcaacattattggcattactacattgtggaacatctcttttgaggatttttaagaactgcttaattgaaaatacaaatgtatttgttgaaatgactgtgactattgcagaagtgttttaccttagtgatattccatccatctacctgttttgtttcgcattttgctacaaatgtctttccaatgagaacagaataactgagagctttgcatggtaagacgaaatatgtggagaaaaggatgctgtgatagatgatgaagaacaaaaccagtgttttagaagacatagtattagtcactatgaccaaaaggcatgaaataaaatagctagactgctagttctgtaacctgaattgatagctagtttttgaattaatttattaattcaacaaatattttttgaatgcttaatatatgtcaggcacgtgctagatactatggatacagagatttcactctcagtcactatccttaaagtgctagtgggagaggctgacaaagaaatagagcattacaggagtctacaagagtgtgaaaaaagtattcacagggttctgtgatatctcaaaggagagctacctaatccaaactagggctgataggttttgtggaaaatagtttagaggtgatgtgatttcaaatctgagtaagcattacagatatagcatttccaagggttggacattgtagattcaaaggtgcagtgatgtatgatagtatggtctgatcagtgaactctaagtaattcattaaggttgggatacagggcagaacaattaaaatatggtactgaagaggcaagaagggaccaaatgttatattaatgagtcttgttaccacttttggtaccaaaaactaggctgttcataactttaaaatctgttgtagcaatctttttttctcctttaaaaggattatagttttaatataaatcttaagagtaattttactttttctccaatatttcacataatatagccaatcaatagatgactggtaattagtgcctcaactaaggtaggacaggaacaatgattaaacataagcatggattactgttctatctaatacatttatgaagattaatgaaaagtttgcatttaattggatttcttcctatcactccttttaaaatgcaattttacttctctgaggttggaatcactttggcgttaaaagtcacagtagaaggcatgccaatagttttctcttgggcattggtttttaaagtataattaaaaaattatggatcagaactgatgaaagatttacaaattctagcaattgaaaaagtatctaagattgggaataaattgtgcaagtgtgttaattgaactgataaattgagctaattgtcttgcccaagatacttaactgaagggtactggagtgaaccaaagggtttagaaaacattggtagaatatgtaatcaagaggatttgcaacaatgtttgaaaaaatattttatattgataagcataaaagattaaaagcaggctgggcgcggtggctcacgcctgtaattctagtactttgggaggccgaggcaggtggatcacctgaggtcaggagttcaagaccagcttggccaacatggcgaaaccccgtctctactaaaaatacaaaaattagccgggcatggtagcaggtacctataatcccagctactcgggaggctgaggcaggaaagttgcttgaaccccgggggcagaggtggcagtgagccgagattgtgccactgcactccagcctgggcgaaagagcgaaactccatctcaaaaaaaaaaaaaaaaaaaagattaaaagtaaagcatatatgggatgtttggaaaatcttggcagttaaacagttattataatacctatttttatcttaggtactgttttgtagcattggctatctttgtctacataaaattctaataaatattttctatgcacgaaatagacctaaaatcaaagttgaacaaatgttgcaattttctgtacctcacttttagatagaccttatttatattgcatgcgaactcagtgtatattacaaaattaaatgtatattatacaaaaattctttaatgaaatctgtgcctctgtgtgctgagagatgtaatgacatgtaaaggataattgtcagtgacttttttctttcaaggttgaaaatctttctaaacgatacgaagaaatttatcttaaaaataaagatctagatgcaagattatttttggatcatgataaaactcttcagactgattctatagacaggtattgcacatggtatatttgattgatttgctttagatataggttgatactgatataggtagattatatagtctttagcttagtgacctttagatatcatttataacaaattactttcaaatgtctttatacaaagaaaagtttaacagtattttaagcatataacttatctacaaatatagatttaatgtgaattgtgtgtcctataacagttacctttttgcagttaactgaatataattttttaaaatgtgcaccaaaagataatggctaaagtaattagtttcttcaaatagtggtctctaccttatttctatcctttcatatactattgcctgcctggtttatttaaaaaagtttatacaaaagtgtagtctctgttattatcatgtagaaacctaaaattggaatggttgagagtgattgttaaaatttttgactgatcataagtaaagttaattttgtgtctttagcatgaactcttttaatatgaaactgaaaatatgcgtaatttagaagttaaacacagtaaaatgttttaaattttatttaagtggaaataaagtttttagaaggaataatgcattgaaaaacttgagttttaatgctttttaatactgaacaacttggttatcaataccaccagggagaaagcatctgactttcacttttaaaaaaagacttaatgattggtatacctctttgtcataaacataatggaaagagacccacaattaaaaagagtagtgaaaaatattttatttaagcagcagctgggtcatctattttctatcctatctattattgagttatcattttatatgattttatgagacaacagaagcattatactgcttttttgatgcataaagcacaaattgtaaattttcagtatgtgaatgacttcacttattgttatttagttttgaaacacagagaacaccacgaaaaagtaaccttgatgaagaggtgaatgtaattcctccacacactccagttaggtatgaattttcctacttttaattatattataattttgttattcatggctttatagtgtttcagatttgttcacgtttctttatgtattcatacatacatgtaagaaatatatattgaaggccaggtgtggtggatcacacctgtaatcccagcactttgggaggccaaggcgggcagatcacctgaggttaggagtttgagaccggcctggccaacatggtgaaaccccgtctctactagaaatacaaaaattagctgggggtggtggtgtgtgcctgtaatcccagctgctcgggaggctgaggcaggagaattgcttgaacccgggaggcggaggttgcagagagctgagatcgtgccattgcacttcagcctgggtgacaagagcgaaactccgtctcaaaaaaaaaatgtgtatatataatctttgtgtgctgggcattttactggttgctgaagatatggttattggacctagttttgtctgttcttaaagaacataacctaaaataggaatgtgttccatttcagtaaataaaaaagaaaaaattaaagtatcactatttgatctgcatgcaaccttaaaggattagaactattttttatgtctttttcctcactcatttcccacatcaaaatctgttatcaaggcttgttgaataatctacctccaaaatatttcctgagtgcatctacttttctccatttctgctctcacaactcttgtccaagacattgttctctttctcttggattttttgcagtagcctactacctgatcttgctccttctggtctcatcattgttcctgtctcctcaccatcaaagatattctccatagagcccccagaatttctcctagaaatgtaaatcagttacattcaccttgctgttaaacccactgactgcttcccattgcaattggtatacagtgcaaattccttaacaatgcctaaaagatcttatatggtctggtttctgttgcctctccaacctcatcttgttttctttctcactctgtgttagccacactttggccttctctgtttcttgggctttccaagttttttgaaaaccctcgtacttgatattccctcttcttgaaatttcctccttttctttccatggattaccaactgctactcttcattcagcacaaatattgcttttgaaaagatatttctctctgaagtattttattatttctcatatcatcctgttccattcctttatagcatgtatcccaatttatattgatagattcatttgtgtttgcttgcttttactaatacccaaaatagccttaaaattccatatcacagagaccataacctttttgttcactgtctaataattagggcctgttataaaacttggtacatagtaggcaatcagtaatatatttcaaatgactgtatagatatgtaaatggatacattttcatataagtatagtatatactttggacaagataatgagatgacacagaagggactataaagcaatgtctgaactgaattttgaaacatgcaaaggcctgtgtcacaggataaagattttagggagtgggaacagcatgttcaaagggctggaattgtgaaacatgtaagtggagaaaaccctgctgtcacaccaccgacaacaatcaacacagaagacttttgtgaccaaatgtgggaaagttttcctcaccaagaaacaagcaatcagttctgcagcagtcaccagctgggtgtcctctaatttacttctgacactgcttacctggagatagtgtcagatcccacaggttgagggctcagtccccaaaactggccccaacttcagatgccagttgcaagtctgggtttttggatcttctgaccaaagggcttcaagttggggttcccatgacacctcttaggttcgattaatttgctagagtagttcacaaaactcaaggaaacacttctgtttactggtttattatagatgatattacaaaggatgcagatgtaaagatgcataggatgaggtatgggggatgggatgggaagcttctatgccctccctggccagacagctgtccaggagcctccacatgttcagctatccggaagttctctgaaccctgcccttttgggtttttatggaggcctcattgcataggcatgacagattagatcattggctattgattatcaacctaaccttcagcttccctccccttcctagaggttgggggctggggctgaaggttccaaccctctaactctgcctcgggctttctagtgaccagcccccatccagatgcttcctaggggctgccagccatgtcaattcattagcacacaaaaggacatcactggagtttctaagtattttacgagttgtatgtcaggatatggggtcaaagaccaaacatctatttcacaatatcacacaacacaatgtgtctggggaactattagcagctctgtattgattgactataaaatgagagtaggaagtcacaggagaggagagtgggtactagatatgaagggccttatatgccatactcacaaatttggagtgtagcatgtgcatgatatagcctgtgctataaatggatgttaagcaggggtaaggataaaatcagacataatttttgcaagttcacatggtaatagtcagtggggggatagactgaggagaataagaaaaagtgagaaatagacctgtcagtctgtctcagtggttcttaaccatgtgtgcaaattagaataacctgaggaattttgttttgttttttctttttaaaaattttgtgtcccattccactgaggaatatgcctaggccttactaccacagacatagtgtataaaaatctctgggcttgtctgttgtagcagtttacttgagagtttttaaagatctgaaccaacgatagtggtgggaatgaaggaacaataacagatttgataaatatttgatgaattcatacttagaatgttgttcttgaggcatttctgaagaagatatctagtaagcagtaggatagccttctatagatttgggaatcatcaggggagttaaacccataaaaaaaaatgagattgcttgaagggagggtgcataatggcaagagtgggtggctaagggctgaagcctaaaggatgctagcattaaggactagacagaaattgttaggttctagagcaggggtccccaattcccgggccagagactggtctgtgtcccattacgaactgggtgatacagcaggaggtgagtggtagacaggcaagtgagcattactgcctgagatctacctcctgtcagatcagcagtggaattagattctcataggtgcatgaaccttattgtgaactgcgcatgtgagggatctagattgtatgctccttatgagaatttaatggctgatgatttgaggtagaacagttcaaaaccattccccctactctccatggtccatggaaaaattgtcttccatgaaaccagtccctgttgccaaaaaggttggggactgctgttctagagaatgggaaagtatgattggggagtgcagagattgaagcgaagaaagctgagggagggagggagtttcattaagagcaagtatttctctaacagtgtcaaatgcttcaaggaaggtcaagtattagaacaaatgagaaaagtcttttgtttttatcagttggtcatttgtggctttaatcactgtagcttaaatatgattagtggacacagaagcatatagaagctgtgttgcaatatatttgaaagacgaggctgggtgtggtggctcacgcctgtaatcccactttgggaggccaaggtgggcggatcacctgaggacaggagttcgaaaccagcctgggcaacatggcaaaaccccgtctctactaaaaatacaaaaattagcccagctgggcacctgtaatcccagataatcaggaggctgaggcaggagaatcacttgaacccgggaagtggaggttgcagtgagccaagattgcgccactgcactccagcctgggcgacagagcaaggctccttctcaaaaaaaaaaaagaaaaagaaaagaaagatgaggaagtgtaaatactggtttagacatgcttagctgagaacactgagcatattttactaaataatagttgaggatcttttcagccctaaacattctacagttctttgcataattaaagtgtcccaaatgttcagctactccaaaattgtaacattgatatttaccatatactgcccccttcataatacacacacataaaattatagaattaacaagatcttaagagattgacctaattttatgctgtgaaagtggtgatttttaaatgtatccaggatcttagtatcctttcttcttgaaggtctctgtaaagaaaaatcatctgattctttacttgagttgctaagtatcttattgtctttaatttgaaaatgtttaatatttggttgtaataatgttttcttaaaacaataccattttgttgccagtttatatagtttctcctaaaaataatgccactattttattgatatgtagttttattagtaaataagtatatctgttctataactataaacttattgattgtgaatacatattttcttaaagatttaagtaaaatgtaatttcttataaaccacagtcttatttgagggaatgtagagacaagtgggaggcagtgtatttgaagatacatttaacttgggagatggaaaacatttcattttttctttttttctcccttcattgcttaacacattttcctatttttatcccctctaggactgttatgaacactatccaacaattaatgatgattttaaattcagcaagtgatcaaccttcagaaaatctgatttcctattttaacgtaagccatatatgaaacattatttattgtaatatcttggcaaagaaacttgaaattaaaagttaaagtactgagttctttttaaaatactaatctcctatctaacatgtagttatccataatcttttcttgcttttttaatcttacaaattatatattattagtagtattgttttatttatacagtgttatttaaaacatttttatgtttacctatttgccttgctcaccattcttccttgcaacttatgcctcacttctgagataatttttttcttcttcagatatatcctttgataattactttagtggtattaatttgggatgaactttttgaggttttattttgttttttgatctgaaattttctttacccttatttttttgtgagatagctttgctcgatcttcaattccaggttgacatttactttttagactcttataagtttgaagataatacattacctggatcccatttttgctaattaagaagtcttatgccactcaatctaactgttgttcctttgtagttaatctgtctttttctctctggctacttttaagatcttttctttgaatgtagtattagataggacttaacattccccatacccctacaatctttttcatccaatatttaacccatttttatttacaattcttacctggccctgttagcattatagtttgcaactcctgatagacaataagtttaatatctgaaggcatctgataccctctctcccctaaagacaaggagaaagaaagagagagaatgaaactatcatctatattgcttgcttgctccttcactccttacttaaactcagatgaggattgggacccactgaaatgctcatccactaaaattggacatagggtcaggagacttattaaaatttggcttatttcagcaactgtgctttttgtacttgttaacaattcattcattgccataacctgcctgtgattttgtcataatctgttgtcatctcttgctatgttcccccaggaattagcaaagtaatttctgtcatcatgttcgtaattgttttggctcagaattgattttgtttgtccaatatgcataaagtcgcttttgtttatgagttatctatagcacaagaatatatgccaaaacatatgtaccccaattacctaaaccttttagcaagggctaatgaaagaatttaaaagaatgataagccctttcttctcatatcattttgaatacttcctccaatatttggagtatgtaggagttcttttttatttaaaaaattctgcctcaaagacttttttttaaacttggaaactatatgatctttttttatgtttttatacagtttttcaaccctcgctctcttccttccctcctccctctagtagtctccagtgtctattgctgccatctttatgtccatgagtacctgatatttagctcccactcattagtgagaacatgcagtatttggttttctttttctgtattaatttgtttaggataatgacctccagctacatccatgtggctgcaaagggcataatttcattctttttttatgactgtatagtactccatagtgtataagtaccacattttctttatccaatccaccactgaagggcacctaggttgattccatgtctttgctattgtgaatagcataccagtgaacatatgagtgcatgtgaaagacattttctagagctcaatttaaagcttaacttttaatgaagcttaaaagcttaattatgtagatgataagttgcatatgtcaaagtgaacatgtcttgaaggtcattatgtttttccttcattttacttccttattagttcaaatttcttcatttttaaaattaatgccaccttccctccatgtaaaatcttagaagctatgaacattttaatggacattttggcaacaattcttttatgacaggaaatgcttgtttgttatatgtttctaagtttgtgtgctgttttttttttttaggaatatagaattgctgatattctagaatgtgaaaatgtcgccagacaatgcacattacaatgaaaattataatcttatttttatttatatatatatatatttttgagacagagtttcactctgttgcctaggctggagtgaaatggcatgataattggctcactacaacctccatctcctgggttcaagcgattcttgtgactcagcctcccaagtagctgggattgcagaagcctgctaccatgtccagctaattattgtaatttttgtggagatggtgtttcacaatgtttcccaggctggtctcaaactccagacctcaggtgatctgctcacttcagttttccaaagtgccgggattacagtcatgagccactgtgcctggccataatcttaattttagaaactttatttttgaatgtatatattgaatgtgttttatgtataaaggataaaaaatagaataaatctttgtagctgatgagaatcatgctgtgattactttttatatatcataatatgaattatataatattatataatatgcattttaatacatcatcttgtgatgtgttttaattattaaagttgaatagccccactccaaatgatacatgtattggaacttcttttgcaacaatttccctatcttgtatttctgaaaatgtaatcaaatgatttagctaattcataactctttcaaagcacgttttaaaattaggaaatggtccgggcatggtggctcacacctgtaatcccagcactttgggaggccaaggtggttggatcacctgaaatcaggagttcgagaccaggctggtcaacatggcaaaaccccatctctactaaagagacaaaaattagtgaggcgtggtgcgcttgcctataatcccagctacttgggatgctgaggcaggagaatcacttgaacttgggaggcggaggttgcagtaagccgagattgcgccactgcactccagcctgggcgacagagtgacacttcatctcaaaaaaaaaaaaaaaaaaaaattagtaaatgataccaagctcaagccttggttttatttcatttgctttttcggaagcaacatacatcccaatataactcttaattgaaggtattttatgagaatgtatgaggctctttctgatggatggaaagcttaacaaatttgctcttctctagcctagtggcagaaaatttagataatagggttttttagttgtactgtagtattttttgctcattaacatccagtgaaatgatattgtctgcttatgttcagtagttgtggttacctagttattatggaagtgtttccacatttttatgaacaatttaaaaagtcatatattatggagcagaaaatattaattctgattacacagtatcctcgacattgatttctgtttttacctcctaaagaactgcacagtgaatccaaaagaaagtatactgaaaagagtgaaggatataggatacatctttaaagagaaatttgctaaagctgtgggacagggttgtgtcgaaattggatcacaggtaacttgaattcattgtaattcgtggtactatagagtaataatattaaaagcagcatctttccagttcgtataaatactctaacagtatttgtctagtagtataaaatactgtcagatactatatccctgctgcctgtgtatgctgctatttatgggtaactttatggaaaactacctcccaccccattataaaaactatgtaataaaggaacacatagccattgtagaaattttggaaaatacaactaagaaaaaaattgaaatctttgatattaaatttttgattttgctttgacttctacatgtatgactgttcatgtatgcatatcctaatgtgaatgggactatacatgccatttgtcagtgatattattgagtgatattatttcaggaaatctaaagctaatataataggtaagagtatgggccatggagtgacagccctgggtttatatttggttctaccattgttgatcttggacatgtcatttaacttctctgagattcaggttctatatttgctctgctttgttgtgtggcattaatgaggataatatacaaaaatatattggaaaactggagtccactgtacacatttatttcagtgtagtgaggttatattttgatgccatcagtgttttaaacattgatatttaatggttctttttgattctacagccatgcaccacttaacagggatatgttctgacaaatgcatcattaggcaattttgttgtgtgaacctggtagagtgtgtctgtacaaacctagatggtatagccgattgtacatctaagctgtatgatatagcctattcattcctaggctacaggcctctacagcatgtgtactgaatactgtaggtaatggtaacataatgtgttaccatttgtgtatctaaatatatccaaacatagaaaaggtaaagatatagtacaaaagataaaaaatggaacatttgcacagagcacttactatgaaaggagcttacaggattgaaagttgctctgaatgagtcagtgagtcgagtggcaagtgaatgtgaaggcctacaatattacctatgacatgactgtacactatcgtagactttataaatactacacttaggctaaactaatttcataaacattttttctttcttcagtagtaaattaaccatagctcactgtaacttttttactttataaatcttcagtttgtaagaaacttttgactcttataacacttagcttaaaacacaaacaccttatacagctgtacaaaaatattttctttctttataatccttattctgtacacttttttctatttaaaaattttttcaatttcataaagatttttgccaaaaacaaaggcaaacacacacattagcctaggcctacacaggatcaggattaacaataccactgtcttctgcctccaaattctgtcccaagtcttcagggacaataaaatgcatagagctgtcaactcctatgatgatgatgctatcttctggaatatctcctgaaggagctgcctgagggtgttttacatttaacttttttttttttttacaagtagaaggaggatgctctaaactaataaaaagtatagtataataaatacataaaccagtaacatgttcattattaagtattatgtactgtacataattgtatgtactatacttttatatgactggcagtgcaataggtttatttacatcagcatcatcacaaagatgtgagtaatgtaatgcattgcactacattacactaaacaataggaatttttcagctccattataatcttatgggactactgttagatatgcagtcagttattgaccaaaaacgttgttatgcggtgcatgattatatatgagatttttgctcttagtttggaaggaaataatatggtgtgtgtttatatttctaaaatttggttattctttcaaataatgggaactagttatttggctaaaacttcttgctcataaggtcagtttgatctgatttttgcctgtgtcagttttactaaatttatggacaaagactgtcctcttaatcctggacagctatcttgaaaatacatgtcctaggtcatgagaaatgttatataaggtacataaagtgcttaaaatagtactgggcacataacctatctttagtatgaatgatataaactgaaatggagttaaggaaatccaggtactggacctaccctcttgttaatttacttgggaatgttaatcaccacttaatacttaagttgtgagttttagacaagctagcttttgtgttgtcttggcggccatatttgtaagaagggtgagaagtatgttttaagaaaaggctttttaaaaaattttagtaattgtcagctgggtatagtggtacatgcctataatcccagcctcttgggaggccaaagcaggaggatctcttgagcccaggagtgtgaaggccagcctgggcaaaacagtgagactccatctcaaaaaaaaaaaaaatttcataattgtgattttctaaaatagcaggctcttatttttctttttgtttgtttgtagcgatacaaacttggagttcgcttgtattaccgagtaatggaatccatgcttaaatcagtaagttaaaaacaatataaaaaaatttcagccgggcgcggtggctcacgcctgcaatcccagcactttgggaggccgaggtgggcagatcaggaggtcaaggcatcaagatcatcctggccaaaatggtgaaaccctgtctctactaaaagtacaaaaattagctgggcgtggtggtgtagacctgtagtcccagctacttggcaggctgaggcaggagaatcccttgaaccagggaggtggaggttgcagtgagccaagattgtgccatttcaccccagcctggcaacagagcaagacaccatctaaaaaaaaaaaaaaaaaaaaaaaaaattcaatgctgacacaaataaggtttcaattaaacaacttctttttttttttttaaattatctgtttcaggaagaagaacgattatccattcaaaattttaggtaaattttttacttttagtaaaaaatttttttctttttatagaagtaagtattttataatctttttttttttcctttagcaaacttctgaatgacaacatttttcatatgtctttattggcgtgcgctcttgaggttgtaatggccacatatagcagtaagttaaattttcataaataaacacttttgttcaatttaaagttaaaatgtggtgtgtttctttggtcgggggagagggatagtgtgaggttaaggagaaggaatgcttattttagatcactatatactgaagaatgtaattggtcattataagccatttaagaggcttatttgagttatttgaggccatcttggggataatatttcactaggcttctcttctgagtatactggtatactgaatccaaaaaaggtactttttgaaatccctccgaagacctttgagattgtagagtgccaaaggagtattcaagagtggcctctactgatatggaagcactgctgtaacctccatggttatgaaactaaagattgaagctagaatccactggataaacagaacaaaggccaattacaatgtttttaaaaacataaatgtatatcactttgcaaattatgttgcaaatgttaaaagaaagttttgcttgcagaaacaaaaggaacatttgtataaggatgcaaaacacagaaaaagaggaacttttagtttccttattagtaaacagataaggaaaactgtgaatcctcatttataaccaagaaatgcatattttaatgagataccattttgtaactaatgaaattagcagaatcttgaagaatctgtctatcctcttaccaaggattaatgagaattaaaatagatatgccaatggctgataagatactaaacctgttcctgatataagtttagggtatttaaatctttgaaaatttgagatcagctataagtcctttctctaggaaaaacacagatttgcttacactcaaaattggaaggctatttcctatgagtccgtagactccaaaataaaaaattctgctctaaataaaaatggtttaacctttctactgttttctttgtctgataataacttccaaaaaaatacctagctcaagggttaatatttcataaatagttacttttttttttcatttttaggaagtacatctcagaatcttgattctggaacagatttgtctttcccatggattctgaatgtgcttaatttaaaagcctttgatttttacaaagtgatcgaaagttttatcaaagcagaaggcaacttgacaagagaaatgataaaacatttagaacgatgtgaacatcgaatcatggaatcccttgcatggctctcagtaagtagctaaataattgaagaaattcattcatgtgcatatggctaacaaattattgttagtgagaggtgtttcttaacatctacctcaagaacatatagggaatttaatgaataatgttatttcagtctatagcccaaggatcaagtggaatattagaatggagctttaatcgagcaccctaaaccatctaatacagcacagtgatttatttaagaatagcttttcttaaaacatgccactttaaaacaaaacggattttttttttatactttaagttctagggtacatgtgcacaacgtgcaggtttgttacatatgtatacatgtgccatattggtgtgctgcacccattaacttgtcatttacattagatatatctcctaatgctatccctccctcctctccctaccccatgacaggccccagtgtgtgatgttccccaccctgtgtccacgtgttctcattgttcatttcccacctatgagtgagaacatgcagtgtttggttttctgtcttggcaatagtttgctcagaatgatggtttccagcttcatccatgtccctacaaaggacatgaactcatccttttttatggctgcatagtatatatgtgccacatattccatggtatatatgtgccacattttcttactccagtctattattgttggacatttgggttgcttccaagtctttgctattgtgaatagtgccacaataaacatacgtgtgcatgtgtctttatagcagcatgatttataatcctttgggtatatacccagtaatgagatggctgggtcaaatgctatttttggttttagatccttgaggaatcgccacactgttgaactagtttacagtcccaccaacagtgtaaaagtgttcctatttcttcacatcctctccagcatctgttgtttcctgactttttaatgatcgccattctaactggtgtgagatggtatttcattgtggttttgatttgcatttctctgatggccagtgatgatgagcattttttcatgtgtcttttggctgcataaatgtcttcttttgagaagtgtctgttcatatctttcacccactttttgatggggttgattttttcttgtaaatttgtttgagttctttgtagattctggatattagccctttgtcagatgggtagattgtaaaagttttctcccattctgtaggttgcctgttcactctgatcgtagtttcttttgctgtgcagaagctctttagtttaattagatcccatttgtcaattttggcttttgttgctattgcttttggtgttttagtcatgaagtccttgcccatgccgatgtcctgaatggtattgcctaggttttcttctagggtttttatggttttaggtctaacatttaagtctttaatccatcttgaattaatttttgtacaaggtgtaaggaagggatccagtttcagctttctacatatggctggccagttttcccagcaccatttattaaatagggaatcctttctccatttcttgtttttgtcaggtttgtcaaagatcagatggttgtagatgtgtggtattatttctgagggccctgttctaaaccaaaacagaattctttaaagtatttagataatttatttaaagtacagttgttatatatttgaaaatgcaaatgtctgctcttaaattgtgagattatgctatttagattattaaaaagtgcatttttttcttgttaaatatagtaggattcattttttcccattattaaagtataaaaatgtatactattgttcaattataggtattggttcaatcaatataggggcacaaattatattgtctaggattctctttatagcattataactattgataaggcttttgttttaataaaagtggcaacttgaggttatgctcttcaaatcaacatagttggataatactttgtgaatcatcagttttgtaaattaatggtttcttttgaaactgtgttgcatgctaagtatatatcttttaatttgtatcagtatatagaagtggtaattaaaaaattaagactttaggtatgccataatcctaatttgcacatgtaaccttagttttaatttccttacgttttgaatttttaatgactaagcgataatttatttcttagtgttttcttgtattgccatatagacagagtgaatagaggagagaaacatgggaaattgatagaagaatgttacactcctattattgaatttcataactacttatggaatgaatttacacttgataaggagtacttagaagaaaactttctgaatctgggtaattaagtgaaagtaaaaataaatagataagtaaataaaataagcacatagagtactttttaaaggcttatgtgtcctctcctcccagaaattgatattgagatattcctgtatcatctgaaagtgactattgttatttcttttagagaattaattttatttctatcaacacatatttattgaacatacgccatatgccttgaattgagagagatactgtgaagatacaaaaaagataaaggcttggaaaattgtggaggatgtaatagaaatttactgtttaaaaattgtttgtactcaagcctgtttagctcagttatttagggcttctaaacaatattcctttatttttgagaatttttggagaaaaagtgacaagccccaaatctggaaaagagtatgattgatttacaataggagacgtggaagtcataagcctctgaatttaaatattaaatgtagtatctctggcagatgaaactatagaggacttttatttagtcatatatttttagtgtttgagtcttatattacatttttaatcataaaaaccttgagtggtagtggataactttgtgaagataagttatgccacacaaacaggatactgtgtatttttcctgtgagaataattgacattatagagaagggatatggcatagatacatttgcgttttcacagacttttttttaaaatttgaaatataacacatattaagaaaagtatatatctcaagtgacagtttggtgaatttgtcacaaattgaacacatccgtgtaaacaacacccagataaaggcccagagcaagctttcatagtcttttgattctgtgtcataataaaaaattctcgttaaaactgtagattgataggaacatattcacacagagttgttgactgagggaaatttcaaatgaggtgctgcttacttctctcctgccaataatttaatgaaagaaagaacatcatcttatttttaatggttgtgtggggaactgggttcagcatttttgcttgacagccttgagataaaataaatccataaggaaaaagcccacttctgtttcttttcatcccagagagattaatgggcaatatatgagtgtaagatactggaaaagtctgttgagaaacctagtgaaatctcattctctgaaaagttgggggattacaggtgctatcgaatgcatcatacctaagggttagatgaaatgacttccaagagtttggccctattaaatctgttaagaggtttataatgccagcaggtgatgaaatgaaatttggatgccttagtttcagtattttcagaatttatcatattttttcaataaatgtttataaatcaaagtatgtcagatgctttattccctatatgatctgtctttcctggactattctggactcttcctattgatctctcatttgctaccttgagaccatttctctcacagcagccagagaaatctgctcataatgtaaatctcatcatgctaattcctcaggtaaaaaacctcctgtggaggacatattcatctggtaatgttggaagaagaccctaccatatggctttctgcaaaaaagaccactatactacctgtttggaatacaaaaagtaactgactgaaattactggacaggaagaacagatgctagttgagaaagagaagaggggagctgggagcctgaggagaaggcttttagtctagggctaagtgcagtaggtatagggaaggacagtaaggtagggcagggatgtcagtgggaaaactatgggtctcttcaccaggaaaactggaaaattgaagctagggaaaccttggccactgaagagagtggaagaatcctgcaagggaaagagccaagaaagggtacccagattctgtctgaaatctgaataattcctgtgtgtcacagactcagagcagccaaatgaagggcaaaagatctgaactgaaactggagttgctgcccaataaacagaacagttcaagttaagcaaagataattgcttcttacaacaaaaccattctcattttagaaaaataacagaatttaggatcttcacaatgtaacatttatgatgttcaggatacagttctaaaattatccagcatagaaagaaggtcaaagaaaccaaatgctggtttatagaataggagctttaggccaggtgtgtggtgcacacctaatcccagcattttgggaggctgaggtgggaggatcatttgagcccagaagttcaagaccagcctgggcaacaaagcaagaccccatctcttaaaaaaaaaaaaaaaaagctaggtgtgatggcatggtggcatgttcctgtggtcctaggtacttgggaggctgaggcaacacagcgagactctgtctcaaaaaaataaaaaataaaaacaaaaaaactagaatgggagctttaagttaactttggttaggcattgctaaatgatggggatacattctaggaaatacttcatttaggcaactttgtcattgtgtgaacatcatagagtgtgcttacacaaacctaggtggtatagcctgctacacatcagggtaggaatagcctgttgcttctagactacagacctgtatggtattttttttttaatctccactcttgagtatgtctttttaatattcaatgtgatgaaactgaagtatgtagaaagttgcataccaaagtatgatagctgtcttgaggaaaaatacttattttattggttgagttgtgaactgaacccgtcactcttttcgtgaaacacatgtgttacttgtaagactgataagcaattgtgtttatttatgcttgggtatgtggtagattcttgaaagtgaacaaagtgagcctgtcatttcaaagaaaacaactgacagtaaaggttgccaatgataaattttgtgttttcaagtaaaaattagaattttagaaacttgtatccaccactgaaagcttgacagagtcctaatatataaaatacttttctgatgaaatcggtggtgatatcaatgaatgtgagagatttgtaaacatttacaagaagtacataattcagtgaaccagtatttccaaatgaccaaatacatcgttataaaatcattcacgggtaagatattcattaaaagttcaagataaaccaatggattttaaagtcttaaaatacgaaaaatttatttcggttcattgagattgtttccagttccgccctgcaactaacctttaagaaactatgacttgtcgagttttggcgtagtgtcagaaaacagtaaccataattatctgaaaaggttattaaagtactcctcctctttccatatgaggccagatttttctttgtatacttcaacctaaacagcatattgcaacaaagtaaatgtagaagcggataggaaaattcagctctttgctgttatgccagatagtgaagacattcagaagatcataaaacagtgctattgttctatcttttttgttttgtagaatatggttatttttcattaaaaattatttatgttaacataatgggtttattaagataaatatttttaaattttctcaagttcttttgagccctcaacatcctttaatgtaaaaaagctattagctactttatgcttcctaatggaagaatatataaccaccttgaaaacatgatgttgaaagaagccagtcacagaaaaccacatattgtataaattcatttatatgaaatgtccacaagaggcaattcagtagagataggaagtagattattggttttctaaggctggtggggaggactaggtgttttgaggatgatggctagagagtatggtttttctttttgagataatgaaaatgttgtaaaattgactcattattgtagtcaattttataacacttttatcatctctgtgaatatactaaaaactattgaattgtacacattaaatgggtgaattgtataggatgtaattttttaaatttctgttttaattaaattttaactaaattaagttttaattactaacaaagtaaatattaatagatttaacccacacaaacaaaagcttttggggtccttagtaattttaagaatataaaagggttttgagtccaaaaagtttgagaacccttgcctgtattctcttccccactcagacttgtctttcactcacacaaccatgtttgtttttgcctgtccctgagtcttgaaatgctttcctctgcctttttcttgaccagattttaaggtccattttgcctttcctgatcatcctagtctatagtcattcttccctcatttagtcttaaattgtttattatctatatacttaactagtcatttataaactttgttttactatatgtgcatatctcatgttaaattcatgtaaagtacttaaaacaatatctgacattgtattataaaatgtagcagttaattacataagggtaaagaacagagaggagtcaacttatgatgacatgcaggtttctggcttgtataacttaagtggatagtagtgtcattcattaaaataagatacctaggattgaatgaggtttgcttgggaagatgaatttcatttgatgagttttaagtaattataggtcatttcaatagaggtgtcaagtagcagttggatatgtgtgtctggaacttaggaaagaaatctaggctaagattatggaccataaaaaatgccacccttttttgacagtttatcttgtgccaggcactttggtgagcacttcttaaatttaattttcatcataatccatgaggtagtttaccctagatcaggaaatgaatgcttagaaaagtttaataacttgccctagaccacacaagcaaaatggcaagatctgtgatttgaacccaggtctttctggctccaaagctattaatccttatgctttgctgagtaactgaagtttggagaagggataagatcacttaaggggagaatatagtatgagaagagaaggaggctaaagatagaattctaaggagctctaacatttaaaggatggacagaaaagagaagcctgtgcctacaaaagagattgaaatagaacagccaggaagataagaagaaaatcaggagaagtggtatcatagagagaccgaccaggtgcaatggctcccgcctgtaatcccagcactttgggaggctgaggcaggtggatcacttgaggccaggagttcgagactagcctgaccaacatgacaaaaccctgtctctactaaaaatacaaaaattagctgggcctggtggtgaatgcctgtaattctagctactcgggaggctgaggcatgagaatcgcttgagcccgggaggcggaggttgagtgagccaagattgtgccactgcactccagcctcagtgacagagcaagactctgtctcaaaaataaaataaaataaaattaaattaaattaaaaactgaaaaaaaggaaaaggagagagagaacattacaaagtctgagtgagtgcttgctcactcagacttttcagataggagctgaaaagttttagcaacaatgaagtcactggtgacagtgacaaggactgttaaatgaaggggtggggataggatgagatctgaatgagagataaagtggacacagtcaaatagatggcttttatcaaaagttttgcctgtgaagagaaataaagatataacagaagtaaagatacagcttgatgtatgtgaagtagagggaatataaacatattttttaaatcagaaaggtagggtttaaatattgatggaaaagagccattagaagtgttctctattgctggataacaaattagtggctttaaacaaatattttattttgcttatgattttttgggtcaggaatttgggttgaacttgactgggtggtttgtctccgactatgtgtcagcaggtgcctggagctatagggtccacttccaagatgcttcttcactcacaggtctggcatcttaccgctccttggtgcacactcagctctcttcctcccatcctccctccctagagtggttagaatgttaagctttggagttttcacctgcagagagaagataggagattcatagtgaaagtagaggttttaagaaacaggatatttggcagggtgcagtgtctcacacctgtaatcccagcactttgggaagccaaggtgagaggattgcttgagcccgagttcaagaccagccttggcaacatagggagaccctgtctctacagataatttttaaaattagccaggtgtggtggcacacacctgtggttcttgggaggctgaactgggagaattgcctgagcctgggatgttaaggctgcagtgagctgtgattgcaccacagcacaccagcctgggtggtagaatgagatcctgcctcaaaaacaaacaaaacaagcaaacaaccccaaaacaaacaaacaaaaagtaacaggatatttcattaaataattcattcattaaataatgaagttgaacgtaatgaatttaatgaagtttaataggtgtagtgggagtaacaatgagaatgaaagtgtaggaggttgtagtcaaagagttgtttcaccttagaatttctggagacagaacatttctgggtagtttactgtattttaagaaatgatcttgggagtgcatgaggatcctggccaaggagccagaaagtacagtgagcaagagtccaggacatgtagcaaggaggaatgtgactgaaataaagactaatgtcttcagtgcttgaggggagtaaccaggagacaagtgggactaaatggggcagagggctagagaggtcctgaaagcaaaactcctggctcacttaaaaaaaaactaatctctctctcaatacctaatctaatgtctaacatatagaatttaggtgcataaagcattagatttgtaatgtcctttgatgaatttacctctttaatcattataaaatgaccctctctttatccctcgtaatattgtttgctctgaaaactacttgtgcctgatactagtgaagccattccagctttcttcccattaatatcaacatggcatattttccccattctttatttaacttatacgtgtctttattcttaaagaagtgattttcttataggcagcatattgttgggtgttgctttcttaaatcttgcctaacagtatctgccttttaattgggatgtttagatttaaatttaatgtgactattgatatggttgggtttaaattctccatcttattattcattttctatttgtctcatctcccttttcctccctttcctctttttctgccttcttttggattgaatttttaaaattctgttttatcttctttgtaggcttactgtctatacttctttattttgtaattgttttttgatttataatatgaatctttaatctttaatagtctttctttaaatagtattacactacttcacatacagtataagaatcttagaatagtatatttccattttcccttttccaacctttgggctgttgttgtcatacattttgcttcgacagaagttataagctctacaatacactcataacttttgttttaaaccaattatctcttaaagagaattcaaaacaagagaaaaaagatgtttttatttgattacatatttacctttccagtactcttcattccttgtgtagatccagattccttttgttttccttctgactgtaaaactttttttggccaggggcagtggctcatacccgtaatcccaacacttagtggggctgaggcgggaggatctcttgaagccaggagttcaaaaccagcctaggcaacaaagcaaaactctgtctctattcttataaaacaaacaaaaagcatttctattttttttttctttttgagatggagtctctctctgtcacccaggctggagtgcagtggcgcgatcttggctcactgcaacctccacctcctgggttcaagcgattctcctgcctcagcctcctgagtagctgggattacaggcacacgccaccatgcctagctaatttttatatttttagtagagaaagggtttcaccatgttgatcaggctggtctcgaactcctgacctcgtgatttgcctgcctcggcctcctcccaaagggctgggattactggcatgagccaccgcacccagccaacaaaaaacatttcttgtgtgcatgtctactagtgatgaattcttccagcttttatgtctggaaaaaaacattttacctttatttttaaaaggtcttttgctgggtattgaattctaggttgacagtctttttgttttttctttgagtgctttaaaaatattgctccactgtcttctggtttgccttgtttctttttttcttttttttgagatgaagcctcgctcttttgcccaggctggagtgcagtggcatgatcccagctcactgcaacctctgcctcccaggttcaagcgattcttctgcctcagcctcctgagtgactgggactaaaggcacatgccaccatgcccggctaatttttgtatttttagtaaagatggggtttcaccatgctggccaggctggtctcgaactcctgatctcaggtgacccacccaccttggcttcccaaagtgctgggattacaagcatgagccaccacgcctggccttgttctttttttgctgtatctttttcctgcaggtttttctttctgtatttcatgttgaataccttctaaagctatgtcttcaagtttattaatttttttcttctgaggtatctaatctgctattaatctcatttattgtatttttagtcttactatagttttcatttctagaaatttgatttgggtcctttttatatcttccatatctatttttattatgtttatgcttttctttaccttcttgaacatatgggatataggtattataactttttaaatgtccctgttactaagtctagtacctatgtctttttaggtctgtttctcttgactgatagttctctctctctctctcttttttttaagagtcgtatgtttctgcttttttgactgcttggtgatttttttgttaggtgccagatatcatgaattttgctttagtgggtcctggatatttttgtattcctttcactattttgacctgtgttttggaacacaattaaattatctggaaataatttgacttttttaaggcttcatttatttatttatctggtttttgtttttggacacagagcagtctttaatcaatagccgattttccttcactatccaggcattgctcttctgagtactctactgaatatcccatatatgacaaggtttttccactctggctagttgaaagcagaactcttcctgaccctgtgtcagctcctggaaggattctactccttcccatggttcttccctggttttgagtagtatcatcacatccatgcactgatcagtactcagctgaagactcaagcttaaccctctgcagacctctggagttctctttttgtagctttcttctctctagtattctgtcctgctaattttagtttgccttggcatctcccatttcttaactctgtttcttcaactgggggaccactgggctgcattccagtttctcatctctggactgtggaccataaactgtccccaggcagtaagctgtggcaataatgaggctcaccatttgttttccttctcccagggattgctgttctgtactgcctgttgtttattgtgtaaaaagaattcttttatttatgttgttcaattttgtggttgtttaaacgaatctggtccctgtttcttcatcagagctggcagggttactaaacgtaaggcttagtgattgatgaagtatttacaaatatgaaatatgtacacttacagaatatttagggtatcatttccgcttccttgtgttaaatgcatcaggtcttctgactgatgcattatactgtttcagaggggtgcttactatatggagaacatagaagtactagttattaactatttttttgtattaaattttggtacgtcacataaacattgagtctcctttaaatgtgtcaaatgtagctgacttactaattggattctgtcatactctttttctgtggtcaccaaatattagcaaatttcttcattcagttacacaagtacttggccaacatacttttacataagaaaatacttaggatgggctggcaagatagccaaataggaacagctctggtctgcagctgccagcgagatcaacccagaaggcaggtgatttctccatttccaactgaggtacctggctcatctcattgggactggttagacagtggatgcagcccacggagggcaagctgaagcaggatggggcatcacctcacccgggaagcacaaggggttggggaactccctcccctagccaagggaagctgtgacagactgtgtcatgaggaacattgcattccagcccagatactatgcttttcccacagtcttcgcaacccacagaccaggagattccctcgggtgcctacaccaccagggccctgggtttcaagcacaaaactgggcagctgtttgggcagataccgagctagctgtaggagttttctttcgtactccagtggtgcctggaatgacagcgagttagaaccattcactcccccggaaagggggctgaagccagggagccaagtggtctacctcagcggatcccacccccatggagccaagcaagctaagatccactggcttgaaattctcgctgccatcacagcagtctgaggtcgacctgggatggtagagctaggtagggggaggggcattccccattactgaggcttgagttttcccctcacagtgtaaacaaagccaccaggaagttcaaactgggcagagcctaccacagctccctaaatccgctgtagccagactgcctttctagattcctcctctctgggcagggcatctctgaaagaaaggcagcagccccagtcaggggcctatagataaaactcccatctacctgggacagagcacgtgggggaaggcgcagctgtggacacatcttcagcagacttaaacattcctgcctgctggctctgaagagagcagcagatctcccagcacagtgctcaagctctgctaagggacagactgtctcctcaagtgggtccctgacccctgtgcctcctgactgggaaacacctcctggcaggaatcaacagacacctcatacaggagagttccagctgccatctggtgggtacccctctgggacgaagcttccagaggaaggaacaggcagcaatctttgctcttctgcaacctccactggtgataccaggcaaacagggtctggagtggacctccagcaaactccagcacacctgcagcagaggggcctgactgttagaaggagaactaacaaacagaaatgaatagcatcaacatcaacaaaaaggacgtccacacagaaaccccatttgaaggtcatcaacatcaaagaccaaaggtagataaatccatgaagatgaggaaaaaccagcacaaaaaggctgaaaattccaaaaaccagagcgccttttctcttccaaagaatgacaactcctccccagcaaggggagtttgacgaattgacagaagtaggcttcagaaggtgggtaataacaaactcctccgagctaaaggaccatgttctaacccaatgcaaggaagctaagaactttgaaaaaaggttagaggaattgctaactagaataaccagtttagagaagaacataaatgacctgacggaactgaaaaaacacaacacgaggactttgtgaagcatacacaagtaccaatagctgaatcgatcaagcagaaaaaaaggatatcagagattgaagatcagcttaatgaaataaagcgtgatgacaagattagagaaaaaagaatgaaaaggaatgaacaaagcctccaagaaataggggactatgtgaaaagaccaaacctatgtttgattggtgtacctgaaagtgacagggagagtggaaccaagttagaaaacactctacaggatattatccaagagaacatccccaacccaacaaaacaggccaacattcaaattcaggaaatacagggaacaccacaaagatactcctcaagaagaggaaccccaggacatataatcgtcagattcaccaaggttgaaatgaaggaaaaaatattaagagcagccactgctcaaggaaataagagagggcacaaacaaatggcaaaacattccatgctcatggatgggaaaaattatagcgtgaaaatggccatactgcccacagtaatttatagattcaatgctatccccatcaagctacctttggctttcttcacagaattagaaaaaactactttaaattttatatagaacctaaaaagagcccatatagccgagacaatcttaagcaaaaagaacaaagctggaggcatcacgctacttgacttcaaactatactacaaggccacaataatcaaaacagcatggtactggtaccaaaaaagataaataaaccaacggaacagaacagagacctcagaaataatgccacacatctacaaccatctgatttttgacaaacttgacaaaaacaaccaatggggaaaggattccctatttaataaatgatattgggaaaactgactagccatatgcagaaaactgaaactggaccccttccttacaccttatacaaaaattaactcaaaatggattaaagacttaaacataacacctaaaaccataaaaaccctagaagaaaacctaggcaataccattcaggacataggcatgggcaaagacttcatgaccaaaacaccaaaagcaatggcaacaaaagccaaaattgacgaatgggatctaattaaactaaagagcttctgcacagcaaaagaaactatcttcagagtgaacaggcaacctacagaatgggagaaaatttttgcaatgtatccatctgacaaagggctaaagtccagaatctacaaggaacttaaacaaatttacaggaaaacaaacaaccctatcaaaaagtgggtgaaggatatgaacagacacttctcaaaagaagatatttatgtggccaacaaacatatgaaaaaaagctcatcaccactggtcattagagaaatgcaaatcaaaaccacagtgagataccatctcatgccagttagaatggtgatcattaaaaagtcaggaaacaacagatgctggagaggctgtggagtaataggaatggttttatactgttggtggcagtgtaaattagttcaaccattgtggaagacagtgtggcgattcctcaaggatctagagccagaaataatatttgacccagtaatcccattactgagcatatacccaaaggattataaatcattctactaaaaagaacatgcacacatatgtttattgcagcactattcacaatagcaaagacttgaaaccaacccaaatgcccatcagtggtagactggataaagaaaatgtggcacatatacaccatggaacactatgcagccataaaaaaggatgagttcgtgtcctttgcagggacatggatgaagctggaaaccatcattctcagcaaactaaccaggaagagaaaaccaaacaacacatgttttcacttataagttaaaactgaacagtgagaacacatggacacatggaggggaacatcacacaccggggcctgtcagggggtgcgggtctaagggagggatagcattaggaaaaatacctaatgtagatgatgggttgataggtgcagcaaaccaccatggcacgcgtatacctatgtaacaaacctgcacattctgcacatgtatcctagaacttaaagtataataaaaaaacagaaaatatttaaaatatatctttcaaattatcttttcaaatttaaatcgagggtcattttatgtatgagtataatttgtaatgaatagcccatagttttagagtcctgattcattgacaaacttataaacaaaattttaagcttttttggtattcttttgaaatgtcaaaattgatgggaagcaaacacaaaagggagaacagtctgtggctctgaaaaaaccaaaaaggatatctgttgtatgtttgtatggtgggtcattaacctttggtgtactttgcagaagtattttaagtatttaccattggacattatttgttttaagttatattttgctgagagctacaactcaggaaggcaagtgaattgtaagataacgattaagccacatttaacactttttaaaagcatgggccaggacaatgaagcagtatgatgccatatatacttttacacaacagccatgctaatataatgataaagcaattatgctatatttttaaaagcttctcatgaattacctaaaataaccatgtatttacttttctttgccagaaagaggaaacattttattttaattttaaaaaattcaattctgaaaacatagctaaagctttaacctttctcactctgacccaatatattcctaatatagctttgcccttgacttccacagctaaatactagtttctcaagtgatttaggagacttgacttcattattcaaaactgaaattatttagcttgttctaaatgcaactttgcttcccactatgtctatttttccattacttttcaaatcatctgggcttaaatactgagcactttctccttttctttctcaatagtttgatagagtcctgtaatttttttttaaagctgtctctcatatttattatattattattttaatatacttcattacacttccctagaacagatcatcagctctctttaagtaatttgtctgaggtcacccagttggcatttgaactcatattggtttgattccaaattccatactggtttctagtaaaggtctctgtcactgtactacattatttctgtgaaatcattcatgctgtttttactacctctataatatatagtcaggcatatgggacagtataaagggagcaatacaaatagtaagttaattttattctaagtgaaagcataatatgtatgtgtattttttatcctgagtaacaagggaagtgttttgcctaggagctaataagtaacaagaaagggaaaagtaacatttgttgactagctcctttgtgcagtgcactgtgactattggtctggcttattcctcaggaagaaggattaaaagaagactttacaaaaatgagcaaactatattataaaagtaaatgctagtatgcatatatgtttcattcatgcaactcctagaaatgagaatttactataagtgttttcagaatccacaataatttaggttgaaattaggtatttggatcaactttcaagggaaggggtgacaatgaggtgaaatagacatctagattgttttcgtagactgaaacattggacctgaggtttttgttgttgttttactctttctctgtttttagtaaaagattccaggtatgcctaaagtcatcttctatacgaatgcaaaaatgtaacgacaaagaagggaaaataaaagaaggcaatatcttaggaataaatattttatagtgacattatttttctgctagtgaactaataatctacaaaaattttaagatagataagcagaaagaatacaaacaaaaaaagatagtaatttaactcatatgaataatcatccactgaaatgtagcaaggatatgctacatatgaaatgtaattagatgattgcttaaagatctaggaatataagctcaatgtaataaaataactttcttcatcattgttaaggattaataaggcattaaatgggttttcatgtgggtcctcatatgttaaaaaggacaacaataagaaaatctaaagaaactgagataacttataaatcaatgcaggtattctgtgttaaatgcttatgtaagcctgagttcttcatccagatctgtttatgattttaaacataaaatcattttcatttctaaacctttgctcaagtaacttgtagtacctgagtcctatgtctgatccctaagtctattcttttctctatgtatctatacccttctttaattttaaaacactctgacatatgaaaaaatgccagagtttactgtagagaaatattcataacttgtctattcatgtcactcctccccaccacaccatccatattatacacattacccattctctttgttcattaattggcaaaagggactaagaaattcaaggatgtccaaaaataaaaaacaaacaaaaatctaacaactcaggaatgtcctgtaggtagctcatagaaacttagtttaggaagtagtgctcatcacttgcttacttctttggaagtttgtctgataattatacagaccagcatcaaaataactctcatttatgtgtgtgacatttcagtgtagaagtaataataggtaatgtttttgcatatgtcctattataggtactgttaaaagtgcttcagtgtattaactcataacttctcacaactctatgaaatagattctgtcatcactgtttcacagatggagaaactttcctgtgtccacaaaactggttggtgacagagccagaattttaactcaggctatctggttccagagactatacttttagcctctatgttgccttttagtgtatattagtttactgtttggtatgtgcattgtcatgattcgtttatttgctcatgttttatctgtgtttgtatttttgtgtttgtgagtgttactatgctatggcaaaaagggcctagactttgaattagcggatcttacttaatattcacagaagcctggaagtgtaaacactgctatccctattttatagataaagagacctgaggtccagagatgtcatgtaacttgctttggtgtggttctgaacaaattatgtctctgtatctcaggtttccttgtatgtaaaatagggataactttcagttgttgtgaggaataaatgagcatttatgagaatagtaattagaaacataacaattaattgttagtacccttcattccttttcctctgctatacagtgatttcataagaacagagaaccgaggattcagttacacagtattaacctgtttatcttggcttactataagtacagagaatttttctcttctcttgaggcacccctcctcccccatcaccttctcaaaatggaaaaagttcagggggaaaaggcatcatgggactccagcattgttaagtatgggcagtgttcactgttatattacagttggaatttgttatgttgctttagttatgaatcatgtcagtaattaccctgagggtggtgttagttcactattcaagtacaaacaagaagggaagtagcaatggtagaagaatagctaggacatactctctgtacctaacctgtgggatggaagcacatatactcttattcagagaattttataaagagtcatgatgttagataattacttgaatttagttttagaattttcagtttgtaaacttacagtcaaatcttaactggaattgtgaggaagggctctagaattctggatatgcaagaaacaaagaagagaaataggagaaatcgatcctaattagtgtggcttctgaatttctgcagcaaaataaaaggctgttattaattattgagtttactaaaattttagaactactctaaggcaattatgcttcaatcatctaagcttacttacctttaattataaaatagaacaactttttggcatttcatttttccaactatttatagcatgttttaaaaactctgaactgtcacgacccagtctgtttcaacatacacatttgtggtccttggtgttgttactaatttacttaattgggtcttcatattttcagcttttctcagaaatggccaaatatcaaaggtatttttggtgtcttcctgtaagtgctagatttagaacatgataaggaaacgtagaataggaaacagctggatttgtttcttagccttttcaaaaaagccttttcttactttgctaagtttcagtggttcttatctccactaaatataacaacaaatttatctttaagattttgattatattccttaagaattcttcaaagactaacataaatctgtcttgctatcttttaagtctggtcattttatcattatgcccttttcttattttaagataatttaattgtctaaaagtttttaaatttacatattaagtaatgatagtttttatattaggttttatcatttagtttttttcttttaaacattaagatgaaaaaggtggagaagtgaaattacttgtcttttacatgagtcataaacaaaaatgaacataggatacactaatccaatactgaacttactatctgttcttgaaaatataatttttttgcattatctttttcataggaatatcagacacctttaatagtgtacacttttagattggcatctgatttagttgaacccacatattttaacggggtcttctgaaaataaacgtttgcacatttcagttccaatgaagaacaaatggcctggggaagggatggagagtggtaaagaaatcccttgtagaaaacctttttttttttttaaacagatgagtctcactctgttttcccaggctggagtgcaatgacacaatcatagctcactgaagccttgaactcttgggctcaagtgatcctcccacctcagcctccttagtagatgtgactacaggtgtgagccaacacacccagctaattttttttattctttgtagagacggggtcttgctgttgcccaggctggtctcaaactcctagactcaagtgatcctattgctttggcttcccaaagtgctgggattagtcatgagctgccactcttggcctacagaaactatttatatgtgtcctttgctttatttttctttaaatgcaggtccattttttcccctcgttttaggtagctaagattatattgaatcatgtgtgtttcagtctttgtcatctcaggaagtcttatgagaccacaacataaagtatagtaatttttgtccaataattttggccattagcaaaaattacctatatgacatataaatcaaatggtataattttttagtgctaagtcttaagtagtattcatttttatttaaataaattgcttctgttcgtaaagtactatatataaaacctttttaccttttttatatataaaacctatgattcataggttttatgtcctattaaaatatgagctaacaataattggtaaaattagttggaaaattatcagttttaaaagaaaattaaattgaaggttatgttgttagtaatttaaagatctcctgtgttttgatgtaaaaacactattttttagcagcagtcaaagggcttaagtagtatgactttttgtgtaacttggattgtgcaattgcttttaaaaatgaaactatttctcatttataatgagataatggaactcagtgtatcggaagagcagactgaacacacacttctacctcctttctccccgcaaaccctacagaagtgacaaaaaagacacatatcacaggggagtgaaacccagcagtactcagactgtgaagcagaaaaactgtggagggaagtggaggagttgattcatttttttagtataaaaaataaatgatgagtgtattgtggatacaataaagtagagaaaaccacagcacacaacacccccaggaaaggggactggtggaagtgggagtcttagagagcccccaagctcaaagtagcagatacagagagtggggcaataatcaggaaggttttctaaagtgctgtttggcaatggtcctcaaacttgagcatgcatcaaaattaccaggagggcttgttaaaacacatattacagattgctgggcccagtcacaaagtttccagtgtagggtccaagaatttgtatttctgatatgtttccaggtgatactgatgctgctggtctgggtactacactttgtgagcaacattttaagaacatgaaacacctggaccagtcccccatctaaggccatgccagcctatgagaataaaaaaaatgcacctctgtagtcccagctacttgggaggctgaggagggaggattgcttgagcctgggaagttgaggctgcagggagccgtgactgcactactgcattccagtctgggtgacagaatgagacactgtctcaaagaaaaacgaaaaaaaagcaccttcctctttactaatggattataaaaagatgccgtccggacacagcaaccctaagcttggtatgcagagtttaggctgaagccccatgctgttgtgcagtgcataaactgtacagatacaagcccgcgcccaccttcaaattttgtgtacacttacagacacggggctagggtttcctgatggtgccaaagagagaagcagaacagaaattgaagtaaaccgagacttctgtaacagacctaaagaaaaagaaataggaaaggcagttcttcctaggaggaaaatacaacaaagtattgtactggtaggttatgtagttccttactttggtattttcaggtacctcagttcaatatttattcattaccataagaaagaccagaggaaatggaggagagaaaataataaaaaagaacagaaaaaaaaaattccaaaactaatgaaaaccagggggcttcagatggaaagggcccatagtgccaagcatgatgaatgaatgtggatactttttgtttttttttaatgacagtctcgctctgtcgcccaggctggagtgcaatggtgtgatctccgctcactgcaaccgctgcctcctaggttcaaacgattctcctgccttagcctcctgagtagctgggattacaggcacgagacaacgcgcccagataatttttgtatttttagtagagacgggttttcaccatgttggttagcctgatcttaaactcctgacatcgtgatccgcctgcctcggcctcccaaagtgctggaattataggtgtgagccaccccacccagcaaaaaattcagaattctaaagataatgagaaaattataaaagcttccagagagaaaaagtaagctattttaggggaatgagatccagatcagcacagaagttctcattaggaatactggatattttataacctaaaatttgtcaaatatgacagcaaaatgaaatttggaaatgcaaggactcagaatgtttatcttttgactgcccttttgaaatgaaattactagggaatatgctttaaaaaaatgaaaaaagaatccacaaaagggaaatcataagacctaataaaaaaactgtcacaccagagcagagagaaaaatgcaaaaaatcctacgatgcaacaagcccagaaaatgtttgttccacatgagaaatcagatagtttcataaagaatgccttcaacaacaaaatggtttcttttaacaattgtataacctcatctaaatggtgggaatttaacaaatacagtttaaagttgataaatcaagtaataagagtaataatgaatttgtgtattaacaaaagaaaatttgccttttttcctcgggcttttgaagaattttaagattcattctaattattgagaccaattatgtgccagacactaaaataaatgaagttctagggtgtttttctcccatccttgttggcccatagttttgactgcatataacaggagatggcatgcacagcccacagaccataaattttgttttaacacagccgctttattcatttatatattgtctgtggctgcttttgcactgcagtacagagctgagaagttgcagccagaaagtagagcctgcaaaccgaaaatatttactatctactccttgagaagaaagtttgtcaatacccaatataaagcattaacatgtttcccaaagtcgtaactatacaaaaaggtataatctgaaaaatgtcatattctttgatattccttctatcccatttccaaccccacccttgttttttggtttatctttcctgtgtttctttttataaaaataagcaggtatgcacgttttattttgcctttttcttatacaaaaggtggcatactatgtgtgctcttttatgctttttttcatttaacactaccttcttgaagtcattccatatcaatttatagagatatttctcattattacagctgcatagtactgtattttgtatatatactacagtctgttcaactagttttctatgattggacatctaggtggtttccagtattttgcaatttcaactattaccacaataaataactctgtgtgtgtgtgtgtatgtatgtatgtatgtgtgtgttatgtaattgaaattgtgtcttgaggatcaatacctagaagtaagaatgctgggtcaaagggttaatgtgtgtgtgtatgtgtgtgttagatattgccaaatcccatccataaggtttgtactatttttcattcccaccagaaatgtatgaaggtagcaatttctccatgacggccactgtccaaattttgccaagtaatgacattaaaatattcttctcatctattatcaccatcatttaaaaaagaatttctcccattttaataaaggaaaaaggacaaatcagaaaaaaaggataagaagagccctttaaattgtataaatatagttcttgttgtgattatttttcttttcttgctgaagacaaatgcatctctaccctgtatcagacgaatctttatttgatcatgtctcccctaccttgaaattcttgaggactttccacagcttctcagcacttaacgtggtcttaacatggcatataagtacgtgtaagatgttagccctatttctccagccactttgaatgttttaattctttcagtatccaaattctctcccacagggcctttgcctgtggtgcttgccttgccaccattaagtaactagacaagtaaaaacaaagaatctgggttcagccaggtgcagtggcctgcacctgtagtcccagctgcttgagaggctgaggtgggaagattgcttgagcccaggtattcaagtccagcctgggcaatatagcaagacctcatctttctattaaaacaaacaaacaaacaaacagggttcttaccctggcgctacattaatttgttatgtgacattgtgtctgttgtttagtcttacagttcctcagtttccccagcctaaggtgtagttacatcagatgaccatcaggccctttctgttctaagttgtgaatgttccagaagccattttgataggacgataatggaacctagcacatttaccccatggctattaactgtaacgctgctgtaagtatacaacacataattgtttcttacaattatttatttttaaaaatcacttgaaatctattatgagtaaaccaagttttgagaaaactgattattaaatttttgaattataccccttctggggctctatcttttgaattctgtttttaacactgcttttccaatgaaagaggtaattttctacccttttaagaggttattgtagtaaatcttttgggagcaggaagacaggaaggtaggagaggcttaacactatcattttaaggtaataaaaaagagagagaagtttgcctggtgttaatctcctgttcatttattatctgatctgttgccttgtttaattgacattctttgtacttttataaaactgtctgacatcaagtaaaaatgataaagagaaaatagaaatttgagaattagagattttaggagttatgtacatgctgatctctggaaaatattgctaaataagtaatgctgttgatcattaagtactctggtcggtttagatattaatgtgtgttctacattcttaagtttgttcattagtcctttttaatttgtaatttatttcttagaagccatgttataaatgggtaattcagttttcaggaaagccccaaaaagctttttaaaaagtttgtttttggagtctttaagatttcatccctgcctaagcactgtttataaaattgtttctacacaaaaatttattcacaactaagaacatttgtgacatccagagttggactggcatttaggcacgaaaaaagtttaggtgctggaaggtagtgatgcttcttcttggaaatagtaatttaatatattgacaaaggacaaaatacttggttcatcaggtgtccaaaattgtaggaccaaaaagcaattgcttcagattcttgataactatgtaccattcatgaaccaaatgtttctcggatgggaatatgaagtttgctccattttctattttatatttctcaatttagtgactaatttctttaaataccaatatctataattaagatttctatttccaatttacttttcagcattttgaatgtagaatattaaggttcattgatagctccttaagtagtgtcttcagtttaattttctgtgaatataatatatataatacatatatttttatgctttttaaaataaactaggtacttgatattttctcagtaaagatgatttctaagttcagaaattattaggatgctggaaagccatttttccacacctgaaaaattttctcagcttactgtgttcctttgaagggagttaatgtgggaaggaagattagtcaaatcatctaccgttttatgaaaatgttaataacagtgggcacagtttttataggggggcttagtgctatcattttcaggtaatcaaaagtaaaatcatcagagttctaatattaatataggtttttctgaataaagggggaagggaagagaaaaccctcagaatatatgacttaccacaaagtacaacactagcaaaggaaaataaattttgttctggtacactttttttccatagttctagatgagaaaaccatgtttgttatctgttatgtattgctttatgaagaatcttacaaaacttttgattcatttatcttcctgttgacaagagacaccaaaaagtttctttatgaacatagtaataacaactatttaatgactgttttatttgcattttaaagttatattcatgttttatgatcttgccttaagttgagatctttaagctgaggagagttctgagaaatctcaaagttatacaattctccacccctttcccccagatcagtagattggtagttgcttctcaactcagtatgtttaagaaagagtgtatttttatttactgaagtgtaatatcaaataaaggaatttcaggtcaatggaagaaaacacatttatattatgtatatatttctcttgggatataaaggaccatggttagtatcttcactagttttttgggttttttttcttttctcttttttttttttttttgagataggatcttgctctgttgtccatgctggagtacagtggtgtgatcatatctcactctaacttggaactcctgggctgaaggcattaaagatgtattttgctttaggtttatctaaaggaaaccatggatccctaaagaaaaccccccactgttattttattgaaaatgggtttacctgtctagcaaatgattgtgatttttctgaaatcattacacctcaaacccagagaacagcaaaaatcaaatttatgtcttaaaagagttttttgtccaagttgtattgaggacttgaaagattaagacagtagaaatcagataggttggatgctgaatttaattacatgtccttttccttaaatagaaggcattcttttttagttaactttggagaactgcttgatttttttttttttttttttttttttttttgagatggagtctcgctctgtcgcccggctggagtgcagtggcgagatcttggctcactgcaacctctgactcctgggttcaagcgattctcctgcctctgcctcccgagtagctgggactacaggcatgtgccaccacacccagctaatttttgtatttttagtagagacggggtttcaccatgttggccaggagggtcttgatctcttgaccttatgatccacccgcctcagccacccaaagtgctaggattacaggtgtgaaccaccgtgcccggcctgaatttttttaaaaaaggaatatgttggataataaaaaagttttagtgtacttggtactttttttctaaagtatacctcagagccagacctattttatgtttagtgaaatgaaaatatagttttgtttagttatttggccttgtagttttgttactttataatgtaaggaactgtgtccttaattaatcattttgacgtacaataacatcttgcctacttgaaataatgttttgaacttcccaatatttggcttaaaatggccagaagagtgaaggaaaagaaaatatttacagtcatgcatcacgtaatagcattttggtcaatgaccgcataaacgatggtggtctcataagattatcatactatatttttactgtaccttttctgtgttgagatgtatttagatacacaagtaccattattttacagttgcctacagtattctttgcagtagcatgctgtataggtttgtagcctagaagcagtagggtgtaccatataagcctaggtgtgtaatagtgtataccttctagagttgtgtaagtacacactgtgatgtttgcacgacataattacctaagcaagcatcataagcaacacgtgacagtatattactttctaaatgccaagtactatatttcactatctctgatgtttctccgacctaacatacttaaaacataagttcttgactgtgatgtaagtgcacctttaaaatgtacctctggtagtattttatttttttgctaagtaaaaacttagcaaaatgacattttattagttttctccctctcaatttttgtggcatatatcattttgaaattgggtgcattatatacagaaaatcaaaatagtaacttcaaagcataccatatagatagcatctgctttctacaaattgcctacacagaccaaactcccaaaatgttatcaatgtgttactgctcaagatcttccaacaatgttaatatgtcatcatttctacagaagactacgtttttagttatacatatattttaaaatactcccaaaacatttatttcaaattactcttctttctcatttgttaatcatagtttaagaaatatgattagtagttttaattcaaaataaaaatggtatgttgaataaaatattacataaacataaattagtataaaataatttagtaaattaaatcatttaatataaaaaggaattcaaagacattacagattggcaccacataatttaagtcagtcacttttagacactaaataactttaagagattttttttaatgaaggaacaaatcaaaatggctcagaaaaatcagatggagtggatacacaaataaaatacatgttaatgcttaacacattgaatacaaattttctttatactaaagactttaaaatgtccatgtgttaatttcttttggaggtggaaaaatagtttgtccaaaaagacacttttcacagttgaaggaacttgaaagttctgtcccagtgagtcctaatggttttatttcaggcagcagattcattgtcaaatatcttactttttaaggtctgtaggttatgctgaataaaattctctgcaccatgaacttcagagaatctgaagtcacttctcctgacagaccagtttttcatttttattgaattctgaattgtgtccgatgtaaagtagtaaactatagggtcaaaacaacagttggaaacagcaatacagagagtgattgggtacattgtccttactgctgccactactgagcaattaacaaatgtttgtgttctcacaagagaatataaaataagattgatattgtaaggaacaaaacagaaacagaatatgatcaaatgtacaaaaatcatttttaaaaccttagttttgtttattttgcttctacttaatgtaacaggtttggttaaagtttttagcaccatactagaacaagttacatttaaaattagaggaataaaaaatcccactatttcgatgaaaattacaatccttgagagatatgttttccatgtggcttctggaaaattttcaaagcaggcttctgaggcattgttaccctgagagtgggtagactgaacaaaaacggcgggtgcacttcctccgatcacagttaaccacacgccagtgcaaacaatctttgcatttcttttggttcttagagtctttgacttaaatgggtagacaattgccagaaatcgatctacactaatacaggttaagaacagaatgcttccgtacatgttggtataaaacagcatcacagaaatcttacaaagtaaatctccaaatggccaattccgtgttgtgaagtaaaaaatcctgaagggtaaagtaaaaacaaaaagcaagtctgacattgccaagttaatcatgtaagttgtagtttcatttcggactttgaggacgcagatgaaaatgtatatggcaacacaattggatattaacccaagcacaaacaccatgctgaacatgcacccatacaaagtgtacttaaaggagtcattatagaagcagtgggagctgttaacgcttaccatcgtaaaggcacgtccaattttcagtttggaagcactttcatcagctgcagtctcctttgggattcagattataacctctataacctccaatttatttgcaaattatctggatctttggatggttttataaatatttcctttttctcagaaatacccaaaagaaacatgaaatttgttgctgtaaaatttccgctgggttcttcaacaggaaaatattttcatttgttagtctttagaaaatccatgaattccaaggctcagttaactgacgagcaacctttaaaaaatacagtcaacgagtccaacccataggattataaatttaaagaaaagctgtgatctgtgaccagaatgaaaccacttgtcttctaaacttgtatttcagtagtcaagatgaatactccaaagttaatgtttctttatgcctcagaatgttaagcttaagttatcaatcttattttcttttcagtgcagagtttcagagacttaaacattcccaatttgtcccattttacttcttgcttcttttaaatgaagttttccttttttgttttcctgcagtggatcccagattgtgggtaagcagaagagtcttttaaagattccgaaataaactcccaagcttgttagctcttgttgaattgaggccttttcctcagttgccagttgtatcttgaggtcgctttctctgaagtgaaaaagaaaggcttcctagatttgtaatatgacatcacaggaagaagaggctgggtttggacaaagaaactttcagcccagtttgtttgcacttcctttaatctgataatgtgtctgctgggaatatacctaggaggcttgcaaatggtcactggctgttgaactgcgtggtctgctcattaactctttttatgtggaaatgccttctgcggtgctggcaacctctcagagttgttttgatttgtttcagtagtaataattgaaagaaaaaaatcactattcagcctgttctcttattcgattgttttcgtgtttgggatatgacaatttagaaaagaaaatgtgtatgggtgtgtatttataaattgaaattgttagtgatatcttaacatagcatttcaaagaactgtttaatgactatgaaacaggggcctttaacctttaaggtataacaagcatttgactcttggtttctgaaaaatactcaatatttaattgttatcattatgagtagctcttatcctgggtctcattagtttttgataagcaattttctaacattctttcctctttcctatgcagttgtattaatattttagagctgtttaaatttttaaattactcatttctccaaaagaacaaactcaagaatgtttatctttggtgtggtgttaattttactttctaagcacaaaatgaaattgcatctttttaagcaaaatttttttaaccttaaattgattgaaataaggtttagagaataaaaatcctactacttggcaaaattttaggttcatagtcttatcttccttcttcctcccagctcttcccttaaccccttaatatgacattaactatatattgaaatatatttcagattttgtctccatctaaaagtttctatgaatggtttatatgtttatatttaaagtatactcatattttgggccaggtgcagtggctcacgcctataatcccagcactttggaaggccgaggcaggtggatcacctgagatcaggagtttgagagcagcctggccaaaatggcgaaaccccatctctaccaaaaatacaaaactagcctagggcaatagtgcgtgcctgtagtcccagctacccaggagactgaggcaggagaatcgcttgaacctgggaggcagatgttgcagtgaaccaagatcaagccactgcactccagcctgggcgacagcgagactatctcaaaaaaaaaaaaaaaaagtatacttatattttaaagactccaaaatcagaagaagaaagtgtgtgtaaggtgagggtacttaaatgtaggtgttatttcctcaaagattgaggatatcacaacctctatggcacatgtttttcttgttttaaatatcattttcttcagaaaaggctagatctagttatgccttactgttattatttttttaatttggtctagtttaagctgaaactcttcctcttgggtattaagtaatttaagaacaatttatttttttctcataaattacttagctagcttaaaaataacttattacagtaaaatgttttgtgttgttttgcaccattctttcacactcagcaatttttgtcatttgttgatgaactataatctatttctactgtctggactagaaaattcatctattatcaaatgacaaaaaaagatgagtattacttataaccaatacttaaaattttgaagggttgaatatcttttatatcacatttggtatagaaaagatgtatgtgtgtgttcttattagaaggctggtagaagctgagtgagcattaatgaaaaaaggagtggttaataagcttgtattctcattggaaaaaattttctgttagtagttatgtcttactgttattttttttttatttggttcagtatgttttaaaaaaacaaaatcttagtaatcttctttcaaattgatagtctcctctttagtcatctttaattaatgaaatatatgcagttgtatatgctgatctcatcctacttttactttcattttgaatatggcggcattttctcattcaaataattaaaatttattaattctacttggaatatttttctacatattgtcattactcacttgacttgttattcacttaagtcattcatctatagttttttcttttcttttctttttctttttctttctttcttttttttttctcactctgccgcccaggctggagtgcagtggtgcgatcttgtcttactgcaacctctgcctcccaggttccagcaattttcccacctcagcctcccgagtagctgggattatgggcacccgccaccacacccagctaatttttgtatttttagtagagatagggttttaccatgtggccaggctggtcttgaactcctgacctcaagtcatccacccacttcagcctccccaagtgctgggattccatgtgtgagccaccgtgcccggcctgttcatttatagttttttaatgtttgagttactggggcttaaaaatggatagatcactatttgttgaattaggcttttcattattatcagtatcatagtaaatgtttgtataattcttaccacaattcttggttctttgtagatgattctcacatgtttgctgatgaatgaatcataaacttgaattttgttgccagttgtttctactgaggaagagccatagcagagggactgtttgaacaggaagaagataattgaatactgcattttttccagatattaaatttggcctctaattaaggaaccaaaggggaatttagaaactttgaaaaattcttaggttagaattggaaaaatacagagtaactacttgcaaagggaggtaatgaatccatataatcaattatatttaatagatacttttgtatttgataaactcaggcaaactgttattttaatgtgagatctctacacttctggaacttaactctgagaatcaacttatttcttatatggattttttggggggagcgaaaattaaacagagccagatagatgttaaaatggtgaacacaggaacagctggagtctgcagctcccagcgaaatcaacgcagaaggtgggtgatttctctatttccaactgaggtacccagctcatctcattgagactggtcagacagggggtgcagcccatggaaggcgagccaaagcagggtggggcatcgccttacacgggaagtgcaaggggccagggaacttcctcccctagctaagggaagccatgagggaatgtgccacgaggaacgatgcattccggcccagactctatgccttttccgtgatcttcacaacccttagaccaggcaattccctcgggtgcctacaccacccaggccctgggtttcaagcacaaaactgggcagccgtttgggcagacaccgagctagctgcaggattttttctttttcgtactccagtggcacctgaaacaccagtgagacagaactgttaactcccctggaacaggggctgaagccagggagccaagtggtctagctcagtggatcccacccccacagagcccagcaagctaagatccactggcttgaaactcttactgccagcacaggagtctgaagtcgacctgggatgctggagcttggtgggaggaggggcttctgccattactgaggcttgagtaggtggttttcacctcacagtgtaagcaaagccaccgggaagtttgaactgggtggagcccactgtagcccaactgcttctctagagtcctcctctctgggcagggcatctctgaaaaaaaggcagcagccccagtcaggggcttatagataaaactgccatctccctgggacagagcacctgggggaagggtgctatgggtggctattggtgcagcttcagcagacttaaacgttcctgcctgctggctctgaagagagcagcagatctcccaggacattgctcgagctctgctaagggacagactgcctcctcaagtgggtctctgacccccatgtctcctgactgggaaacacctcccagcaggaatcgacagacaactcacacaggagagctccagctgccgtctggtgggtgcccctctgggacaaagcttccagaggaaggaacaggcagcaatctttgttgttctgcaacctctgctggtgatatccagacaaacagggtctggagtggacctccagcaaattccagcagacctgcagcagaggggcctgactgttagaaggagaactaacaaacagaaatgaatagcatcaatatcaacaaaaaggacttccacacagaaaccccatttgaaggtcaccaacatcgaagaccaaaggtagataaatccatgaagatgaggaaaaaccagcgcaaaaaggctgacaattccaaaaaccagaatgccttttctcttccaaagaatcacaactcctcgccagcaagggaacaaaactggacagagaataataaactcctccaagccaaaggaccatgttctaacccaatgcaaggaagctaaaaaccttgaaaaaaggttagaggaattgctacctaaaataagcagtttagagaagaacataaatgacctgatggagctgaaaaacacagcacaagaacttcgtgaagcatacacaagtatcaacagccaaagcagaagaaaggatatcagagattgaagatcacctttatgaaataaagtgtgaagacaagattagaggaaaaagaatgaaaagaaacgaacaaagcctccaagaaataggggactatgtgaaaagaccaaacctatgtttgattgtccctgtacctgaaagtgacagggagaattgaaccaagttggaaaacactcttcaggatattatccaggagaatttccccaacctagcacgacaggccaacattccaattcaggaaatacagagaacaccacaaagatactcctcaagaagagcaaccccaagacacataatcgtcagattcaccaaggttgaaatgaaggaaaaaatgttaaaagcagccagagagaaaggtcgggttacctacaaagggaagcccatcagactaatagtggatctctctgcagaaaccctacaggccagaaaagagtgggggccaatattcaacattcttaaagaaaggaattttcaacccagaattttgtatccagccaaactaagcttcataagtgaatgagaaataaaatccttcacagataagcaaatgttgagagattttgtcaccaccaggcctgcattacaagagctcctgaaggaagcactaaatatggaaaggaaaaattggtcccagccactgcaaaaacataccaaattgtaaagaccattgacactatgaagaaactaatgggcatcaactaatgggcaaactaactggctagcatcataatgacaggatcagattcacatataacaatattaaccttaaaagtaaacgggctaagtgccacaattaaaagacacagactggcaagttggataaagagtcaagacccatcagtgtgctgtattcaggagactcatctcacatgcaaagacacgtgctctaaataagggaatggaggaagatttaccaagcaaatggaaagcaaaaaaaaaaaaaagcaggggttgcaatcctagtctctgataaaacagactttaaaccaacgaagatcaaaaaagacaagaagggcattacataatggtaaagggatcaatgcaacaagaagagctaactatcctaagtatgtatgcacccaatacaggagcacccagattcataaagcaagtccttggagacctacaaagagacttagactcccacacaataatagtgggagactttaacaccccactgtcaatatttgacagatcaatgagacagaaaattaacaaggatattcaggacttgaactcagctctgcaccaagcagacctaatagacatctacagaactctccaccccaaatcaacagaatagacattcttcttagcaccacatcacacttattctaaaactaaccacatgattgggagtaaaacactcctcaacaaatgcaaaacaatggaaatcataacacagtctctgagacctcagtgcaatcaaattagaactcaggattaagaaactcactcaaacctgcacaactgcatggaaactgaacaacctgttcctgaatgaatactgggaaaataatgaaattaaggcagaaacaaagaagttctttgaaaccaatgagaaccaagacacaacatacccaaatctctgggacacagctaaagcaatgtttagagggaagtttatagcactaaatgcccacaggagaaagcagaaaagatgtaaaattgacaccctaacatcacaattaaaagaactagagaagcaagagcaaactaattcaaaagctagcagaagataagaaataaccaaggtcagagaagaactgaaggagagagaaacacgaaaaacccttcaaaaaatcaatgaatccaggagctggttttttgaaaagattaacaaaatagatagaccactagccaggctaataaagaagaaaagagagaagaatcaaatagacacaataaaaaaatgctaaaggggatatcaccactgatcccacagaaatacaaactaccatcagagaatactgtaaacatctctatgcaaataatctagaaaatctagaagaaatggataaattcctggacacatacaccctcccaagagtaaaccaggaagaagtcgaatccctgaatagaccaataacaagttctgaaattgaggcagtaattaatagcgtaccaaccaaaaaaatcccaggagcagatggattcacagctgaattctgccagaggtacaaggaggagctggtactattccttctgaaactattccaagcaatagaagaaaagagagtcctccttaactcattttataagccaagaatcatcctgataccataacctgccagagacacaacaaaaaaagaaaatttcggccaatatccttgatgaatatcgacgtgaaaaccctcaataaaatactggcaaactgaatccatagcacatcaaaaagcttatccaccacaaacaagtcggcttcatccctgggatgcaaggctggttcaacatatgcaaatcaataaacgtaatccatcacataaacagaaccaaagataaaaaccacatgattatgtcaatagatgcagaaaaggccattgatgaaattcaacactgcttcatgctaaaaactctcaataaacttcatattgatggaatgtatctcaaaataataagagctatttatggcagacccacagccaatatcatactgaatcagcaaaagctggaagcattccctttgaaaactggcacaagacaaggatgccctctctcaccactcctattcaacatagtattggaagttctgttcagggcagttagaaaagaggaagaaataaagcgtattcaagtaggaagagaggaaattaaattgtctctgtttgcagagacaatgattgtctatttagaaaaccccattatctcagcccaaaatctccttaagctgataagcaacttcagcaaagtctcaggatacaaaattaatgtgcagaaatcacaagtattcctatacaacaataatagacaaacagagagccaaatcatgagtgaactcccattcacaaatgctacaaagagaataaaatacctaggcatacaacacacaagggatgtgaaggacatcttcaagaactacaaacttcactgctcaaggaaataaagaggacacaaacaaatggaagaacattccatgttcatggataggaagaatcaatcttgtgaaaatggccataccactcaaagtaatttatagattcaatgctatccctatcgagctaccattgacttcctttataaaattagaaaaaactactttaaatttcatatggaaccaaaaaagcccatatagccaagacaatcctaagcaaaaagaagaaagctggaggcatcatgctacctgacttcaaactatactacaaggctacaataaccaaaacagcatggtattggtaccaaaacagatatattgaccaatggaacagaagagaggcctcagaaataatgccacacatctacaaccatctcatctttgacaaagatgagacaaaggattccgtttaataaatggtgttgggaaaactggctagccatgtgcagaaaactgaaactggacccctttcttacaccttatacaaaaattaactcaagatggattaaagagttaaatgtaagacctaaagccatgaaaaccctagaagaaaacctaggcaataccattcaggacataggcatgggcaaagacttcctgaccaaaacaccaaaagcaatggtaacaaaagccaaaattgacaaatgggatctaattaaactaaagagcttctgcacagcaaaagaaactatcatcagagtgaacaggcaacctacagaatgggagaaaatttttgcgatctatccatctgacaaagggctaaagtccagaatctacaaggaacttaaacaaatttacaggaaaaaagcaaacaactccatcaaaaagtgggtgaaggatatgaactgacacttctcaaaagaagacatttatgtggccaacaagcatatgaacaaaagctcatcatcagcggtcattaatgaaatgcaaatcaaaaccacaatgagataccatctcatggccgttagaatggcgattattaaaacgtcaggaaacaacagatgctggagaggatgtggagaataggaatgcttttacactgttggtgggagtgtaaattagttcaaccattgtggaagacagtgtggcgattcctcaaggatctagaaccagaaataccatttgacccagcaagcccattactgggtatatacccaaaggattataaataattctaatataaagacacatgcacacatatgcttattgcagcagtatttacaatagcaaagacttggaacccacccaaatgcgcatcaatgatagacaggataaagaaaatgtggcacatatataccatcgaatactatgcagccatgaacaaggatgagttcatgtcctttgcagggacatggatgaagctggaaaccatcactttcagcaaactaacacaggaacagaaaaccaaacaccgcatgttctcactcataagtgggaactgaacaatgagaacacatggacacagggaggggaacatcacacatcggggcctgtcggggttgggggttagaggagggatagcattaagagaaatacttaacatagatgatgggttgatgggtgcagcaaaccaccatggcacgtgtatacctatgtaacaaacctgcacgttctgcacatgtatcccaatacttaaagtataatacttttaaaaaatggtgaagacaagcctttttttaggactgttgccataatgaccttgtagactgatttgaaatatagtgtatcagctttggcaacatagggaaaccctgtctccataaaaaatttaaaaattacctgggtgtggtgatgtcaacctgtggtcccagctggttgggaggctgaagtgggaggattgtttgagcctaggaggttgagactgcagtgagctttgattgtaccactgcacttcagcctggtgacagatcaagaccttgtctaaaaaaaaaacaaaaaggaaagaatatagcctacatatacaaccaattcaaaatatagtgaatcttggccaggatctgtggttcacacctataatcccaacactttgggaggctgagatgagaggatcacttgagaccaggatttcaagaccagcctaggcaacatagtgacaccctgtttccaaaaattagccaagtgtggtggtgggcacctgtagtcctggttactagggaggctgaggtgggtggatcacttgggcccgggagattgaggctgcattgagctatgattgtaccattttactccatcctgagtgacagagagaggcctgttctcaaataaataagtaaataaataaaaagaatgaaatatagtgaatttcattatgtaatgcatcggtttttaaaatttaatgacatctgattctgattctttgaatactttcactgcttaagctgctgggttgggtttttgtttttgtttttgtttttgtgtttttgagacggagtcttgctctgtcatccaggctggagtgcagtggcgcgatctcggctcactgcaacctccgcaggttgggttttttcactctcaggtataatagatcaaggagtcaccttacactctttatgtttaaggatttctgatttttgaaacaggttgcacaagaaacatgtataagattaaatattctgtaaaaggcttccctttatgtttcaatagcattcttctttaaaagacctatttttttccacaataagacaccgtgttcttttactataaaattgatcaaagaggaatcgattaaaactttaaagaattctctcattaaaagtttcgaaggccataattgaaattgtacataacattgagaacaggggatatgcaaaaagaaaaaagaaaaaaatcaaatgagagagtatgtgagacttaaaacagaaataaattgatttaagttcaaaagaaagtgtgagccaggcatagtggtacactcctgtagtcgaagctactctagaggctgagacaagaggatcacttaaggccataggagtttggggcttcattgctctttgatgacacctatgaatagccacagcactccagcctgggcaacataacgagacactgtctcttgaagaaagaaagaaaaaagtatgggacattgatattttaaaatttaaaaagaattattctaaacttacttcagtcattttgcatgcagcaaatgtttgccatggtgaaatgtgacttccatctcttaatttacacttatgcaaaaagcagttttctcatttgggattcttttgatgctcattatgataaaattttctatttaggtatagaaacaaataaacctttttcaatttgagaaatgaacatttgtaatttatgttgacagaatatatttattttctataaaaatatcttttagcctaaggagaaaaaatcttaaattctagactagtattaccataagtctatcggtatcatttcgaagtgatttaccttcctttcattattgtaaacacttaatactttatgttactttttaccggaatgtgagtcatctacccaagttcaaagagttgaaccaacttttatagagttggatgggagtagaagaggaaagatttaaagggtgatgaatgatgattagagcaaagtaaaagttgatgggaatgatggttgaagcaggttcaaacaagtagggaaaggaaatcaagaggagtgaaaatgttattgtggtaagatttaaaacttgaataagcatatttatctgtgcatacacttgagttgtcccttcttccttatctttttttccgaactctcttgttgcttcttcatctccaactcttagaatcatatcacgtcttttctatggagtctccttaatctcatcagttccttttctgtacttccacagtacttagtttgccttttaagacatatacgtgcaattcaattaagaatgaaaaacaaggccatgtgtggtggctcatgcatgtaatcctagcactttgggaggccaaggcgggcagacctcttgaggtcaggagtttgaaaccagcctggccaacatggtgaaactctgtctctactaaaaatacaaaatgttatccaggtgtggtggctcacacctgtaatcccagctactcagaaggctaaggcaggagaatcacttgaacctgggaagcagaggttgcagtgacggagatcatgccactgcactccagcctgggtgacagagcaagactctgtctcaaaaaaaaagaaaaataaaagaatacaaaacaaagaaataattgcaatacaagatataacaacagctattagtaacacatagacatgagaatctacgaatttagtaaagagcttcttgaggagatgatgtgtaatgaaggctagcctttacagttgaatacaaattttaaatttcaggtcttgaaggctagagccattcctggtaataatgtcccattaatatagtcatgctgcctttctcatccaaaaacacagaaaactatttgagtgactattttctccattctctcaaggatgctatgtaacctagtcctactctgaattcctggaagatgttaattcttcacatacaatatatgccttgtggcataaaggctgaatttggtcataaaaccttagttgggtaaggctaggtgggttgtagctttcaaaaatttttcacctagtttagacgctgcaaagtgtaatgaaaggaccaatttcactaggtgttaagtgacttggattctaatccaagttactaaaaattaatgtgcgtctcctgagccccacctactcaggaggcagaggtaggaggatctcttgagcccaggaattccagtttagcctgggcaatatagagagtcctcaactcttaaaggaaaaaaaaaatgacatgaccttgagcaaataatttagcttctctattgtatatttgtaaaaggagagtattaaattagacctatagaattcttttcagctcttagctttctatctaattcagtctccccactaattttcaatgacaagaaagaacatatattattgtttcaattttacagaccaagaaactaaaattcagagaagttgtgacttgcttaggattacaaagtgattattggtggagaatgacgaagtcaaaactaaaaactgggtcctcacaagaagtacccaacccagttccttatacatgtttgtataatgaaagaatacaacttagtgagtgcatgcataaaggataatagaaagcactgtgacctagagatccagaatccttgatttctaaattttgaccttaccttgggcaaactctgccctgaactttaagatggatatgacatgcccttttgaccttatgaagagttttcagaataaaatgaaatgaaaacatattctgaatgtaaacctctaaaaagatactattatagatgacatcacctataatatcttaactttatagaaataaaggttatgttgtgggaaatcatggaacaataagatttgttttgttttcttgaccagataggatgcctgtgctctgtcagataaagaagtgatcatgtgatgcatttggtatgccttttttagcactgctaatgtacagccaatttaaatcaaatagacataggctttgcttataaaaaccacatatatttctaagttagtttgcttggtggttaacacattgcatattgcattagtcttaatatcctctaatgttggagctagcactggatcctagaaattcagaataaaagtccaccttacccctgttacaactagccattcatcttctttggtatatagtttagctctccttccagtcactcaagtacaacttaggaaactaaaaccatagctgattattgctggagcaggaactcgaatcctagtttcttgacttctagtcaaatgttctcgtagtaacaggtagctttcaccctttttttcttactgatgttgtgctagttcgttcttgcattgctgtaaagaaatacctgagactgggtaatttgtaaagaaaagagtagggtttagttggctcacggttcttcaggctgtacaggaagcatggcatcagcttctcctcagcttctggtgagtcctgaggaagtttatattaatggcagaagtcggaggggaaacaggcatgtcacgtggtgacaataggagcaagaggaaggaggaggtcccatgccctttttaaacaagcagatctcttgtgaactaactgagcgagagctcggttatcaccaagggggtggtgctaaaccattcatgagggatccacccccctgatgtagtcatcttctaccaaacctcacctccagcattggggagcacacttcaacacgagtcatctaccaaacctcacctccagcattggggagcacacttcaacacgagtcatcttctaccaaacctcacctccagcattggggagcacacttcaacacgagtcatcttctaccaaacctcacctccagcattggggagcacacttcaacacgagtcatcttctaccaaacctcacctccagcattggggagcacacttcaacacgagtcatcttctaccaaacctcacctccagcattggggagcacacttcaacacgagtcatcttctaccaaacctcacctccagcattggggagcacacttcaacacgagtcatcttctaccaaacctcacctccagcattggggagcacacttcaacacgagtcatcttctaccaaacctcacctccagcattggggagcacacttcaacacgagtcatcttctaccaaacctctcctccagcactggggagcacacttcaacacgagtcatcttctaccaaacctcacctccagcattggggagcacacttcaacacgagtcatcttctaccaaacctcacctccagcattggggagcacacttcaacacgagtcatcttctaccaaacctcacctccagcactggggagcacacttcaacacgagtcatcttctaccaaacctcacctccagcactggggagcacacttcaacacgagtcatcttctaccaaacctcacctccagcactggggagcacacttcaacacgagtcatcttctaccaaacctcacctccagcactggggagcacacttcaacacgagtcatcttctaccaaacctcacctccagcactggggagcacatttcaacacgagtcatcttctaccaaacctcacctccagcattggggagcacatttcaacacgagtcatcttctaccaaacctcacctccagcattggggagcacatttcaacacgagtcatcttctaccaaacctcacctccagcattggggagcacatttcaacacgagtcatcttctaccaaacctcacctccagcattggggagcacatttcaacacgagtcatcttctaccaaacctcacctccagcattggggagcacatttcaacacgagtcatcttctaccaaacctcacctccagcattggggagcacatttcaacacgagtcatcttctaccaaacctcacctccagcattggggagcacatttcaacacgagtcatcttctaccaaacctcacctccagcattggggagcacatttcaacacgagtcatcttctaccaaacctcacctccagcattggggatcacatttcaacacgagatttggaagggacaaacattgaaaccatatcagacataaaataggaaacttggtccatagcttaggtaaatattaagcaaagaactttgtctttaaatgagtaagctctgcagactttttaaaacactaaattctaacattatgatagaaatttaagattaagagattttagacattttcatccttctgtagattaaaatcgtatgatgaccatccttcatttttagcttcatctttatttatttaaaaagtttgcatttgtacatagtaatgtgccaagttttatacaaaagcaggaaatatctctgctgctttcaaataattagaacaagggttttctgtgaatagtaaatttaacaccttccagcatagattattatcagaaatccaagtactcttcagttaaagtaaacacttattgacttgtatcttttacctattactgaggggtagaagttaaaaaggattggtctctcaggatgctcctggaagctgcatgcttgtggctataaagctattctctgatatacctgaattcttttgctcccagtagtgaaattgtgtgtgtattaaaagtttaagcattgtttactccctgatttatatttgctgatttttcatattattgtaatgttataaaatggaagtgcaaaaaagggttgttttagtcaaaccaagttcggtgctttgaaatgactcagaggcaagttgcagaaaatattgtagacttagatgtagaaaagatatgagggggcaacgtaagaaactagaaaggattgctaggtgcagtgacacatgcctgtagtcccagctactctgtaggctgaggtgggaagatcactggagcccaggagttctgggctgtgcgctatgctgattaggtgtccacactaagttctgcatcaatatggtgacctcctgggagcaggggactaccaggttgcccaaggaggggcgaacccacccaggtcggaaagtagaaggattgtgtctctaggcctcagactcctttgcatttttctgtcctcaccctgcacatagtgaaaatcataaacccacattattggtgtggtttatagaagaaaaacaacttagaactaaaaaaaaaacaaaaaaccttgaccttacgtaaagagattttcaaatgaatacactttttgtgtttttaaaattaaaatgttatatggaattatatatattattttaaaatgatttcctgcttagctttttaaattaactggtgccaatctctcaaataagacaatttatgtaccagcagtaatcaactggaaaatgtaatgaaaaatattcaatttacagcaataacaaatagtacaaaataccttaggaataagcttaataggcaaagtgcaggatgtagatgaaaacaaagcaaaagactacaaaactttaataaaggccataagagaatacttgaacatgtgccaggcagtttttctgggacaaatctatacatttaatgccaatccagtaaaaatctcagtatgttttcagtgcatgtttttacaagtttgttcacctgtagatactgtgggttatatcacctagcagtttcatttctaagaaaaaaatcccctcctaatttgcattctccacaccttcacccaaaccagattattattagacttttaacaggtcaaagtagtatcttgtttagtttgcatttctttagttataaggagtccagaaataatcccatacccaggggaatttaatgtatgataatttatccacttcaaatcagtggagaaaattcaggataattcagtaaatgctcatgagttatcaggatagcaatttgaaaaaaagaggtagactttgatttattctttataccaaaataaattctagctagatcaataatctcaataaaaaatgactccatttaaaaaatgactccatataagttctggaaaaaaatgagcacgttagaaaaataacagtagaggccaggcactgtggctcatgcctataatcccagcactttgggaggcgagacaggtgggtcatctgaggtcaggagtttgacaccagcctagctaacgtggtgaaaccccgtctctactaaaaatacaaaaattagctgggcatggtggcacgtgcctgtagtcccagatactcggaaggctgaggcaggagaatggcttgaacccagggggcggaggttgcagtgagccgagattgtgccactgcactctagcctgggtgacagagtgagtctccatctcaaaaacaaaaaaacaaacaaacaaacaaaaaaaaaaaacagtagaggcctgctgtggctcacacctgtaatcccagcaaagaggctgaagcagaaggattgatttctggagcccaggagtttggggctgcagtaggccatgccactgtacttcagcctgggtgacagcccaactctaacaattaaaataaaataatatatttaaaaatagcagtagaggctttctaagtattatataaaatctagtgtttaaaaaaagataggtttgactaaataattttgttgcaagaacaacataaagtggaatgaaaacatcagtccatcatatgaatcatatgagttataacatttacagaatagttaaatgacaaattatggaaacaagtctgttagaacaaactaacaaaaaataacaacccattcaaaaaggtgggagatgcatctaaacaagcatatcattttgtccttaacttaaaagtggttctcagttttaggtacccaaatttaatatttgtattttttttaagttttggccttcaaaataaaaatgactatacatttgattagacttctttcttttctttttattatagatgattgatttttaaggactagtgctatgaacattaaagcaagtatgcttaaaaccaaaaacatattttgactttaggcatttatgcagataaatgtttcgctcttaacccacttggaattcaaagagactagctctttaacagatactgatactcaaaggtaaggaagaattattggtatgattctaagccactagtcatctattcccagagcaaaatttctgtggttacttttttttattggttttctagtgtgcttgctttaatcaactgttttcacatgtttggaaaatttgagggtttcctgtctatactagaagatacgagcactactccagaaaggttagaaacaaaagaccaaaggacggcttctacaaaaggccccctgttaaagcccagccgtttgttgttgttttagttaaacagaagtggactatttcaacctaaccgaaaaagattgctggatttttgccctggccatataaataggaaattaagacaggcatattaaaattttttcctgcttatgttgtcttcatctctgggtcaactgatacttatttttttttccagtagcaaaatatttattgagtgtaactgtgtaccaggtgcttttctaggtgctgggaatatagcagtgaataaaacaaaatccctgagcttatattttatttggagaagacaatcaataaataaacaattatacaactggtcatatggtgataagttctctgaagaaaaataatttaggaggaaaaagggggtgggcttttactgttctacatagggaggtcaaagaaggccttgctaataaggggacatttgaacagagacttgaaagaagtgaaggaatgaatcatgtggttgtctcagggaattaacctttaactgatcaacatctttaaaaggccttctccaatctgtatttccagctcacctcccagaaattcactcaccatgttcatgtccccaagatctttggggcaaatagaaatttctaaacagtatttcaacttggtaagattctacatttctgcttctgattcttatttttcatggcacctcataaaataggaatgcatgttttgtttttttgtttttttttttgggctacttgccagtgttctgaaactaaatacttctcggagagtagctgtctctcattaaagagccccagatcaacagttccatttcagtcacattccaccctgacttgtctcttctcaccattcggtgattaggttcatgtcttttactctttaatgctttggttagcatcctgtttacctcaagagactgaactttcttctcctgaatttaatttccctgatagcagggacatctgacagcctatgtcaactgtcttccttgacttctgtcaattatttgtcctaactatgcttgagtaagcgtacaggaatataaaattttatttccttggaataaaattttaatttataatataggagagatattactattaaggctcttgaaaagcaattataagagacagaataaaattaaaaggaaaaaagatagcataaccctacaactctaataaatctgctgtttatgattttccagatttaatttcagtctttgctattatgcttatatagttgaaatcagagaataatatctttaagatttggaatgggatactgctctttctttttatgtgctcttagataagaactctttctactgtgtcttataaactctgtcataccataagtttctcaaagtgattttaaccactgtacattttaaacaatatgagaaataaattaatttctgatatgaacatacatgtaagctactaaacctcagtattatgaaatatctaaaacgtgacttattagaaatagattcttttagacgttaatttttttttcaaaaagatacatatgtacttttctatttatgagtatacctgggtaaatatagaacataggaaaatgtactttgatgttttaaaacatttaaaattatttaaatataccactaactctaaattttaaaattatctttgattagaagcattaaaattcttatttaagatgtatactatttgaagaagagaattgggattctgttgccttgctttgtaacttaaaagagctttttcagggactccctcagagtacctgctggagatgaatctgtaaaaaatttttgttcagagaatttctgccactaaataagtcttaaataagtatgccacataggatagactgtatttaaatgaaaccattttttataacttacaccaaatattatgacaaaagcataattgtttcttgataaaactgttccactgttttatttgttttactgttaacaaaaatgcatttttttttttttacctttagtaggtatgcattgtattacaaaacaatgatatcttttggaaaactttcagttaaactagacaaataaggactttggcttattcagatttattccattcatcatctttgaattagtttcttcttgagaagaagcatatcttacaacttttgtctttattacctcaatatgttttatttatatgtatatacatatatactttttttcagatagggtcttgctatgttgcccaggctggtcttgaactcctggactcaagttattctcctgccttagcctcccaaagtgctgggattataggcatgagccactgtgcctggcctcaatatttatttaaaggttacaagaatatatgttcttaaaatgttgagaattaaaataaataatttctccaatcataatagctttgtattttattatattataaattgaaacattgaagttttaaaattcttcttcaatgagccaggcctggtggctcatgcctgtaatccttacactttgggaggctgaggcaggaggatcagttgaggccagtagtttgagaacggcctggacaacatagtgagaatctctctccatttaataaataaataaataaaattattcttcagtgaatctgtttttggattcagtcttgataataaaaacggagaaaaaaaattttaacagatagattatttcaatattgctctgtcagcaatatctggaaatagcattagtcatttttcttcaggtgcttttatccaacaagcctaagactcctaagattcccttccccattaggaagctccaggcaagcaagtgaaaccagcagaaggcacccagccacaaaaaacaccctggcccaggaagtctctttaaccctacagccgagactctttctcagcccaggaacaccaggcctgtagagagacactattcaggggtttccactatacaccattccaccaggcagcttgacctggtgaaaatgtgtaggtccatgtatccaccaccacaagcaattgcacccatatccctccagcctctctacccctgtccctaacacctggccactgctaatctgcccttcaattctcaaattttgtcatttcaaaaatgttatgtaagtggaatcaaacaggattagttttttttctcattcagtataattttctggagatccattcacgatattgcatgtatcaatagttcatacctttttattgctgactagtattttgtagcatgaatgtactacagtttctttggccagacacatgttgaagaatatcaggacaggttctagtttttggctatcacaaataaagctgctatgaacatttatgtttagtatcagtatgggttttcttttctctgggataaatgcctaatgagtaaaattgaagagttgtatggttattttgcattttctttgataaaagactgcaaaagtattttccagagtggttgaatcattttaaatttccgccagcaatatacgagtgagtgatccagtttctctgcattctttccatcatttggtgatgtctttattttttattttagtcattctgatagtgtaaggatatctcagtgaggttataatttgcatttcccatcaggatgatagctaatgatattgattaacctttccctgtttatttgtgacctgtatttcctctctggtgaaatttctcttcatgtctttgctcattttctgattggattgtttgttttttaccattgagttttgagggttctttatatgttctcaatactagtcttttttgttagatatgtggttagcaaatattttctcttggcctgtagcttctttcttcatcttcttcacatcatgtttctcatccaaaagtttttaattttcataaagtccagtttatcactttttccttttatggattatgcttttggtgtcaaatctaagaactccagatcctgaagattttcccttatacttaaaaaattatagtttcacattttaagtccatgatccattttaagtttatttttgtacaaagtttgagatttgggttgaggtttttttagggggtgctgagttgggcaccatggatgttcagttgtttcagcaccatttattttaaaggctatcctttttctattgatttgcttttgtatctttgtcaaaaagggaacaaagaaaagatgagacaaatagatgtagaatttaaactaattatattaataattgcattaaatgtcagtgctctaagcagcccaattaaaaggcagagattatcagagtggatgaaaaacaaaacccaactctatgctatctaaaagaaatctattgtaaatataaagacacgaatatgttaaaaggatgaatgaaaagattaggtcctggatggaactgaggttaactgaggataattttaagatttgtactatgggtgattaggtggttgataacacaattaaccaaagtaggtattgaaagaccatctcatagctggttggtgatgaaggaaatgagttcatgttaatgtttgaacctattatatttgagatgtttgccacatattcatgtggatatctttggtgtccagttggaaatatggatctagaacttgaaagcatagttttagtcagaaatgtagacttaggaataatatagatatagttaaaatcatgaggccaattgctgtggctcatgcttgtaatctcagcactttgagaggccaaggcaggcggatcacctgcggtcagaagttcgagaccagcctggccaacatggtgaaacctcatctctactaaaaatacaaaaattagctgagtatggtggcacatgcctgtaatcccagctactcgggaggctgaggcaggagaatcgcttgaacccgggagacggaggttgcagtgagccaagattgcaccactgcactccagcctgggtgacaagagcaagactctctcttaaaaaaaaaaatcatgatagtggctcagccagcatatgtattggcaagcagatctgcagaaatattagtattaaaggaccagcaaggtaaaatggaaaagatcttcagaaaggccaaggtctgccaaaattcttctattttctattctagtttcctcttgcgaggcaaaacagtcttagaatttagcttagggtggcacaaaaacatttcctgtaatgtagttctaataatattccttaaaatacccagaaaacaatagcaatttctgccttccacttcctctattgttaatttttctactagcactactgacttgtacttactttgataatcagaatctcttttaggagcaccttgacttaatagccttggagtcctttactttctagacaagttcatgcttgccttagaaatgtatgttagttatgaaaagtcatgtagaacagacttatagcttctactttttctatcaatattatttacccagtgaaatttatactaatcttgctgacagtgagagcctggtttccttcacaagactaagtagcaaaacagagtgaagcgttgttcagagagcaattaggctgacagttaatttgagtagataagtaataacatgagttgagtacaagagaaaactactgcccaagtcctggatagaaacaatgctttagaaagaaatatacatattttactttcaaaagttaagtattccatgaaatattttctttatagttaaaaaagatcaattgctatattaattatctgttagaacaactaacatttattatctcacacaaattctgaaagtcgggaaactgggagtggctttactgtgtgattttgactcatgtttcctcatgagagattcttaaattgtcaaccaaggctgcagctagtttaaggcttcactgggattggagagtctacttccaagttcactcgtgtggttgttggcaggcctcagttctttgctggctgatggccaggggcttcattttttttgccatgtgagcctctccgtagggctactccatagcagctccctgcctcaaccccagtggaagagatcctagagagggagagaacctaagatggaaactgcagatttttataaattcatctcagaagtgacatgccatcacttctgccctatgtcattggcccacagactaaccctggtacagtttaggaactgtctgcacaaggatataaatacccagtgtcagagattattggggtgatcttggaggctggctgccatagttatgacttagtgtcaattagaaaacaaatcctattatcagttttcttgtttgtgctttgctgtagttaatttgactcatgatatggctgcatcatatgtcaatattctagaaatatttaccaagtgtccattatatgcttggcactggaattttattttaagaactccctgaaagtcccatctgaaccctggtagtcacctgtctaaaatccttcagcgagtttatattttgctatttccttgctatgaaatctgtattttagcattatggaaagaaaaatttctgtctcaaaggcttgtgtgccaggtgcccttctaagcactttacatttattatctaacttagttgtcaaaacagccctatagtaagcattatttttcttatcttatagattagctgcatgaagtttccccagggccatattattttttcttctcttgcttctgagcacactattcttctgctttttacttaaaataatttgttctttctttaggattcaactcaagcataatctcttccaagaagttttctctaatgctcctaatctgagttagttgtctcttctgattttcatggcaccctgtgtattcttttattctggtacttagcactttgtattgctattttttatttacttatctgttttttttttcattagactgtaaactatagcataaaagttcaaaacaaaggctctgaaatcaaacagtttggaactgtgtcctggatccaccacttattcatgtgactggacaatttactccttgtctacctttcttcacttataaaatggcatttaaaaaataattaccttctttctagagtttgttgtgagaattaaataatataagtaatgtggttggtgctatgtctggcattcaataaatgttatctgttaagctctttgagggtagaattattgattgcttatcatgtgccatgtatcataccaaactttttatataggttattttattttcacaacaactctatgtagtgggtactactatgaatgtgctatttctcttagcatctctagatgaatggatcagtgaatgaatgatagatggaattgtggccagtggaactaattgtaggggtaaacagcaacctagaaacatggttaaaagcatgacaatgggcaaagaaagagtgaaagaggcagtaagcaaaggaacgtgactcccatactagtatagcagctaacggcacaagttttagaaacaggtagacttgggtttgaatcactgctccatcacttatcagccatataatatggggcaaaatttataatttctataaaatacacatatctactttatggacgtattttgaagattaaatgagataatatatgtaaaatatttagcatagaacctagcatatagtagatattcaataaatattaactagtactattattaaattaagataatcatgaagacagaattttggtagtgaggtagtgagagaaataaaatagaatcatgaagtataaggtaatgactttgaatcattaatcatagttatcgaaatcaggcatgatagaaagattacggttgttaatcttccttatagtgcaatatcctcaccagtccacacaacatttttgcccactgagtctgggataaagttaaaaattaatcctcataaactaaagttaatgaaatgttcagaatattctgccttcttaccgtatcatcactttagcccaaatgctgggaaaaagagaaacaaaagtcttctgtcagctattgaatgtgttatgatttagagaatttctgagattcacagtagagtctgtactttttacatttgatagacctcaaatttgcctgagtttttagtgttccagaaaataggctttggggaaggtttgaaagaaggcctttttgaacctaagaagacaagaaattgaactgttatcacaatattgctatttaagaaagaatattaagtcacttttcagaaatttatatcagaattagaaaaatgcagaaatatagtttatacttcttaaggaggtggtggaggagattagatagatacatgcatacatatatacataagtctaaatatttttatatgtatatgagagaagtatcaggaatagggtaggaaggagatagaatagtaggattacattagaatctgcttaggagcttttcttacatgtagatattctctctttttgggtatatcaaaatcttgggagtaaaagggaaacctggcatgcatgtttaataaagcttccttggggactctgatatatgctgcctcccaaataaattacaagccatatcaggaaataggagtttacagtataaaatataaccgaaaactaaagtcagatgttctacaaaatattaactatttttcctgagatagaagtggttgaaatttgggagataacttttgctatgttctgtgaggcaaagaggagggaggctagagttgatgaagacatctttcttttatgtatgatattgtctatgttgggccctgttaattttcatttacttatgtacaaatagctaatgcatattttttaactttaatgtttgttatttacatgcatagcctgatgggcacatgatccaaagtttaattttttggttgaaatttagtatttggcttcatatatataaagattggggtaaggcgatctgccttgcctttcttctactgtgtcaaagaatttatgatcaagggctagagtcagtattaattatatgattttgttttaaccaagaagaacttagttaaatttaaaattgtagttgcactcatagataaagggttttctttgttaaaaggtaaaaaagagacatctcttatacttgcttaacttttcatttaaaaaattaatgtattcataataaatagaaaatgaaaggagcttaaaaagcaaattgaacacatagttatcagagaaaacaattttaaaattatgattttaaactctcatctgtattgctaagaatgccctatattgtaatattcaaggtttgcttataattaaaatgtagggaagaaaaaaagaatcctgcagacattctaaggatgacctaggccattgatagtctaagcttgaaattaatcattagattttctgaactcttattacactggatctgttcagtctgctttaacaaaataccatagatttggtggcttataaacaacagaaatgtatttctcacagttctgaaagctgggaagtccaagatcaagtttccagcagatctgatatctggcggaggcctgtttcctggttcatagatggcaccttcttaccatgtcctcagatggtggaagggacaaggcagctctctggggtcccttttataagggtactaatcatccttttcatgagggatgtgttgaaactaaattgtgcctgaagacccttatgttacctttacatatcaaatttctattgtatctggccaacctttgattttaaggcactagggcaagaatgaccaacgggtttccaaacatatagaagtagtaacatgtgcatatcaacaaaaatcacttggtaggaacccaatactagctaataagcctactcctactgtcttagatctagttctgtttcagaattggaagctttaaggattatgaaattctgggaacttggagtaggtccacctagaagtagaagcagcaaaacccaaaaaaccaatacaatttttaatagtgttgtttaatttttaagtgttatttactagaaaataaaactatactgtgtttaatcatcaagcaatttttaacaaaaaagtttagcactaggaataggttaaacttgacacaatttgctatcatagaattatatatatgggtaaagggtaccagttagattcccattggcaaaaacctggtgattttcattctgtggtatagagatcctagttaagaggcaggaattatttaaaaatgactttaattttgatcatttaattataggacctatttattcacttgtttttaacttattcacaaatcttagtcatgagcattattaatagataatttgatgccttgtcacttagcagtacaagcatgtttatttctgacttttaaactcgaattcacccttcttgtgtttttctattcagtcgtaacccactccttctacatctacaaaatttggtgaggcatctttgactttcatcatattcagacatgctagcttcaagaactttcctattcctcttttaatgtctgtttctcacattgtattagttccttttatagtattaattcttcctacagtatgaattttattttttttttttgaaatggagtcttgctctgttgcccaggctggagtgcagtggcaccatctccactcactgcaagctctgcctcctgggttcacgccattctccttcctcagcctcccgagtagctgggactacaggcgcatgcaaccatgcccggctaattttttgtattttttgtagagatggggtttcaccgtgttagccaggatggatatagtatgagtttttattcattttgcaaatattcatcatagatatttttgtcttatttcagttagaacaggatttttttctttggattcagaaggtaactttcctactgtacttaggataaattccacaaaaactctttaacaaggtttttttcctggctattagaaaggaggaagaccctcactgaattgaagatagtaatgatgggtgaggactttgacttctgttaacacctcattcagataagtgactattttagtttaattacatgaattttgtcatctcccttggagctgcctcccagagctggtatatcagacatcctcaagtaaacctggacccaattttagaaatcttggctaattttgagttaggaagtcctttctttaaacaatattttaaaattaacagaacaatcacaaaatatattttacatattgcacttttcaaaatactttaaatatttaaaaaaatacccaacaccacaaagtaacttagtttaaaataaaataaaaatttttgaaatcagacctaatcaaattgatatatctctcattttctttgaaaattttgaccaagatatcaattaataaatccactttgaaagacattttaagacatttaattaataaatccatttgaaacacattttaaaatgtgtttgttcatgtgtataaaattatgtcattgatataacattactattcctttaaacattgttatgttcttaaaaatatctcctcttagtctataatttagcgaaaggattactgttttgaaagacttaaaaaaaatgcttagctattttttagctaagaaaaaagattcctttttcagtaaatggataaagctgaaaaataagaaattaataaaatgttttaaagaaagagtcataaatatcttaatatttaattctaggaagcttctctattcatttgcttttttatttttaaaaagaagtttaaaagagttttagttttaatatctataaacttcaaatgttattccacactcaaaaaatatttctaatgtattaagtcacagtttactaaaatagctaagttttctgattcataaaatgaataataacacttaattttaagacttattttgaagattaaatgaggtaatacattcaaataaaaccttttaaactgaaagtactttcattcttgtgtaaggaaaccatgaaagtaaaagacacatcattctattttgccagtgtatcttaaattaactagcttttattgtcagtttagtgttcagggcaccaagggtacatttcatactaagattgtgcaagtgagagtaaatgcctccttaaattttccatcttaggcacctccgttgcttttagacctggctatgttttatattgcttatatacatttttttttcttttggaaaaaagataagctgaaaaacatttttgttgatgacatgctattgctgaaataaaaacccagaacatagtgatgtgtaggaaaaaactctctcaaaccatgtttttcttctgctctcataccaccacaacagttgtcaacacaaaagacttctgtgacaaaatgtgtgggtttttttccccacacactaagcagcagataccagctgggcatcctccaactcagttctgatactgtctacttggagatagtgtcagatcccactggttggggtctcagtgcccatacctcatacccccagacaccatcctaggcctccagaacttctgacctactggcttcaaattggggttctcacaccacactcttcaggttcaattaatttgctggagctgctcacaaaactcaaggatactgggcacggtggctcaagcctgtaatcccagcactttgggaggtcgaggtgggcagatcacttgaggccaggagttcaagaacagcctggccaacatggcaaaaccccgtctctactaaaaatacaaaaattatctgggtgtggtggcatgcccctgtagtcccagctactccagaggctgaggcacgagaatcacctaaacccaggaggcagaggttgcagtgaactgagattgtgccactgcactcctgcctgggccgcagagcaagactgtctgaaaaaacaaaaagaaaaaatcaaaggaaacacacttaccggtttattacaaaggatattgcaaaggatacagatgaggagatgcgtagggtgaggtatgggagcaggggtgcagagcttccatgccctctgggggccacaccctccagaaacctccatgtgttcagctatccagaagctctcctaatccagtttttatgatgtcagcattgggatttttatgatgtcagcattcctcccctacactatagggcaaaaaccatctctggggagggtcttaaagacacacaatttacaatgatgggggaaaaattagagtcctgccttggaacaggttaaaggagggcaagagaaggtccgaggcctgcccctgaggcctaccacaccaaacgttataacaacacaacagtttttatatattttcagttttgcataatatgaagttaaagacttaagtaaattgagtaaatagtagtttttttttttttaatttcacagatcaatagagttaactcctgagttatatgcatacaaccccaaagttgtttgctgtctggagctgtgcctacacccgcctggcatattcttgagacattggagctaggaagttggaaattgatagaaaattttgtcacttgtaacagagctaaagcaatatggattatggtggaccctatcacttggaatactttcctgaaagcaacacaggtcatcattgccaaatatttttaggaccccaattctgtactaagtgctagtgatgtgataggaagccagacacaattgaactagctatctctatattagtgacttatcctaaaacagagtttctgttgtaattggtttactgtttctcttagaatatttaaacgttttaccatggtctttcagattctgcgtgatcatacagcaacctcttctttagcaacctctccactatcccacccgggtactttagttctggtggcctctttcattttctgaaagaacatcagtttcttagcatatgatctttcatcttttggaagatctctgccccttctcctttcaaagcacagcctccttctcacatttcaagactcagcgtccatgttaccttcccagatcagccttccttgaacccaccccatccacctggatctccctgtttattcttcatgagagaaccctgttctttcataggatttttctgaatttgtcatcacatacttatttccttgtttgtgtgcctcttctcaccagaccctgagcaccgtgtaagtaggaacaaagtattatttcaaagacccaagtctgaaacggtttatctgtttatacttaatggctaaggtatacatgtacacgtattctatttgactaacatttgaggtaaaaaacatgggggaaaggagcagataacacatatttttagaggatttagagtatatataactaagaaggttccctttatttgttattttttgggagggaatcctgctctgtcacccagactagagtacagtggcacgatctcagctcactgcaacctctgccctctgggttcaagcgattctcctgcctcagcctcctgagtagctgggattataggtgcgtgccaccatgcccggctaatttttatatttttagtggagatggggtttcaccatgttggccaggctggtcttgaactcctgatctcaggtgatccacctgcctcagccttccaaggtgctgggattacaggcctgagccaccatgcctggccccattttaaatcttattctcactttgaggtggagttaatctcagaaaactttgagattaagttatcttaatatcaaccttctcactttattcatttattcaacaaatgtttattgagcccttactgtgtgccaggtagttttaaacattggggatactattgaataagatagacaaagcccaagccttcctgcatcttgcttgctagtagcgagataataaataagaaaataaatgaatttataacataacctcaagtggtgatcaatactatgaaggaaatagagcagaggtaggagtagcaaataaatgggaattatggctgtcttaggcaagatgtttagacaaggctttgcttaggaggtgctatttgaggagatatgtgaataatggagtggggtgagtcataggaagcatggtcaaagagtattttgggcagaggaaacagcaagtacaaaaacccagagaaaggaagaattatgccacagtcatggaatagaaagatgaccaggatggctggagtaagaagagtgttagagcatgaggtctgagaggtatcaaggggccagaactcatgtagtgttttgtaaaccaagataaggcatttgaatttattctacgtgtgacaggaagctcttgcagggttttgagtgtggaggtgggttagggagtaacatattagctctatgaggacatctaggaggcagcaagagtagaagtatggaaaccagtttgtaggatgcttttgcagtgggacagaaaagagataagaattgctttgactctagcaatggtacaggtaatgaaaagaagtcaaacttggaatatattttgaatttagagccaatatgacttgcctggtgtcttggataagtatgagagaaagaataataatgatgactccttgtcttttttgctttgggcaactggatacaaggagtgatttaatgatatggtaaagactagggagaagcagtcgtttttggggggtggtagaggatgattaaagtttattttatacatagacatcaagtgaagatgttgagtaaggtcaaatagggcagatgcttctgaaatactccttcaaggctatttagtatctgacaaatggagcattgttacatttatggctctacttcctagcatagacatacaacatatactgggtggatggatggataactaggcatacagtcatacgtttgaggaaatagagtgttctttgtataatggcactcatagatgtaaataatcacaaccataataatatcaaatattatatattactctgtgtcaagcactgttcccaattcttaacattattaattcacttctcatatactatgatttaagttactactattatcattagtatctctgctctacagttgagaagcttattgagggtcatgtagctacaggtggccaggatttgaacccatgtactgtggctccagagtttgtgctcctacctactgcactatagttttcccgtgatcatgacatactcatcatcataaaccaatatctatatatctgtgtgaccatttggtttggggtgatggagtgataaaagtgatatttgaatgaaatatgaagactattggtgaaaaatgccaccttaatccttggaagagaaatttacttttagtataatcctattgggtgaatctgaagcacaactagattttatctcatatctgaaaggtatctaaaatatctaattagtgtacttaagtcctattaatcacacatctttgcaaggtctcaagagtctcctaaaatttcattgtttgaaagaaaaattggtagtaggccactcttgaatatatgtgggtttatactcataccattttagttaaagattttcaattcatccatggctaggaagtataaaatatttagtataacagtatgtgtattagctggaatgaatttcctaagtgttaattgttagcattactttgctcagatgaaagccattatttacactgcagtgcccctaatgaatataggaaaagatgacttgtcaacaaaaattatatgattggagttgtagagtctgcttctttttccaaagcatacatgccaccttctcttttttctccccgccataaaatccagctcctgtaggacaccttttcttctgatgcctccataggagacaactcatgctcaccatctccacctttaagaattatttctgtagtgagtcactattacagataataacccatctcctgttggtctgctgaaactgaaaaagggctgaaaattgttaaacttttgcagtgatatgtgtaatgactatatgattatcatgcctctttttattcacagcttatcaagtacctacttgacatgtagaaaggaaaagagtaaagttaagaaaagacagtttgtttctcctgaaagtttagagttgaaagcgcatctttaacacattcatacatacatccaagaaattcaaataaaataatcaagccaaatcactgaaagctgagaaaagagttgaatgttcaagtggctacttgaagtcacttcatgtgatgtatcatgtaatcctgcaaaatgagtgctgtattcctgtttttcaagtaatgaaactgaggttcagagagcaaaacgtttcattgctagtaaacttcaaactagtaaacaagaatttgagcttatatatctctaattccaggacctgtgcttttattgctaatggcttttttaaaacttgttcttcatgcttttttttattgagtgaattaagagcaggataaataagaaaaatagtatttagtaatgtattgcttaggcatgagtaacttcctatttgaaagaactgttgcgtaatcgccgtttttttttctttctttttaaatttcttctccctgcatagtttctgcatctcccagatcgcctttttgttattttgttttggcatatttatattagggactttctggaaatatttgattgccactcatataaaagagtaaatcactaaaaattagttagaaactctgagcacctggatgaggtttgggaacttcattgtatagttatttggtagagcaatttcttaagaaacccccattgcgtatctttaggttttttatcctgttactcagtacctcactgcccaaagtacctggtatcgccactgccacatccttttggtgggttaaaagtttatctggtttgcctgttggctttccttaatgctgagttccaattcagttttttctcacctactgagtaggttaccatttgtgtatctgccttccaagctttcaaaattttgtatctccagcctggacaacatagggagaccctgtctctacaaaaaaaatttcagaaaattagctgggcaccatggcgcattcctatagtcccagctactcaggaggctgcagtgagccatgattgtgccactgtgctccagcacgggtgacagagcaagaccctgtctcttaaaaaaaaagtgttgtatctgaaaggtttatgtcttttaaaataagtcagtttattgccgttttagtggggttttatgagagagagttaatgtctgcattcatttggcatctttaaccaatgttgtttatcttctgcagattccatttaatttagtttgttgtagttttagtcatccagaagtttccaatttatatgaattcagatctgttcatatcctttgcccacttttgaatggagttgtttgtttttttcttgtaaatttaagttccttgtagactctggatgttagaactttgtcagatggatagattgcaaaaattttctcccattctgtaggttgtctgtgcactctgatgatatatatatatttttttttttttgctgtgcagaagctgttgaatttaattagatcccactgtcaatttctgcttttgttgtgattgcttttggtgttttcatcatgaaatctttccccatgcctatgtcccgaatggtattgcctagattttcttctaggatttttagagttttcggttttacatttaagtctttaattcatcttgagttaatttttgtataaggtttacagaaggggtctagtttcaattttctgcatatgactagccaattctccgaggaccatttatttatttaatagggaatttatttaggaccatttatttaatagggaatgctttctccattgcttgtttttgtcaggtttgtcaaagatcagatggttgtaggtgtgtggtcttatttctgagtcctctactctgttccattcgtctgtgtgtctgcttttgtactaataccatgctgttttggttactgtagccttgtagtatagtttgaagtcaggtagtgtgatgtctccagctttgttctttttgcttaggattgtcttggatatttgcgctcttttttgattccatatgaattttatgaattttggttccatgtgaattagttttttctaattctgtgaagaaagtcaatggtagtttaatgggaatagcattgaatctataaataactttgggctgtatggtcagtcttacaatattgattctttctatccataagcatggaatgtttttccatttgtttgtgtcctctttgatttctttgagcagtggtttgtggttgttgaagaggcccgtcacttcccttgttagctgtattcctaggtattttattcattttgtagcaattgtgaattggagttcattcatgatttggctctttgcttgcttattgttggtgtataggaatgctagcgattattgcacattgattttgtatctgagagtttgctgaagttgcttatcagcttaagaatgttttgggttaagatgataatttgacctcctctcttcctatatgaatatctttgtttctttctcttgcctgattgccctggccagatcttccaatactatgttgaataggattggtgagagagagtatccttgtcttgtgctggttttcaaggggaatgcttccagcttttccccattcagtattatgttggctgtggatttgtcatagatggctctttgagatacattccttgaatacctagtttgttcagagtttttaacattatgttgaattttatcaaaggcctcttctgcaaccacagataatcatgtggtttttgtctttaattctgtttatgtgatgaatcacatttattggtttgcatatgttgaaccagccttgcattctggggatgaagccagcttgatcatggtagataagctttttggtgtgtgctggatttggtttgccagtattttattgtggatttttgcattgctgttcatcagagatattggcctgaagttttctttttttgttgtatctctgttaggttttgctatcaggatgatgctggcctcataaaataagttagggaggagtcccttcctttcaattttttagaatagtttcagtagaaatttgtacctctggtagaattcagttgtgaatgcatctgatcctgggattttttttttttttttggttggtaggctatttattactgcctcaatttcagaacatgttattggtctacttagggatttgatttcttcctagttcagtcttgggagggtgtatgtgttcaggaatgtattcatttcttctagattttttagtttatgtgcatagaggtgtttatagtattttctgatggttgtttgtatttctttggggtaagggtggtatctcccttgtcatttctgattgcgtttattccattcttctttctttccttctatattagtctagctagtggtctattttattaattttttcaaaaaataagctcctggattcattgattttttaagggttttttgtgtctctgtctccttcagttctgctctgatcttggttattttttgtcttctgctagctttggggtttgtttgctctttgaactggttttagtatcaatattgtactagcttcataaaatgagatgaggaatgtttctagtttttccattccaggaagaaaatctgagtaaaagtggaattatctgtcccttgaatgtttggtagaatttactggtaaaaccaaatgagcttgatgttttatttatgggaagattttaaattattgattcaaattatttaatagttgcaggactatgtaagttattttatttcttttttattgagttttggtaatttgtatttttgtagtaattttccacttggtctacgttttccaatttattgatataaaattattcataataattccctattatctttttaatctttgtgattttgtcccatttttcatacctaatactgcctatctatctcttttctttatcttgatcaatctgactggagatttgttagttatttcaaagaatccatttttggctttgttgaccaaactgtgttttatctttgttttcagtttcattaagttctgctcatgtcttcatttctttctctccactttcttcgttttttttctgtctttcctcctaacttctaacttattttctaatataagcgttgaaggttatacatttttctacttttttgtgtgtgggaagtacaaaaattgtcaattgggaatttcgaagtagagaaaaatatttcattctgacttttaaattgccactgtcaattgtgcctaaaattcatagtacttaccatgtcaaacaatatgattttgatatgtacctgggaaaattatgcttactaatgtggttttaatttcatcatgtttcatataggattcacctttatttgatcttattaaacaatcaaaggaccgagaaggaccaactgatcaccttgaatctgcttgtcctcttaatcttcctctccagaataatcacactgcagcagatatgtaagcaaaatatatgttatgttgaccattcaaactgcaaatagattttaagcataagtgcaatgtaacattctataaagaaactgtagggaatagaattttgaataagaatagtttctgtttttaagaaattagtaataaaaggtacatgacccaaataaagtcatataaaagagtacagagtgctactgaatcacctaggatttgcataatgagagcagttttcatggcagagttggcagtttaggtggaataggatttcaatgtggaaactggagagaatagaggagacagaggagtgtgttccaagagtcagaatggcattaactcaaaaatgtcaaaggaagcagaaaacatttttcagagtgtgcaggtcagtccatttggagtgaagcataggataagtgtagggagaagtatgggatgtggactaacacacagttgattagtgtgtgctggtgatgacgatgggaaaagaaaatgtaaacccaaatgtatctgaaacaggtctcaatcaatgtagtagtttattttgccaaagttaaggacgtgcccaggagagagatctgtgcctttctccagtgatgattttgagggctccaatatttaaatgggaaagtcagtctggaggggaaagaaaaagggtatggtaatccacatgttgcaagagaaaaagagcaggtagaggaatcgtcaattatctatccatctcatgctgagtgaatcgacattttacataagataaggtgaacatagagtcactgtctgtggaggtatttaaccttttatctgtatttatttgtgtgggaacaaaaggaaaggcagtttcttgcatgactcagatttcagcttaattttttccttttggcatagtgaattggggtcccaagtgtttattttcctttcacaaaagcaatcactaactgtgtgctgggcaatggcctaagtacttaagatttattttttcatttaatcttcataacagcccataaggtaacagatactgctgtcagcctgttaactataaaataggaattagagaaataagataacttgcctaaggtcaatagaattcaaacccaagctatctaatcccaaagtccaggctcttaatcactctaactacattgcctttcacagaaatgtgcctaatattttgtttctgtttaattctgtgtaggaactgacattacagtattctgtattagtgcaggggccattttccagagatgtcattttcatgctaacttgtacccaaagtgtttctggcatatggagaccctgccttcatgtatacatttgtttcctaagtaatgcattgtataaataagttaagccttgtttttttaaaattcaagaagcagtcatctgtaaactgccaggaagtggtgtaggcactgggaatacagaagtaagatggcctgggtccttcccctcatagagcttacattctggaggaggaacacaggcaatgaacaagtaaaccaagatgtaagatgattttagagtataataagtgctacaaaggaaataaacagagtggtgtgaaagagagaaacggagaggctgatagaatgcttagtggcactttcctttctctgataaagtgatattttgacgtcacacctgaagggcaagctgatgctagctaggcaaaaacctgcatgatgtgcattccaggcagaacaaacagcaagtgcagtggctgtagggcagatcaaacttagctggatttaggaacagaaagaaagaaatcctagtgtggctggggtattggaagaggagaatggtgcaagatgagactgaagagctaagctggggtagatcttgtagagatctccactctctagctgctatctgaagtacaggtgggtttggaggaaagggacagggcaaggcaaaaagcgaggaaaccaatttggagactatttctgtagttcagatgagggatgtaggtgacttggtctaaggtatggtattagaaatagaaatggagagatctggggtgtatttagagataaattaataggttttacattggttttatgttggatttcaggaatttggaaaatggagaaattaaaaataaccctaggtttttgacttaagacactagatgtaatgtggagctattctttgagatgggaaaataaatccagagctctgctttgttcttattaagtctgagattcgagtagttatatccggtaggtaattggagatttacacctagaacttcagagactaactttgcccaagttaggccagtttacgatactgtcagtgaactgaatgaaaatccaaagtggatactagaccagacactggtccttctaaaatcattgtgataatgggtcgcttttcttagtgtactggttaatatactacgtgttgtagaaacatccatagtaaggtacaaattctacttcctgttctctttgttcttaaagtttgtctttaaaaataagttcatttgccagctaccaaaagaaaatcagaaagtagatctagattattctgttaaataggggcagcacagaacgataatatttgtaatatctctgccttgagttatgcctgacatatttagtatggtgtaaatctgtctgaataatgttatttgaagtattaattcatagaattctgtactgtgtaatttaggtgtgtgtaaatctgtgtgtataactgaaatcttagatatgaaccatagttatcgctaaaaaaatttttagaaggagaatcacaaaaacaagataacagtatttaatatcaataaattgttttttaagctggaatcaccttatggtctcaataccactataattattaaaattgtacattatacatatatagctatttttttctaataaggcagtaatccccaggaaaagccatttattaaaatagaattagatatgatgatgacaagcagttttcctattaatatatctttcccagcttgcatttaaatagtctgctataataccaattaaatagacaagatgtatctgggtgtacaaccttgaagtgtatgtataatctgtgattcttagccaacttgaaatgaagacttttcctttaaatatatctaggtatctttctcctgtaagatctccaaagaaaaaaggttcaactacgcgtgtaaattctactgcaaatgcagagacacaagcaacctcagccttccagacccagaagccattgaaatctacctctctttcactgttttataaaaaaggttagtagatgattattttcaagagcatggactctgaaactaggctgactgggttcaaatcatgtttcttctactttctaggtacattactgggcaagtcacttaatatctctgtgtctcagtttcctcatctataaaatggaaatgataatgttgcgagatctttcttgactattcagagtcgtttttctggccggaaacctctgtgaccggtggcgcccttgatcaatttttgctcaggcccaccgggctcatttcagccccttggtctgacaggctgcactcggctcacactaccggcctgggtccatgccagccaggagcaagtcagacatggaacggagaggggtgtgtgggcaagcatgagatctggccattgcccacagtcagaaatgctggctgctgcagcggggcgggcagctccaggtgctggcacaggtgccaactctctgtgaggctgcacctggaccagacacaccacaagcggtttccacagctggcactggggaacaataaaatggctcccagaagcttggagacgccagaaaccacagggccccaaagagggagtcacagccctggctcaaggagctcccaattctgggctccccgaagggccgcagctcttctctcttctttacccacaacatggcgagcaaggggcatgtttcagccctgtttgtgttacagccctttcagcctcgccatttggtgggtcctgagttcttgtcctgcagccaggaagaatgaggtacacagacaagtggagggtgagcaagatgaagaggagatttattgagcaatagaacagcttagagaagacccatagtgggcagctcctctctgtaaccacaaagtcccgatgagtgttcagctcctagcagagaaggtagctcctctctgcaggcaggtcgtcccaacaagtgttcagttctcagcagaaagggtagctcctctctgcagctgctcgtcctgacaagtgttcagctatcagtagagagggtagttcctctctgcagctagttgtctctccatcctctgctctgctctggctgagactcgggcttctgtgggcctcagcgggaagaaagtgtgcaccgattggtacatgggcggccactagtgggcccagaaaaggtaccacaagtcctcactcctgtccgtgggactggcagcgcccacccccagccttcaggcgctccctggcctgaaggtggggcctcaacagggactcatcctctactgctcaggagcccatctgcctcctgccgccatccatgcgtcaaggggcacctgtaggccagtgccaagctgccctcagcccccgcctcggcttcccccccgtgctcgtcagcgcccaaagtctggagagggctgaggcggcagggggctggcgtgtcagcgctgccttgagcgtgcgcacatctggctgggctgcagcagcacccaggctcagccctgactttgctccgagattggagtgggcgctggcagcagggagaaaccaggcagtgggagcaggcacttctgagcctgcgagggcggtggcagttggggggtgccttccccggcccccaagtatacagagatgcctgggtccacagccacggtttgggtagctgcagctgcactggggagggtgggactcctacctgctccccagcccagagagcacagggatgcctgggtccgcagcggtggcttgggcggctgcagaagcactggggagctcctgtcccaactcggaaggggcggggttcctgcttgtccccggctcctccgggcttcctggagcgtgccgccccatccacgcctctctgctgcagcaggtgtgatgtacatacaaaagtagtgtgttgttgcctactgcagacacatttcctggatattttcaggacatttaagaaggccagtaaccaggtcatgtagcattctctgagtgtgtatatatggtggggtggggaggttgatttgagtgtctgtgcatgcgtatatacttcctagtgcatatccacttggagctctttgaaagacagtaaaaggtcatgttcctccatgataatctttttcctgattttattcaagtaagaattatgctgagctttacaggcatattgtcagatattatccttaggttagagcagtggttttcaaagtgtcgttcccaaccagcagaatccacatcacctggaaattgtagaaatgagaattctggggctccagcctagacctgctcaatcagaaactcttaagatagggccctcaaaaccttgttttaacaaccctccagctaagtctgatgtatgctaaagtttaagaccactgagataaattgttagctttaaaaatttcaaattacctcatgcaagtcgttgaaagagatatataaaaggtctttatatgatatttaaagtagatgaaggaaaattcaattttatggattcctttttgccaaatttgcattttcagtagtattttttataaactaaataaattacatattgcagtcattttacatataggtaatctacaagtttaccatttttcaacagagtatgttccattggtattttatagagaaatgtgtggtttaatttttttaggattggaaaaattcatagacactggcaattatataatttaaaaaaatgattattcctctttaatattgatagtgggaatgaccagtggtgagtgattattaatagaattgaaacaaaccctattgggtttgtctaattttacagtgtcttatgacctttcctccactacttcccacctctgccccaatttcatgccataatagttaattcagcaagtatcattctgccttatatgtacctagaaatgtgctaacacaaggaatcaattatttttaaggaaaatagtggtagaaaaatcttaaacatcaccactaaagaacttattcatgtaaccaaacaccacctgttcccccaaacacctattttttaaaaaaactcatgcctacataatgaagcctccataaaaactcaaaaggacctggttctgggagcttctggatatttgcccaactggaggttcctggagaatagcatgcctggggagggcaaggaaaatccatgccccttctcacatgccttgccctctgcatttcttcatctgtatcccttgtaatatgcctcataataaaccagtaaacatgtttctctgggggaaagaaaagagtggtagaaaagaggtttctgttaaaatgctacttaacagcattataattagagcgatttcatgatttgaaaaaaatctacttgtaattcaaaatgaacagtaaaaatgactaatttttcttattcccacagtgtatcggctagcctatctccggctaaatacactttgtgaacgccttctgtctgagcacccagaattagaacatatcatctggacccttttccagcacaccctgcagaatgagtatgaactcatgagagacaggcatttggaccaagtaagaaaatcaagcacttcaccttctctcctccctacttacttgttaactgattctttctttctttctttctttctttctttctttctttctttctttctttctttctttctttctttttctttctttctttctctctttctttcttttttttgagatagagtctcactctgttacccaggctagagtgcagtggcgcaatctcggctcactgcaacctccgcctcccaggttcaagtgattctcctgcctcagcctcccaggtagctaggattacaggcgtgtaccaccacaccttgttaatttttgtattttagtagagacaggttttcaccatgttggccaggctggtctcaaactcctgacctcaggtgatccgtctacctaaggcctcccaaagtgttgggattacaggcatgagccaccgcacccagccttgttaagtgatttctaaagaaaatattagattcaaatgagaaactagatcaatttattagacttaatatatgttcactttttggctaccatttacatttttgttgtaattcttacaaattagagctttaacactcaagagtatattttagtaactgcttatttaatgacacaaaagatcttacctgtaaaaaaaatagctgaagaaccttcttatcactggctttttctatgtagtagtgagctagatatcattttagtgtgaaaaaagcatgagacttaagaatcagttgatttaaaacaatacctattgaatgaatgaatgaagtcaattagtttacaatgagagaatcatttttcatctcctcctttttctctataaaataggttaataagaacaatatacttttggctgggtgcagtggctcacgcctgtaatcctagcactttgggaggctgaggtgggcagatcgcttgagctcaggagtttgagaccagcctgggcaacctggcaaaactctgtctctacaaaaaatttaaaaattagccaggtgtggtgacttgcacctgtggtcccagctacttcggagactgaactgggaggatttcttgagcccaggaggtggaggttgcaagtgagctgagatcacaccactgtgctccaacctgggtaacagagcaagaccttgtctcaaaaaaattttgttaattaaaaaaatatatacatatatagttaatagctttactgaaataattcacacaccataaaaaccacccatttaaaatgtacaattcagtggtttttagtatattcacagttatacaaacatcaccataatcaattttagaatttgtatcacaccagaaagaaactccataccctcaagcagtcaccccctattcccctaccccctcagcccaaggcaatactaatctattttctctctatggatttgcctcttctagacatttcatatacatggaattatataatatgtggtcttttgtgtatggcttctttcatttagcataatgttttcaaggttcatctgtattgtagcttgtatcagtacttcattccttttcattgccagacaatattccattgtatggatatacaccacattatgcttatcattcataaagtgataaacatttgggttgtttccactttttggctattatgaataatgttaccgtgaacattcatgaacatgtttcatttctcctaggtacatacctaggagtagaattgctaggtcatatgataattctatgttaactttttgaggaatgcccagatcattttccaaagtggctataccattttacatgcctaccaataatgtatgaggttctaatttctctatatcctcaccaacttttttatcttttttttttaataatagccatcctagtgggtataaaatggcatctcagtgtggtttgatttgcatttctctgatggctagtgatggtgagcaccttttcatgtgtttactggccatgtgtatatcttctttagagaaatgtctatcagaccgtttgcccattttattttttatttattttttttatttttgacacggagtcttgctctgtcgcccaggctagagtgcagtggcacgatctcggctcacggcaatcttcgccttctgggttcaagcaattcttctgcctcagcctcctgagtagctgggattacaggtgtgtgccaccacacctggctaatttctgtatttttagtagagacggggtttcattatgttggtcaggctggtctcgaactcctgaccttgtgttccacccgccttggcctcccaaagtgctgggattacaggcatgagccaccatgcccagcccattttgttttgagacatggtcttactctgtcacccaggctggagtgcagtgacatgatcacagctcactgcagcctcgaattcccgggctcaagtgttcctcccacttctgcctcctgagtagctgggactataggcacacaccaccacgccgagctaatttttgtatttttttgtacagatagggttttgccgtgttgctcaggctggtcttgaatggttgagctcaagtaagccacccaccttggcctcccaaagtgctaggattacaggcatgagccaccatgcccagactgctcattttttaatagagttatttgtcttgttattattgaactgtaaggggtcattatgtagtctacatacaagtcacttatcacatatataatttgaaaatattttctcccattctgtgagttgtttcactttcttgttagtgtcctttgaaacacaagttttttattttgatgatgtccaatttatgtagttgttttcttgttattgatgctttagtgtcatatctaagaaaccagtgccaaatctgaagttgttaagatttatccctgttttcctccaaaatgtttataattgtagttcttacatttaggttttgctccattttgagctaattttttaatatagttgaggtaggggtccagcttcattcttttgtttgtggataactagttgttccagcaccattttttgaagagtttttttctctcttcattgacagttgtcaaaaaatcagttgactgtaaatatataagtatttatttctggactctcaattctgtttcatatgagatctacataagctattcttatgtcaggactacactgtacacttggctgtaggatgccaagcaaaaatgattatttggcattcttggcaatagtaggtaagagcaagaatgttgcagaagcaatgagtacttaaattaggctataaagttcatacaaataaagaaaatctgacattttaaagtcacagggaatcattttcagatcttatttttgcatttaaaatatcttttattgaaatgtaatacacatatgtaaaaacctgtgtatcaaaagtatacattctaacaaaaattcatcaactgagcttagttatataaccagcatccagatcaagaaacaaaacattgtcagcaacacataagactctcttacatgctcttccagtcaccatagcctccttaccaccaccaccaagtgtgttcaatattattttatctaatagtttgaaacattttcacacctggctttttaaagtgctagttatacaaaattaactgattctactttcaacttttctgggaaacatttaagggacaagagccaaagttagggtaatttacaaaccaggtgatcagtcctgaataattgagccttggtgatttgcattttgttctttaaacacactttgggttaaacacttcatgtagactttcaaactgagctcagtatggaaagaaataactctgtagattaaacctttcttttttgaggctaaaagaaagaaaatggtattttttaagaacaaaaccatgtaataaaattctgactacttttacatcaatttatttactagattatgatgtgttccatgtatggcatatgcaaagtgaagaatatagaccttaaattcaaaatcattgtaacagcatacaaggatcttcctcatgctgttcaggaggtaggtaattttccatagtaagtttttttgataaatccatatccataacataacataggtaattcatttgatctcatttattcattaatgagatcatatattctgtctgaccttattatgtaaattcacaaataaaaacttttatattatttatttgtaacttaaatagaattggaaagataagggtaattatgaaattacccatattcatagttttttataaagttaataaataatattttatccctgtaataagcaggtatttgtaataaacttgacatgagtcatagaacattagatattctttgaagttatttttattactttataggaaaagccagtataaatgcagccttgcaaatcaataatacaaatgttcagtataaacacattttgtgtttccggtttaccttccctttagagaaatagtagtagtaaaatatacttggtatgacacatttcatattgttctgtggaaagtgagttgaggggtatttttcccatttattattggagttttcaaaagtaatacaaaccaagtcatttttgtttgtatgtttgaagttattttctaaattcaatcattttaattgtatatatcagaggcatctgatataacctctgtgtttttccctaaaatttgagtgaaatctaactatcactaaaatatagtgcttttactaaatgtctacttcttgcaattgcgtaatgtatactgaaacccttatagattgggggggataccgggaggtacaggccagagaatgtagtccaaatattggtggataatattattggctttcgctcagctctggccctttgattcccatcatgctttccattctaccagtctatctactcctctcttcccagtctatatactcttctcttcttggatggccagctcttccatctgctgctgcctggctatttctctcaatcattctgtgacatttcacttctagaagagcagctataatccaagcctaagaagtaattttatttatttattattttttcctttataatatgtgcttcttaccagtcaaaaagtattataaactattagaaaagaaaatctaaaggtagaaattttaaaattcatttaacaagtaaattttacttttttttttttttttttttttttactgttcttcctcagacattcaaacgtgttttgatcaaagaagaggagtatgattctattatagtattctataactcggtcttcatgcagagactgaaaacaaatattttgcagtatgcttccaccagggtaggtcaaaagtatcctttgattggaaaaatctaatgtaatgggtccaccaaaacattaaataaataatctacttttttgtttttgctctagccccctaccttgtcaccaatacctcacattcctcgaagcccttacaagtttcctagttcacccttacggattcctggagggaacatctatatttcacccctgaagagtccatataaaatttcagaaggtctgccaacaccaacaaaaatgactccaagatcaaggtgtgtgttttctctttagggaagtagtaaagaatgagagggggattattttgatccaagaataaaaaatataaagcattcttcatttcaaataagctagactcttgaaactctatttgcttatttaagtaacataataagaatatgggggcggggtgaagaaaatctatttacgacttaagcaacgcaagatggccgaataggaacagctccggtctacagctcccagcgtgagcgacgcagaagacgggtgatttctgcatttccatctgaggtaccgggttcatctcactagggagtgccagacagtgggcgcaggccagtgtgtgtgcgcaccgtgtgcgagccgaagcagggcgaggcattgcctcacctgggaagcgcaaggggtcagggagttccctttccgagtcaaagaaaggggtgacggacgcacctggaaaatcgggtcactcccacccgaatattgcacttttcagaccggcttaagaaacggcgcaccacgagactatatcccacacctggctcagagggtcctacgcccacggaatctcgctgattgctagcacagcagtctgtgatcaaactgcaaggcggcagcgaggctgggggaggggcgcctgccattgcccaggcttgcttaggtaaacaaagcagccgggaagctcgaactgggtggagcccaccacaggtcaaggaggcctgcctgcctttgtaggctccacctctgggggcagggcacagacaaacaaaaagacagcagtaacctctgcagacttaagtgtccctgtctgacagctttgaagagagcagtggttctcccagcacgcagctggagatctgagaacgggcagactgcctcctcaagtgggtccctgacccctgacccccgagcagcctaactgggaggcaccccccagcaggggcacactgacacctcacaaggcagggtattccaacagacctgcagctgagggtcctgtctgttagaaggaaaactaacaaccagaaaggacatctacaccgaaaacccatctgtacatcaccatcatcaaagaccaaaagtagataaaaccacaaagatggggaaaaaacagaacagaaaaactggaaactctaaaacgcagagcgcctctcctcctccaaaggaacacagttcctcaccagcaacggaacaaagttggacggagaatgactttgacgagctgagagaagaaggtttcagacgatcaaattactctgagctacgggaggacattcaaaccaaaggcaaagaagttgaaaactttgaaaaaaatttagaagaatatataactagaataaccaatacagagaagtgcttaaaggagctgatggagctgaaaaccaaggctcgagaactacgtgaagaatgcagaagcctcaggagccaatgcgatcaactggaagaaagggtatcagcaatggaagatgaaatgaatgaaatgaagtgagaagggaagtttagagaaaaaagaataaaaagaaatgagcaaagcctccaagaaatatgggactatgtgaaaagaccaaatctacgtctgattggtgtacctgaaagtgatgtggagaatggaaccaagttggaaaacactctgcaggatattatccaggagaacttccccaatctagcaaggcaggccaacgttcagattcaggaaatacagagaacgccacaaagatactcctcgagaagagcaactccaagacacataattgtcagattcaccaaagttgaaatgaaggaaaaaatgttaagggcagccagagagaaaggtcgggttaccctcaaaggaaagcccatcagactaacagcggatctctcggcagaaaccttacaagccagaagagagtgggggccaatattcaacattcttaaagaaaagaattttcaacccagaatttcatatccagccaaactaagcttcataagtgaaggagaaataaaatcctttacagacaagcaaatgctgagagattttgtcaccaccaggcctgccctaaaagagctcctgaaggaagcgctaaacatggaaaggaacaaccggtaccagccgctgcaaaatcatgccaaaatgtaaagaccatcgagactaggaagaaactgcatcaactaatgagcaaaatcaccagctaacatcataatgacaggatcaaattcacacataacaatattaactttaaatataaatggactaaattctgcaattaaaagacacagactggcaagttggataaagagtcaagacccatcagtgtgctgtattcaggaaacccatctcacgtgcagagacacacataggctcaaaataaaaggatggaggaagatctaccaagccaatggaaaacaaaaaaaggcaggggttgcaatcctagtctcggataaaacagactttaaaccaacaaagatcaaaagagacaaagaaggccattacataatggtaaagggatcaattcaacaagaggagctaactatcctaaatgtttatgcacccaatacaggagcacccagattcataaagcaagtcctgagtgacctacaaagagacttagactcccacacattaataatgggagactttaacaccccactgtcaacattagacagatcaacgagacagaaagtcaacaaggatacccaggaattgaactcagctctgcaccaagcagacctaatagacatctacagaactctccaccccaaatcaacagaatatacctttttttcagcaccacaccacacctattccaaaattgaccacatagttggaagtaaagctctcctcagcaaatgtaaaagaacagaaattataacaaactatctctcagaccacagtgcaatcaaactagaactcaggattaagaatctcactcaaagccgctcaactacatggaaactgaacaacctgctcctgaatgactactgggtacataacgaaatgaaggcagaaataaagatgttctttgaaaccaacgagaacaaagacaccacataccagaatctctgggacacattcaaagcagtgtgtagagggaaatttatagcactaaatgcctacaagagaaagcaggaaagatccaaaattgacaccctaacatcacaattaaaagaactagaaaagcaagagcaaacacattcaaaagctagcagaaggcaagaaataactaaaatcagagcagaactgaaggaaatagagacacaaaaaacccttcaaaaaaatcaatgaatccaggagctggttttttgaaaggatcaacaaaattgatagaccgctagcaagactaataaagaaaaaaagagagaagaatcaaatagacacaataaaaaatgataaaggggatatcaccaccgatcccacagaaatacaaactaccatcagagaatactacaaacacctctacgcaaataaactagaaaatctagaggaaatggatacattcctcgacacatacactctcccaagactaaaccaggaagaagttgaatctctgaatagaccaataacaggctctgaaattgtggcaataatcaatagtttaccaaccaaaaagagtccaggaccagatggattcacagccgaattctaccagaggtacaaggaggaactggtaccattccttctgaaactattccaatcaatagaaaaagagggaatcctccctaactcattttatgaggccagcatcattctgataccaaagccgggcagagacacagccaaaaaagagaattttagaccaatatccttgatgaacattgatgcaaaaatcctcaataaaatactggcaaaccgaatccagcagcacatcaaaaagcttatccaccatgatcaagtgggcttcatccctgggatgcaaggctggttcaatatacgcaaatcaataaatgtaatccagcatataaacagagccaaagacaaaaaccacatgattatctcaatagatgcagaaaaagcctttgacaaaattcaacaacccttcatgctaaaaactctcaataaattaggtattgatgggacatatttcaaaataataagagctatctatgacaaacccacagccaatatcatactgaatgggcaaaaactggaagcattccctttgaaaactggcacaagacagggatgccctctctcaccgctcctattcaacatagtgttggaagttctggccagggcaatcaggcaggagaaggaaataaagggtattcaattaggaaaagaggaagtcaaattgtccctgtttgcagatgacatgattgtttatctagaaaaccccatcgtctcagcccaaaatctccttaagctgataagcaacttcagcaaagtctcaggatacaaaatcaatgtacaaaaatcacaagcattcttatacaccaacaacagacaaacagagagccaaatcatgagtgaactcccattcacaattgcttcaaagagaataaaatacctaggaatccaacttacaagagatgtgaaggacctcttcaaggagaactacaaaccactgctcaaggaaataaaagaggacacaaacaaatggaagaacattccatgctcatgggtaggaagaatcaatatcgtgaaaatggccatactgcccaaggtaatttacagattcgatgccatccccatcaagctaccaatgactttcttcacagaattggaaaaaactactttaaagttcatatggaaccaaaaaagagcccgcatcgccaagtcaatcctaagccaaaagaacaaagctggaggcatcacactacctgacttcaaactatactacaaggctacagtaaccaaaacagcatggtactggtaccaaaacagagatatagatcaatggaacagaacagagccctcagaaataatgccgcatatctacaactatctgatctttgacaaacctgagaaaaacaagcaatggggaaaggattccctatttaataaatggtgctgggaaaactggctagccatatgtagaaagctgaaactggatcccttccttacaccttatacaaaaatcaattcaagatggattaaagatttaaacgttagacctaaaaccataaaaaccctagaagaaaacctaggcattaccattcaggacataggcgtgggcaaggacttcatgtccaaaacaccaaaagcaatggcaacaaaagccaaaattgacaaatgggatctaattaaactcaagagcttctgcgcagcaaaagaaactaccatcagagtgaacaggcaacctacaacatgggagaaaattttcgcaacctactcatctgacaaagggctaatatccagaatctacaatgaactcaaacaaatttacaagaaaaaaacaaccctatcaaaaagtgggcgaaggacatgaacagacacttctcaaaagaagacatttatgcagccaaaaaacacatgaagaaatgctcatcatcactggccatcagagaaatgcaaatcaaaaccactatgagatatcatctcacaccagttagaatggcaatcattaaaaagtcaggaaacaacaggtgctggagaggatgtggagaaataggaacacttttacactgttggtgggactgtaaactagttcaaccattgtggaagtcagtgtagcgattcctcagggatctagaactagaaataccatttgacccagccatcccattactgggtatatacccaaaggactataaatcatgctgctataaagacacatgcacacgtatgtttattgtggcactattcacaatagcaaagacttggaaccaacccaaatgtccaacaatgatagactggattaagaaaatgtggcacatatacaccatggaatactatgcagccataaaaaatgatgagttcatgtcctttgtagggacatggatgaaattggaaaccatcattctcagtaaactatcgcaagaacaaaaaaccaaacaccgcatattctcactcataggtgggaattgaacaatgagatcacatggacacaggaaggggaatatcacactctggggactgtggtggggtcgggggaggggggagggatagcattgggagatatacctaatgctagatgacacgttagtgggtgcagcacaccagcatggcacatgtatacatatgtaactaacctgcacaatgtgcacatgtaccctaaaacttagagtataataaaaaatataaataaaaaaaaaaaaaagaaaatctatttacttggatgggtttacagatttagttatcagctttcctgactgttaggtatcttcttttgagaacaatttgagaaccagtttggttatatgtttcaaaacacttttatattttttaaatagccaatctgctaaacaaagcaggttactttaggttgagtacttttagtttgcagtttattggatgtcctgtaagttttgcttcctgtggatttttttccttttgcttgttatattaaatgtagattactgtcaattaagtctttagaggtccatccctaatcctgctggcggcctctttaccacctcaccttgggcaggtctctatctgtacttcacaagggtgctgtggatcagggaaatgatgagtatgaagctgttttaaattctcagatgaaaggttgtatgcaactacaaatcattatattatcttccacatccaaccacaagtgctctctagctttgaagtgcttcagttgactaattatatgttatcatgggctatttgaaactgactttatttgtgtgaagtaggaggcagattagctagtatagttaatgtagtctcatctcagaaattatcagcccatatggttgtacctaatgggcaagaaaagggggcatatgttggcctttcagaaaatatttgcatggtatatttaattatttaagtagtacgtactcattataaaaatttcaaactctacagaaaaatatgaagtaagaaataattggcaatatgatacaaatgctctcatgtgtctctgtatcatcctttatttatttggtgttcttgtagttggatatctgtgtactgatatctactacttgttctaagctgctaagatgccacgtcatgtctatttaagaaaatttacattgttccatgccactatatgaaaatgtatacttaggtagttttttttaatagtgataattagtccatattatggtgataatgatggctacttgctgatccttagtgaaataaattctgtgttggtattcttcagcaaaaacgtcacattctgaacatcctaactaataaatcattgaccaggcattaggagagcatcttaacactctacccagtacatttaggtactctggttaatcaaatattatatgtagagtgatggccacttatcaaggaattggagggcaaaaaaatctctatattcactagttccatgttcatgttttcaaatctttgtcgagtcatgtcaggctaatgatgttcttcagctttattataaagaacataaattatatggttcaaataaagacagactaataaagatttctgactctatgatatatgataaatagcctttactatatcaatatagatgctaattagaattctgattattacttaatattctaagttttttccaaatataacttgaattttaaatgagaaaatatgaaagaaatttgataacttacccattgatttatgaagaactaagtaggggtaaccttgaaacttgcctttgccctccctaaatatgggcaatggcagaatatgttcttgcagacctataacttttgctttaaaactaagagactaggtgagtatatgattagacgggcactgttagaataattcccaaatgaatatagtttgtcagtggttctagggtagaggtaacctttaatttggtattcctaatagttcagaatgatgtatttatgctcatctctgcaaaattgtatatggttttttattactaattggtatttcatcttaacttgacagaatcttagtatcaattggtgaatcattcggggtgagtattttctttctatgaaatataatagtatgcattgtaagtataaaagaaattaaagctttctataatttgaatttccaaatgcagttattcaaacacctcatccaggcatattgcatagaattttatgagatatatatatctcagatttactttcaaatcaagtttaatctcaaatcatactcctaattggtgaacttcaaaacttttctaaatatccacttgagattatataatacatatatacatttgtgtatatacatacatatatacgtgagctgtttttgctcacaacatttctatcaccaaatgtgtgagatttttttctcacccaaatctattcttcaactctctggtgttctacaattcaattcaattctgacactaattacccagagtcagcatcagactccacaggttcaagggctcagtcccacaaaaatggtctcactgcagacaccagtcacaagtgtcaggtccccaggctacaccacacttccgtctgacttgaatacgaagttggggggttccgatagtgcctcttccttacagtttgatccactgccagaactactcacaaaactctggaaaatattctacttactattatcagttcatcataaaagatacaaatgaacagccagatgaagaaatattatatagggtgaggtccagaagagtccctagcacaggggcttctgtccctggggagttggggtgcaccaccttcctagcacttagacatgtttaccaactccaaagatctcccaaccttattgttgaggggtttttatgggggtttcattatataggcataattgattaactcaatttccaaccccctcccctccctggatagagggtggggctgaaagttccaagcttctactcaagacttggtctttctggcaaccagcttccatcctaaattagctaggtacccaccaagtatcacctcattagaacaaaagatggtcccatcacccttatcacacatgaaattcgaagggttttaggagctctgtcccaggaaccagggacaaagaccaaatatctttcaatgataccatgtatgtatgtacataacctcacaggaatctttataaaacaattttgaaattcactcattatgagtgtgatttgaaatgagatactccaaaatgtaagcccgatatccaaatgtcaccagcctgtccctgcctactggtctccttccatacatatgcactttttgcttgtccttcctctcagacttctaggatattctttttctggtacactgattaggaattgtttgcatgagatcctgcctcagtgaaagtggcagagcttcattctaggagatccaagggaaagctttgctttgaaacatttattctaggctgcaaatccacaaccctagttggccttccattaaagtcactaattcagcagtcccatattcaatatgcattactgttaatatgttgcaccatctccattcccctgagagcttatatttttaatttttaaatttttatttttagagacagtgtctcactctgtcacctacttattataacctcaaactcctcggcccaagcagtcctctcaccttagcctcccaagttgccaggactacaggcatgcaccaccatgtccagctaatttttaaattttttgtagagacagggttttctatgttggccagattggtattgaactcctggcttccacgataccccgtctcagcctcccaaagaactgggattacagatgtgagccactgcacctggccagagagcttatattcttataggaatgggaagactgcctatgttatgtgttgctacataatacattacccccaaacttagtgacttaaaacaaacgcttattatctccatttctgtgggtcaataatctaggcatgacttagctgggccagagtttctccaaagtctgtgatcaaggtgtcagttgggctgggcctgcagtcatctcaaggctccactagaggagcattcactggcagacttattcaaatggctgttggctgatcctcgatggctattggcccctctattggtttcttgcccttgggcccctccatagtactgcttgctattcacaacatggcagcttgctttgcccagagcagggactctgagggaggcagggaaataaagagcaagagagaggtcacagtcttattgtaatctaattctggaaatgacagcccattacttttggcatattattttggttagaagcaagacaacagtagatctagcccacacacgaggggaggaggatcacacaaggaggtgaataccaggaggtggggtcattgggagccatctgagaggctgcccaccacactgcctcaagtaactagggagaggtaaaagtttatatgccagatgaccaaatattaaaatgtgtgttacaaatagttcacgatgggctcagctgtcagactttacaaaggagctatgggaccttataaggacagttggaactggctaggtatcacatagtggtcttcaaacatttttgcttgccataacctctaaaataattgggaaaaagttgaatgtacttccatatcttaaagctgataatttaaaatattatacatttaatagcagcacgggatttagtttttgttaaattgtatatgtgctccaaatagatttaccatcaaaacctgttttgaatttaatattgggagaattcgctagtttaatttttggaaaataaagtataattggcaaagctaatcctcactgttgaatctatccgtcaaatcagatataatttctatcagaaagtctatatgacttgtcaacataatacccataaagtgaatcaaaaattattattcattgaacacatcatctcttatcaaattcttgtgaccttccttctggttgtataatagcctaaaaaacaaaaaaaggacaaaagcaagtttccagaaagctgttctgacttgcctacttctgaaaagtagtcctgtatggtgggttctgaaaatgaggaaccaggacttgcagagtaggcagttgctggaggaagaatgtgagctgcatgggaaaagacaggaggatttacaaagagtgggtgtttaattggggatggaattaggtagttattctgatttttagatttttcatatcttttatttggtccaatgaagcagaaaatttaaatgaagttattacctttgcctgatttttgacacacctcaaactataacttgaggttgctaactatgaaacactggcatttaatgatttaaagtaaagaattctgtaatttgtagacttctgagaagttccagaaaataaatcagatggtatgtaacagcgaccgtgtgctcaaaagaagtgctgaaggaagcaaccctcctaaaccactgaaaaaactacgctttgatattgaaggatcagatgaagcagatggaaggtaggaaccagttttgaatgttttccagtagccgagatggtcatctggggaatccagagtctcagcactgctcctggcttataccaatttctttcatgccaagtttatttggaagttgtgagaatggctcaaaataatagatatgagtgtagtgcaaagttaaaaacatcttacaaattgcataccaacattcagtgaagatatctaataaaccctgatcttttttacaaagctattgataaaattttgttattcttaacattaaatttaaaaatgtttactcttgaaaaatattaaccactgtattttgtgagaaccactgaaaaaatacatagcatcataaatttgtgacatttatgttttagatggttagtttttaaattttaaaattaaaagctactcactaaaataatagcataaagtaagtcatcgaaagcatcatagttactggaaatttgagttttccatttataaatacacatgaaatgttttgcatttttttaatctgcagtaaacatctcccaggagagtccaaatttcagcagaaactggcagaaatgagtaagtacttttttcaccttgtgtaaatgaaataaacaattgtttacactgcaagaagtcttttcgttatataaaagaatgtataatttcttcagttggcaggtttgtttatgcatttaaaatataattcaatcaaggttatttatctacaaacatttgtggattaaatgtatgatgtaaaatgaaggtcatttttaccctttctatgatctttcatgcaggaagactaagaagtgaaacattgcttgaccacattcaacacaaatggctacagttagaaaatactttagcagaactacaaagaggagctatttgggagtgttagatatagggaaaagttttataaacctagcatatgtaaacatcatcacccttatttaaggaataacctttgattctaccatttttaaactttccttatttgcaaatcttaaaacaatttcaaacaaaagtttccattactggaaatcagaattttaataaagaacacttatgtcattttccaagttatacagagtgatatcatgttagggtaagtggaattctattcaaaactactctgagactagacaaaaaaaataatccaaggatagtagatggaaagcacattaggaaagagataaatgttcactaactactattgggttgtcttaggtagttatggtagtgagtgtaacatttcccagtatctgctgccagatccattgataggaaaaggaactgggattttgaaagaagacaaatattcaggagataggtgttaaaacaatcattcctaggtcacaggacacactaatgagaacaataccaattaaaatgagaggctttcttttaatacatctttgtagatactaactttgaaaataagatatttaaaaggatgctttttttctatgtatttttttaaagtgtaattaaaactaaataactaaaacaaaattttctagttataaatgaatctctttttggattttatgtcaacttacatattcctattttaactcttaaatagttgcatcttttcccctcagtacatgaaaatagacaagaggctcataaccaaaatcaggccttgaagacatatggaaacattttggaacccacaaatatgcacttaaaaaggagctgaaagctgtaaaaacatgtatattttcttagagaagtgttcagttgctatagttagtacatttcccagtgacacacttagctatgatggcgagcttcctctgccaggccaaagttcaggacctttgtgcatctacaaaattgtgacaaagcaggcagaattttaacccctgaggctaaggcatttctttaggatgctcttcagcttttcttaaagaattacatttagaaaagatcatcatacaatgctggattgcccagaatggaagggcattccatttttccaaatgtgcttctttataaagaactcatgcctacctctaaaatcaagttaagaatttttaagaaatttaataagtatcccggctttgtctatattgtaattcataatatgcttttaacatggccatgccccgggtaggcatgatggcttatgtctgtaataccagcactatgggagggcaaggtgagaggattgcttgaggccaggagttcaagaccagcctgggcaacatagcaagaccccatctttacaaaaaaatccaaaaattagccaggcctggtggcatgtgcctgtagtcttggctactggagaggctgaggtgagagaattgcttgagcccagaaggtcaaagctgtagtgagccatgatcatgccactgcactccagcttgggcaacagagcaagaccttgtctcaaaaaaaaaaaatccatgcccagtttaaatgagctatgatttgatgtatttgcagtacctgcaaggcatctgcaaacataagggaacctatagctttgtaaagaataccaccactcactctggcagattcagtctgggccagccgagtattctagtctgctgaagtatatgccaagcatcaaccacctcatctctagaatagtggcctacaaaatggggcatacctgaagtatgcaaagtcatcttttggggtacataaagtagaagttctatttatctcattttaatgtttgcttggggtatgtgttttataatttgtacatacatacgtatttttgtggtacaggcttggaaaaaaatttactcacagggatatatgatttttaaagatttggagaccactgtttttttggggggtggggagggaattttttttttaattgatatatcatagttatacatattttaggggtacatgtgatgttttgatacgtgtacacaatgtgtaatgatcaaatcagggttattgggatatatatcacctcaaacatttttctttgcattgggaacattacaattctagctattttgaaatatgcagtaaattaactgtaactccctacggtactgtcaaatactagaatgaagaccactgcttttgcaaggtcctgagcgccatcagtttgacatgagcataatatatatggcagccacttgccaacttacccagtaccatcaatgctgttaacagttcttcatcctttttccagcttctactcgaacacgaatgcaaaagcagaaaatgaatgatagcatggatacctcaaacaaggaagagaaatgaggatctcaggaccttggtggacactgtgtacacctctggattcattgtctctcacagatgtgactgtataactttcccaggttctgtttatggccacatttaatatcttcagctctttttgtggatataaaatgtgcagatgcaattgtttgggtgattcctaagccacttgaaatgttagtcattgttatttatacaagattgaaaatcttgtgtaaatcctgccatttaaaaagttgtagcagattgtttcctcttccaaagtaaaattgctgtgctttatggatagtaagaatggccctagagtgggagtcctgataacccaggcctgtctgactactttgccttcttttgtagcatataggtgatgtttgctcttgtttttattaatttatatgtatatttttttaatttaacatgaacacccttagaaaatgtgtcctatctatcttccaaatgcaatttgattgactgcccattcaccaaaattatcctgaactcttctgcaaaaatggatattattagaaattagaaaaaaattactaattttacacattagattttattttactattggaatctgatatactgtgtgcttgttttataaaattttgcttttaattaaataaaagctggaagcaaagtataaccatatgatactatcatactactgaaacagatttcatacctcagaatgtaaaagaacttactgattattttcttcatccaacttatgtttttaaatgaggattattgatagtactcttggtttttataccattcagatcactgaatttataaagtacccatctagtacttgaaaaagtaaagtgttctgccagatcttaggtatagaggaccctaacacagtatatcccaagtgcactttctaatgtttctgggtcctgaagaattaagatacaaattaattttactccataaacagactgttaattataggagccttaatttttttttcatagagatttgtctaattgcatctcaaaattattctgccctccttaatttgggaaggtttgtgttttctctggaatggtacatgtcttccatgtatcttttgaactggcaattgtctatttatcttttatttttttaagtcagtatggtctaacactggcatgttcaaagccacattatttctagtccaaaattacaagtaatcaagggtcattatgggttaggcattaatgtttctatctgattttgtgcaaaagcttcaaattaaaacagctgcattagaaaaagaggcgcttctcccctcccctacacctaaaggtgtatttaaactatcttgtgtgattaacttatttagagatgctgtaacttaaaataggggatatttaaggtagcttcagctagcttttaggaaaatcactttgtctaactcagaattatttttaaaaagaaatctggtcttgttagaaaacaaaattttattttgtgctcatttaagtttcaaacttactattttgacagttattttgataacaatgacactagaaaacttgactccatttcatcattgtttctgcatgaatatcatacaaatcagttagtttttaggtcaagggcttactatttctgggtcttttgctactaagttcacattagaattagtgccagaattttaggaacttcagagatcgtgtattgagatttcttaaataatgcttcagatattattgctttattgcttttttgtattggttaaaactgtacatttaaaattgctatgttactattttctacaattaatagtttgtctattttaaaataaattagttgttaagagtcttaatggtctgatgttgtgttctttgtattaagtacactaatgttctcttttctgtctaggagaagatagatagaagataactctcctagtatctcatccattcctagcctttaaggggctctatatgctagagatttccaaatttatttcttcagccctgatcttttcacagaggtcaaggcttttatagccaacagaactcttgattcctactcccctctacccaatgtctccaaatataaactaaaatcaaataaataaaaatcttttttttctaccctggtctttctccattttattaaacatttatcaagtcaaaaacttaggagctatctattaattcttgtctggaccactgctaaagacttctaaccagtctccctgttccctttctttctttactgtcaaactccacaaagaacaaaaatgattgtttaaaaatataaattgattcacattgctctctacttgaagtacttaacaggaattataaagcccctactgacttcccatcctcatcttgtagaattttctccttgtcactgtgctttagccacactgaacctttttctttaaaatgccaagcctattcttaccttaggcttttatatttcttcttccttctgcctggaatactcttttcccacagttttgcatagccagtgcctttctgtctttcagaactcagctcagagggcttccttgaccaccaagctaaaatcatcactgtgtattgtatcattctccttcaaaagtgtaacagcatccatctatgactatttcccaccatctgaaattgcctttcttgttacctgtctccccatccctagccactccccaccccagattgtaaccatcagcctatctattcttatttaccactttaggtctagcacctagaaagtccatctgtagagtaagaaacagaatatatgttttccatatttttccaagtatgtgacaacaaacaacactctcttcctcttttaaaatgccatgtactagtatctaccatattccaggcacagttctaaatgctagagctataacaatgaataaataaaaccaaaatccccatccttgcagaactgactttctagtttcaggcaaagagagcaaatgaatgaataaatgaggaatacatagtatgtgagattgtattaaagactgcagagaaaaacaaagcaaagaggagggcaaggaaggctggtagggaaaggagttttaaaatttaaaagagagtgatcagggaaagacttgagtgatatttgggcaaagatctgaaggagacaagagagtgagccagacacaaacaggagtcaaacattccacagagagaggtaggagtatgtctggtgtgtttgaagaacgattaggaggtcatagcaaaatgggcagcaagtatctctcttcgtctaatgcaaagtataaaaggcctttatgtatattacaagtctataatcctttatctgtagttccaaaattgagaaagctttaaaatccagtgattctgtgtgttttgtgccaaaagtcatatggcatcaaaaccatatgtaaactggcacagagctatttataatctttatcataattggaatattctcatttcactgcagaaatattaatatgtttgattgggagctaacccagacccaccttaggtgttaggtattatttggcatacgtaccatattatcattctaatcattctaaactcccccaaaattatgaaacccatctggcaccaagggtttcagacaagggattatcttaaatttatatgatttctcaaaaacatggcagatgaaattctttccttctgggacagtgacatgtttgttcctgaaagaagaaaggcaaagtgcgcagagcaggaaaagcagcaagcatatctcagtaggctgtatttatattgggcggggatcttaaatgaaatgcagtctcttaggtcacgtcaaaatcaagcagcctaaatgacactaaaaaattttgtctgcatggcagagaattgttcacttctagagatgaatttagtattccaatgaataaatactcactataataaaaggggcaaattcaaattcatatatttacttttttttttttttgagatggagtctcactcttgttgcccaggctggaatgcaatggcacgatcttggctcactgcaacctctacctcccgggctcaggcgattctcctgcctcagcctccccagtagctgggattgcaggagcacaccaccacgccggctactttttgtattttcagtagagatggggttttgtcatgttgaccaggctggtctcgaactcctgacctcaggtgatccgcccactttggcctcccaaagtgttgggattacaggtgtgaaccactgcacctggcctatttactttttcattacagctttctaaaggtacaaatggccaggaacaaactagttatactagttctattatcatctggatggtttcatagaaacttgcttttagaagtacatttttgttcctcattttagggccaatatagtatacatagcataagtaaagtttcagtagaattttcctttggactaaatagatattttacaggacgactcaaaccttacctccagaaatattaaatttccaccataggtgtagcttcttaaatagaaatatggtagcactgtataatatctacgtgagattcaaacaagctcttttaatacacagtaagcatagtcatccattctcaatactttttttgtgtgtccattatcttgggactatatatagtagtattgacatatgacaattgtcatattaaacaatgacaatacgaaaggttaaatttactacacagaccaacctcagttacttcctaaatgcaaaatgttatttttaactgaatttactgagaaaattggtaagctttgtatttctatgtgttttgacaaagattgaattaaaaataacagtaagatttgattttttcctttctcttcacaattctcccaactctgttgatgtaataaaggggggttgcataataagatagttaagattatatagtttgtagttgcatcttttcattattcttggttaagaatccagcctctaaataaaactctccatgttaaggtccagaatgactggcaatttacatgaactataacctgaagaacatacttaacattcttaacctttgttttttaaaatgaattcaatggcatcttcacaaacctctatcagcagatgagggcacttcttcattcctataaaatcttaacctttctctgtgtaaattagtggacaattattttagaagcactaaaacattgacttccttgtgtgagcaagagaggaaacaaaacttttgggaaaatctaagataaacttgtgcaaaaaaaaggatccattaatttctaatgtagtgtccttatgaaaatgtaccttttctctcatatcactaaggttcttcaaacactcatctgttagaaggaaattttaaaaaggaaatctttctccttcccataggagtgtcaatggcaagcctatcctcaaagaccagaaagaaagcatgttttttcagatagatgtacccacacccaggactcatctgtcatctctcagatctaaaactagctcttctttattgtttggcgtcagaagttttaagggctaaaccactaattctcatccttggctgaacatcaaattacttgtggagcttttaaaatgtactgaatttgggcagggcgtggtggctcatgactgtaatcccagcactttgagatgccagggtgggtggatcacctgaggtcaggagtttgagaccagcctgaccagtatgatgaaaccctgtcactactaaagatacaaaaattatctgggcatggtggtgtgcacctgtggtctcagctacttaggaggctgagacaggagaatcgcttgaacccgggaggcagaggttgcagtgagctgagatcgcgcctccagcctgctgggcaaacagagcaagactctgtcttaaaaaaaaaaaaaaaaaaaggccaggcgcagtagctcacgcctgtaatcccagcactttgggaggccaaggcaggcaaattggcaaatcatgaggtcaggagatcgagaccatactggctaacactgtgaaaccccgtctctactaaaaatacaaaaaattagctgggcgtggtggcgggcacctgtagtcccagctactcgggaggctgacgcaggagaatggcgtgaacccgggaggcagagcttgcagtgagccgagatcgcaccactgcactccagcctgggcgacagagcgagactccgtctcaaaaaaaaaaaaaaaaaaaaaaaaaaatccatagattattctgttgtgtgcagagataagaagcatgtaaacctacacaaaacaaagcttagggagcaaaacggggtaagagtccagagtaacaatctgtactctggcagtatgcctactgacccatggtggagtgtgtaaaagtagtccatttttcatcccccagtaaacttatctgttcccctttgagtgttccaatttttatatgaagtgagttcacaaaagaaaaaggcactgaggagcttcagaagaccctgtcagaaataagcaagaaaaaggaagacactgtgaagctataaaagcttggtcagctatagctagcacaggaaggtgggggagagagaccaaagaaacaaagactgtggttgtctaatggccagaacagatgctataggtgcttgccatgtttgaatgtttttttgttggataaaatagcaaacttatcaaaaaatgaaaacaaatggtataatgctacttttaaaataacaacagaataaaactatatagttttaaaaacaggattcagatttagatctagagacactcagactctgcctctaccagataaagtctgaagaaaaatggttaagcaatttgttaaagagaaactctgtccatttagtgttgctgtaacagaataactgaggctgagttaattcataaattagaggggtgtatttggctcatggttctggtggctggaagcttcaagattgggcagatgcatctgctggggacctggggctgcttcaagtcatggtggaaagccaaagtggggcagacgtgcacaaagagatcatgtggtgagaaaccaaggtcgctgaaatccctttgattttttagacagagtctcactctgtcaccaggctagagtgcagtggtgccaatctcagctcactgcaacctccgcctgccaggttcaagtgattctcttgcctcagcctcccgagtagctgggattacaggtgcccgccacttcacctggctaattttttgtatttttaatagagatggggtttcaccatgttggccaggctagtcttgaactcctgaccttatgattcgcccgccttggcttcccaaagtgctgcgattgcaggtgtgagccaccacacccggcctgaaaccccttttataacaactcagtcttgggaactaattcagtcccaagagaaccagaacccactcttgctggagggcattaatctattcacaatggatctgcccccaggacccatacacttcccaccagtccctaaggcctcccaacaccaccacagtggggatcaaatttcaatatgagttttggcaaaggacaaaccacatccaaatcatagcagaaataatggattcaaaatgtgacccaacgaagagaatgaaaagacaagccacaaactgggagaaaatatttgcaaaagacatatcagataaaggactgttacccaaaatatacaatgaactcaaaacaattttaaaaaaagatttaaaaattggctaccaatctgaacagatgcctcatcaaagaagatatgcagatagcaaataagcacatgaaaaaatactccacatcctatgttatcagggaaatgcaaattaaaacaaaaatgagatggcactatacacctattagaatggcccaaatctggaacactgacaacacctaatgctggtgaggatgtggagcaactagaactctcattcactgctcatggacatgaaaaacggtacagccactttgaactacagtttgacagtttcttaaaaaaaaaaaaatactcttaacatataatccagtaatcatgctccttggtatttacccaaaggagttgaaaacttatgtccacacaaaaacctgtacacagatgtttatagtagctttatttgtaattgccaaaacttggaagaaaccaagatgtccttcaggaggtgaatggataaactgtggtacatccaggcaatggagtattattcagcactaaaaagaaatgagctatcaagccacgaaaagacttgtggaaacttaattgcatattattaagtgaaaaaccaatccaaaaaggctatatactgtatgattccaacgataggacattctggaaaaggcaaaactatggatacagtaaaaagatccatggctgccaggagttaggggcaaaggaggaagggatgaattccgcagagctcagaggatttttagggcaatgaaaccactctctatgatacaataatgatggacacaggtcattatacatttgtccaaactcacagaatgtgcaccaccaacaatggaccctaatgtaaactatggaccgtgggtgataatgatgtgtccaagcaggttcatcaggtataacaaatgcaccactctggtggggggtgttgacagcagggaaggctgcgcatgtgtagggcatgaggcataagggaaaactgtgttttcttcacagttttgctgtgaacctaaaactgctctacaaaaatagtcttcaaaaaagtcacctcaccaataaagagcagaccaagacaataatatgaatgataattaggttgtttataagctatttgtggtctagggtgggctttcctatgagactttatccgagtaactgcttgataagagcataatatatccaatttatttatgtacatctaagagacatgaggttgacattttataattttgctgctgttttgggattaaaaaaaaccccaacacatttgttctgttatctgcaaataagcactttattaccaaatagttcagcatcagaacaagaattctaattccaaaagggtttcctttacattacatgacattgtgagatacacattagaagaatctgagactatgttccatttcagtttctcttttgcaattaggtaatttgttttgatctaaaaagtacaaatttatctcattcttgttaatgctgtccatgaaatgtaagtatcagttccttctcagctagtgctttatagttatactggtgccaggttaagagacctattttatagtgagtgacatgaaagtcaactacaagaaaagcacattgtcattttcatttacagaggcaagtccctcttaacacaaagaaaagcaaaggaccttatgtgattatgtaaggcagatcagcccaggaatttcattcaaagataatacttcatactccataatcccatgtgagaaattaatgaatgactccaagtaaaaagaaaattaaaattagcccttgggccttgacaatttaattgccagggccttttgtcaattctaaacaatgttctaaattagccacaatttctcagaatgatataccagaagaatatgaacctcaataattacaggctgttttaagtttattttgtgaaagttattccttctcccagtattccatgactaaagctgttctcaggacatactgaagatttataataaattgagtgcctattatacacaaggcactgtgctgagtgctgaaaatgtggtaaggacagacagcactccttgtcaagctatctatgtggtatcagccagctgaataatggaacatttgggccagaatagcatatactgagaccagggtaccaaaggtgtccaatttaagtgactcaaaaagaggaaatggtaaataagatatttcaattttttttccttgaccttagtcacatctgatcagaacattcaatgctttctacataaactctgggtttaggcagacaaagaccactcaccaccatccttcttctgacagttacaagtactcagccaaacatagctcatcatacatactattaattaaagagaagtgattcatctctggcttttgcaggggaaatggaaaggctcaaaaactttcctgcagatgggatcaatttttaaaggctccaactctgcttgctttgctgataaagttcttcaggagatcatggtccatttctgcaaaacctgatgtttgtgttactacagtcagatggtttatgcaaaacctgaagcagaattcttctaaatcctaggaacaacaacaaagatggtttaataaattcatatttactaattcaatgcaacatagcatgaaaatcgctaaaacaagttaggcaaagaaaaaggatttaataggcaagtggaggaaatgatggcatggtaatacctaaagaatagtcataaaaagtataacaagtatgaatcatctatgcttgtaaaaatttaagtagcacagagtaacattcaagttcctccgcactaacctaggtaaagaatctaactttttcttcccagagataggcatgtgagtgtgtgaattccttggtacctttgtctagtgacagtatttgtaactgttgatttcactttcaataattgttaaaagccctatactcctcttttatatttatatcagcgtctttaagtatgtctgcctataaagagttgatggaagaaaaaggtaagccataaaaagcagtaatgccaagaaattgctgctctgaagtcattaacaggccaccgctttttctctttatgagacgacacaggatgggatggatggatttgatcacactacatatgccttcaataatctcaactgggaaaatgctttaaagaaatcatgacttccaagtctctggtaagagagacccaacagattggtgttttctggcttactgtaatgcactctgggccaaagaataatgctgtaataattctcttgattagaactataacttgaaaatcagaatgaggctgaccagatgctttttggccctggagaagtgagggcagggtgctgagacctccaatatgcctcaaaccctaggctacttggcctaggacaagatgctgctaggtggtggtcaatttttaaaagtttcctctccaagctactgtaggtaatttataaaaaataaaagccccaaatactttctaagcaattacatatgaacattacacacgatagtcttttcttctttagacataaattatagcaaatgctgaagatggaaaaaataaaaaaaatagcaatgctgatagccttgccaatgtacatataaacctacggtacattttcttttaagaaaagaaagaaactatactaggaaaatgtttatttcatgcctgaagataactgggcaggctgttggtaccacaccagcaatatgatgtgtctctgtcccaggtaagccctcagtgataaacagggaaaattcacacacccacttgtcatcacagcatactatacataaaaatgtgcttcaatgatacatgctgaatatctcagagtccatttaaaattatgtgctgttgcttaaatttttagaaatgacatttttgcctacagcacacaaaagtgaaaccagatagagatgcatcatctctttggctgaagtctacagagaggaatggaggaattcatacctacaccacacacattagagtgtgtctggagttaggtggctgggcagtttgatgcctcacagatctggacagcatcaggaaaattgctaattaatgggagaatgaaaggaccctaaaaagttatcacttggatccatgctcctttactttattctagagtgggatcttcccctaaatactaaattaaggacaggacttggaaagagttcctgtgattctaagaattcaataaattggcatagggtggtggtactggttataggggaattctgtccatagaaaacaaggcccccattatttttcagttaaagaattgtagtctattttgaatgctaccactctgtatggcttcatgttcaaaatggggccctctgttctgtcctgcagtcctaccacattctcctagtttgctcattctcctacaggactctcatacttctccccataagcctgacatctcccctctcatcctcatcctcagctgacatgacttcctatttcactgagaaccagaatcacttgaaaagaacctccacaagctctccccaccacgtctccttgcctattacagagaggcctgtggatgcaatcttctctggatcaaaggtccaagaccctatagaaagcagagcccttgctctgtcactagatcccactgctccacctactaaggggccctgctctaccaactgtcccctgcatcactggcttgttccccttcactgagtcatttgcatcattagacaagcttccatttcccacatcttaaaaaagtaaagatgttttacctcaaatgccccaaagctcttcctttttatctttataataaaattaccatgaaaagctgcctctattccccatcttcagttcctctacttccacgctccgatcagacttcccgcctcactgcgctaaaactgcttgccaaggcccctccggcgttctcatcgccaaacccactcgtcagttctcagtcctcgtgcagacgtgccagcagcatctggtgtggttcggacttcttccttcctgtttcgctttctttcccagcctgcaggaaacggtctgctggtttctctcttccgttactgctcactcctcttcagtctcctttgctggtgtctccttatctccttaacctctaagcacagagtgctcaggacttaatcttcaaacctgtctcacgtcactgcctcatagctttgacttcagcacatttctctctgacttccaggcttgcttatccaatttgcttattagacatttccatttggatgtctaatagacatcacatacttctcatattcaaaaccaaatttctgatatttcccccaaaatgttgctcctatcttctatatctcaatagatgccactttcatccttacagctgctgagggacagaacctcctcagtcgtcttttttttcctcacatctaatccatccgcacatcctgttggctctactttcaaaatgtattcaaaatcttaaccactttttaccatccccacaggtgataacttggaccaatccaccatcatcacttactggattatacagcctcctaagtaccctccttcacacacacacacacacacacacacacacacacactcttctctctctcaccctctctctctctccacacacacacacacacacacacacactctctctctctctctctctctctcttctcttctctctctcaccctctctctctctccctacctccctccctccctcctcaacacagcagccaggaggcaggaggattacttcaaatgcccatcatatctgctcctctccaaaccctctgatggccactcaccttggaactctgattcctgaaacttgcctatggactctgcaggccctgcctcctcccacacacgccactgtgcacctccaccgcaccatctccctgcctcatcagctacttccctccccactgtgctccctccacaccgggcttgcttttcccagaacacaccacccacacctccttcaggtctctgcttgagtcacctgctcactgatgtcttgcctccctgaccattctatttaaaatttcaactttcatctcaggatggcattccctaggctgtcttccctgtcttacttctttccatatcacttgtcaccatctgacatactatatatcctattcatttattgatcacctatctcccctcaccagaaattcccatgagagcagagattttggattgttttgttcatttg

SEQ ID NO: 70 - DNA, 202144 bp, Homo sapiens
caaatgaacaaaacaatccaaaatctctgctctcatgggaatttctggtgaggggagataggtgatcaataaatgaataggatatatagtatgtcagatggtgacaagtgatatggaaagaagtaagacagggaagacagcctagggaatgccatcctgagatgaaagttgaaattttaaatagaatggtcagggaggcaagacatcagtgagcaggtgactcaagcagagacctgaaggaggtgtgggtggtgtgttctgggaaaagcaagcccggtgtggagggagcacagtggggagggaagtagctgatgaggcagggagatggtgcggtggaggtgcacagtggcgtgtgtgggaggaggcagggcctgcagagtccataggcaagtttcaggaatcagagttccaaggtgagtggccatcagagggtttggagaggagcagatatgatgggcatttgaagtaatcctcctgcctcctggctgctgtgttgaggagggagggagggaggtagggagagagagagagggtgagagagagaagagaagagagagagagagagagagagagagtgtgtgtgtgtgtgtgtgtgtgtgtggagagagagagagggtgagagagagaagagtgtgtgtgtgtgtgtgtgtgtgtgtgtgtgtgtgaaggagggtacttaggaggctgtataatccagtaagtgatgatggtggattggtccaagttatcacctgtggggatggtaaaaagtggttaagattttgaatacattttgaaagtagagccaacaggatgtgcggatggattagatgtgaggaaaaaaaagacgactgaggaggttctgtccctcagcagctgtaaggatgaaagtggcatctattgagatatagaagataggagcaacattttgggggaaatatcagaaatttggttttgaatatgagaagtatgtgatgtctattagacatccaaatggaaatgtctaataagcaaattggataagcaagcctggaagtcagagagaaatgtgctgaagtcaaagctatgaggcagtgacgtgagacaggtttgaagattaagtcctgagcactctgtgcttagaggttaaggagataaggagacaccagcaaaggagactgaagaggagtgagcagtaacggaagagagaaaccagcagaccgtttcctgcaggctgggaaagaaagcgaaacaggaaggaagaagtccgaaccacaccagatgctgctggcacgtctgcacgaggactgagaactgacgagtgggtttggcgatgagaacgccggaggggccttggcaagcagttttagcgcagtgaggcgggaagtctgatcggagcgtggaagtagaggaactgaagatggggaatagaggcagcttttcatggtaattttattataaagataaaaaggaagagctttggggcatttgaggtaaaacatctttacttttttaagatgtgggaaatggaagcttgtctaatgatgcaaatgactcagtgaaggggaacaagccagtgatgcaggggacagttggtagagcagggccccttagtaggtggagcagtgggatctagtgacagagcaagggctctgctttctatagggtcttggacctttgatccagagaagattgcatccacaggcctctctgtaataggcaaggagacgtggtggggagagcttgtggaggttcttttcaagtgattctggttctcagtgaaataggaagtcatgtcagctgaggatgaggatgagaggggagatgtcaggcttatggggagaagtatgagagtcctgtaggagaatgagcaaactaggagaatgtggtaggactgcaggacagaacagagggccccattttgaacatgaagccatacagagtggtagcattcaaaatagactacaattctttaactgaaaaataatgggggccttgttttctatggacagaattcccctataaccagtaccaccaccctatgccaatttattgaattcttagaatcacaggaactctttccaagtcctgtccttaatttagtatttaggggaagatcccactctagaataaagtaaaggagcatggatccaagtgataactttttagggtcctttcattctcccattaattagcaattttcctgatgctgtccagatctgtgaggcatcaaactgcccagccacctaactccagacacactctaatgtgtgtggtgtaggtatgaattcctccattcctctctgtagacttcagccaaagagatgatgcatctctatctggtttcacttttgtgtgctgtaggcaaaaatgtcatttctaaaaatttaagcaacagcacataattttaaatggactctgagatattcagcatgtatcattgaagcacatttttatgtatagtatgctgtgatgacaagtgggtgtgtgaattttccctgtttatcactgagggcttacctgggacagagacacatcatattgctggtgtggtaccaacagcctgcccagttatcttcaggcatgaaataaacattttcctagtatagtttctttcttttcttaaaagaaaatgtaccgtaggtttatatgtacattggcaaggctatcagcattgctattttttttattttttccatcttcagcatttgctataatttatgtctaaagaagaaaagactatcgtgtgtaatgttcatatgtaattgcttagaaagtatttggggcttttattttttataaattacctacagtagcttggagaggaaacttttaaaaattgaccaccacctagcagcatcttgtcctaggccaagtagcctagggtttgaggcatattggaggtctcagcaccctgccctcacttctccagggccaaaaagcatctggtcagcctcattctgattttcaagttatagttctaatcaagagaattattacagcattattctttggcccagagtgcattacagtaagccagaaaacaccaatctgttgggtctctcttaccagagacttggaagtcatgatttctttaaagcattttcccagttgagattattgaaggcatatgtagtgtgatcaaatccatccatcccatcctgtgtcgtctcataaagagaaaaagcggtggcctgttaatgacttcagagcagcaatttcttggcattactgctttttatggcttacctttttcttccatcaactctttataggcagacatacttaaagacgctgatataaatataaaagaggagtatagggcttttaacaattattgaaagtgaaatcaacagttacaaatactgtcactagacaaaggtaccaaggaattcacacactcacatgcctatctctgggaagaaaaagttagattctttacctaggttagtgcggaggaacttgaatgttactctgtgctacttaaatttttacaagcatagatgattcatacttgttatactttttatgactattctttaggtattaccatgccatcatttcctccacttgcctattaaatcctttttctttgcctaacttgttttagcgattttcatgctatgttgcattgaattagtaaatatgaatttattaaaccatctttgttgttgttcctaggatttagaagaattctgcttcaggttttgcataaaccatctgactgtagtaacacaaacatcaggttttgcagaaatggaccatgatctcctgaagaactttatcagcaaagcaagcagagttggagcctttaaaaattgatcccatctgcaggaaagtttttgagcctttccatttcccctgcaaaagccagagatgaatcacttctctttaattaatagtatgtatgatgagctatgtttggctgagtacttgtaactgtcagaagaaggatggtggtgagtggtctttgtctgcctaaacccagagtttatgtagaaagcattgaatgttctgatcagatgtgactaaggtcaaggaaaaaaaattgaaatatcttatttaccatttcctctttttgagtcacttaaattggacacctttggtaccctggtctcagtatatgctattctggcccaaatgttccattattcagctggctgataccacatagatagcttgacaaggagtgctgtctgtccttaccacattttcagcactcagcacagtgccttgtgtataataggcactcaatttattataaatcttcagtatgtcctgagaacagctttagtcatggaatactgggagaaggaataactttcacaaaataaacttaaaacagcctgtaattattgaggttcatattcttctggtatatcattctgagaaattgtggctaatttagaacattgtttagaattgacaaaaggccctggcaattaaattgtcaaggcccaagggctaattttaattttctttttacttggagtcattcattaatttctcacatgggattatggagtatgaagtattatctttgaatgaaattcctgggctgatctgccttacataatcacataaggtcctttgcttttctttgtgttaagagggacttgcctctgtaaatgaaaatgacaatgtgcttttcttgtagttgactttcatgtcactcactataaaataggtctcttaacctggcaccagtataactataaagcactagctgagaaggaactgatacttacatttcatggacagcattaacaagaatgagataaatttgtactttttagatcaaaacaaattacctaattgcaaaagagaaactgaaatggaacatagtctcagattcttctaatgtgtatctcacaatgtcatgtaatgtaaaggaaacccttttggaattagaattcttgttctgatgctgaactatttggtaataaagtgcttatttgcagataacagaacaaatgtgttggggttttttttaatcccaaaacagcagcaaaattataaaatgtcaacctcatgtctcttagatgtacataaataaattggatatattatgctcttatcaagcagttactcggataaagtctcataggaaagcccaccctagaccacaaatagcttataaacaacctaattatcattcatattattgtcttggtctgctctttattggtgaggtgacttttttgaagactatttttgtagagcagttttaggttcacagcaaaactgtgaagaaaacacagttttcccttatgcctcatgccctacacatgcgcagccttccctgctgtcaacaccccccaccagagtggtgcatttgttatacctgatgaacctgcttggacacatcattatcacccacggtccatagtttacattagggtccattgttggtggtgcacattctgtgagtttggacaaatgtataatgacctgtgtccatcattattgtatcatagagagtggtttcattgccctaaaaatcctctgagctctgcggaattcatcccttcctcctttgcccctaactcctggcagccatggatctttttactgtatccatagttttgccttttccagaatgtcctatcgttggaatcatacagtatatagcctttttggattggtttttcacttaataatatgcaattaagtttccacaagtcttttcgtggcttgatagctcatttctttttagtgctgaataatactccattgcctggatgtaccacagtttatccattcacctcctgaaggacatcttggtttcttccaagttttggcaattacaaataaagctactataaacatctgtgtacaggtttttgtgtggacataagttttcaactcctttgggtaaataccaaggagcatgattactggattatatgttaagagtatttttttttttttaagaaactgtcaaactgtagttcaaagtggctgtaccgtttttcatgtccatgagcagtgaatgagagttctagttgctccacatcctcaccagcattaggtgttgtcagtgttccagatttgggccattctaataggtgtatagtgccatctcatttttgttttaatttgcatttccctgataacataggatgtggagtattttttcatgtgcttatttgctatctgcatatcttctttgatgaggcatctgttcagattggtagccaatttttaaatctttttttaaaattgttttgagttcattgtatattttgggtaacagtcctttatctgatatgtcttttgcaaatattttctcccagtttgtggcttgtcttttcattctcttcgttgggtcacattttgaatccattatttctgctatgatttggatgtggtttgtcctttgccaaaactcatattgaaatttgatccccactgtggtggtgttgggaggccttagggactggtgggaagtgtatgggtcctgggggcagatccattgtgaatagattaatgccctccagcaagagtgggttctggttctcttgggactgaattagttcccaagactgagttgttataaaaggggtttcaggccgggtgtggtggctcacacctgcaatcgcagcactttgggaagccaaggcgggcgaatcataaggtcaggagttcaagactagcctggccaacatggtgaaaccccatctctattaaaaatacaaaaaattagccaggtgaagtggcgggcacctgtaatcccagctactcgggaggctgaggcaagagaatcacttgaacctggcaggcggaggttgcagtgagctgagattggcaccactgcactctagcctggtgacagagtgagactctgtctaaaaaatcaaagggatttcagcgaccttggtttctcaccacatgatctctttgtgcacgtctgccccactttggctttccaccatgacttgaagcagccccaggtccccagcagatgcatctgcccaatcttgaagcttccagccaccagaaccatgagccaaatacacccctctaatttatgaattaactcagcctcagttattctgttacagcaacactaaatggacagagtttctctttaacaaattgcttaaccatttttcttcagactttatctggtagaggcagagtctgagtgtctctagatctaaatctgaatcctgtttttaaaactatatagttttattctgttgttattttaaaagtagcattataccatttgttttcattttttgataagtttgctattttatccaacaaaaaaacattcaaacatggcaagcacctatagcatctgttctggccattagacaaccacagtctttgtttctttggtctctctcccccaccttcctgtgctagctatagctgaccaagcttttatagcttcacagtgtcttcctttttcttgcttatttctgacagggtcttctgaagctcctcagtgcctttttcttttgtgaactcacttcatataaaaattggaacactcaaaggggaacagataagtttactgggggatgaaaaatggactacttttacacactccaccatgggtcagtaggcatactgccagagtacagattgttactctggactcttaccccgttttgctccctaagctttgttttgtgtaggtttacatgcttcttatctctgcacacaacagaataatctatggatttttttttttttttttttttttttttgagacggagtctcgctctgtcgcccaggctggagtgcagtggtgcgatctcggctcactgcaagctctgcctcccgggttcacgccattctcctgcgtcagcctcccgagtagctgggactacaggtgcccgccaccacgcccagctaattttttgtatttttagtagagacggggtttcacagtgttagccagtatggtctcgatctcctgacctcatgatttgccaatttgcctgccttggcctcccaaagtgctgggattacaggcgtgagctactgcgcctggcctttttttttttttttttttaagacagagtcttgctctgtttgcccagcaggctggaggcgcgatctcagctcactgcaacctctgcctcccgggttcaagcgattctcctgtctcagcctcctaagtagctgagaccacaggtgcacaccaccatgcccagataatttttgtatctttagtagtgacagggtttcatcatactggtcaggctggtctcaaactcctgacctcaggtgatccacccaccctggcatctcaaagtgctgggattacagtcatgagccaccacgccctgcccaaattcagtacattttaaaagctccacaagtaatttgatgttcagccaaggatgagaattagtggtttagcccttaaaacttctgacgccaaacaataaagaagagctagttttagatctgagagatgacagatgagtcctgggtgtgggtacatctatctgaaaaaacatgctttctttctggtctttgaggataggcttgccattgacactcctatgggaaggagaaagatttcctttttaaaatttccttctaacagatgagtgtttgaagaaccttagtgatatgagagaaaaggtacattttcataaggacactacattagaaattaatggatccttttttttgcacaagtttatcttagattttcccaaaagttttgtttcctctcttgctcacacaaggaagtcaatgttttagtgcttctaaaataattgtccactaatttacacagagaaaggttaagattttataggaatgaagaagtgccctcatctgctgatagaggtttgtgaagatgccattgaattcattttaaaaaacaaaggttaagaatgttaagtatgttcttcaggttatagttcatgtaaattgccagtcattctggaccttaacatggagagttttatttagaggctggattcttaaccaagaataatgaaaagatgcaactacaaactatataatcttaactatcttattatgcaacccccctttattacatcaacagagttgggagaattgtgaagagaaaggaaaaaatcaaatcttactgttatttttaattcaatctttgtcaaaacacatagaaatacaaagcttaccaattttctcagtaaattcagttaaaaataacattttgcatttaggaagtaactgaggttggtctgtgtagtaaatttaacctttcgtattgtcattgtttaatatgacaattgtcatatgtcaatactactatatatagtcccaagataatggacacacaaaaaaagtattgagaatggatgactatgcttactgtgtattaaaagagcttgtttgaatctcacgtagatattatacagtgctaccatatttctatttaagaagctacacctatggtggaaatttaatatttctggaggtaaggtttgagtcgtcctgtaaaatatctatttagtccaaaggaaaattctactgaaactttacttatgctatgtatactatattggccctaaaatgaggaacaaaaatgtacttctaaaagcaagtttctatgaaaccatccagatgataatagaactagtataactagtttgttcctggccatttgtacctttagaaagctgtaatgaaaaagtaaataggccaggtgcagtggttcacacctgtaatcccaacactttgggaggccaaagtgggcggatcacctgaggtcaggagttcgagaccagcctggtcaacatgacaaaaccccatctctactgaaaatacaaaaagtagccggcgtggtggtgtgctcctgcaatcccagctactggggaggctgaggcaggagaatcgcctgagcccgggaggtagaggttgcagtgagccaagatcgtgccattgcattccagcctgggcaacaagagtgagactccatctcaaaaaaaaaaaaaagtaaatatatgaatttgaatttgccccttttattatagtgagtatttattcattggaatactaaattcatctctagaagtgaacaattctctgccatgcagacaaaattttttagtgtcatttaggctgcttgattttgacgtgacctaagagactgcatttcatttaagatccccgcccaatataaatacagcctactgagatatgcttgctgcttttcctgctctgcgcactttgcctttcttctttcaggaacaaacatgtcactgtcccagaaggaaagaatttcatctgccatgtttttgagaaatcatataaatttaagataatcccttgtctgaaacccttggtgccagatgggtttcataattttgggggagtttagaatgattagaatgataatatggtacgtatgccaaataatacctaacacctaaggtgggtctgggttagctcccaatcaaacatattaatatttctgcagtgaaatgagaatattccaattatgataaagattataaatagctctgtgccagtttacatatggttttgatgccatatgacttttggcacaaaacacacagaatcactggattttaaagctttctcaattttggaactacagataaaggattatagacttgtaatatacataaaggccttttatactttgcattagacgaagagagatacttgctgcccattttgctatgacctcctaatcgttcttcaaacacaccagacatactcctacctctctctgtggaatgtttgactcctgtttgtgtctggctcactctcttgtctccttcagatctttgcccaaatatcactcaagtctttccctgatcactctcttttaaattttaaaactcctttccctaccagccttccttgccctcctctttgctttgtttttctctgcagtctttaatacaatctcacatactatgtattcctcatttattcattcatttgctctctttgcctgaaactagaaagtcagttctgcaaggatggggattttggttttatttattcattgttatagctctagcatttagaactgtgcctggaatatggtagatactagtacatggcattttaaaagaggaagagagtgttgtttgttgtcacatacttggaaaaatatggaaaacatatattctgtttcttactctacagatggactttctaggtgctagacctaaagtggtaaataagaatagataggctgatggttacaatctggggtggggagtggctagggatggggagacaggtaacaagaaaggcaatttcagatggtgggaaatagtcatagatggatgctgttacacttttgaaggagaatgatacaatacacagtgatgattttagcttggtggtcaaggaagccctctgagctgagttctgaaagacagaaaggcactggctatgcaaaactgtgggaaaagagtattccaggcagaaggaagaagaaatataaaagcctaaggtaagaataggcttggcattttaaagaaaaaggttcagtgtggctaaagcacagtgacaaggagaaaattctacaagatgaggatgggaagtcagtaggggctttataattcctgttaagtacttcaagtagagagcaatgtgaatcaatttatatttttaaacaatcatttttgttctttgtggagtttgacagtaaagaaagaaagggaacagggagactggttagaagtctttagcagtggtccagacaagaattaatagatagctcctaagtttttgacttgataaatgtttaataaaatggagaaagaccagggtagaaaaaaaagatttttatttatttgattttagtttatatttggagacattgggtagaggggagtaggaatcaagagttctgttggctataaaagccttgacctctgtgaaaagatcagggctgaagaaataaatttggaaatctctagcatatagagccccttaaaggctaggaatggatgagatactaggagagttatcttctatctatcttctcctagacagaaaagagaacattagtgtacttaatacaaagaacacaacatcagaccattaagactcttaacaactaatttattttaaaatagacaaactattaattgtagaaaatagtaacatagcaattttaaatgtacagttttaaccaatacaaaaaagcaataaagcaataatatctgaagcattatttaagaaatctcaatacacgatctctgaagttcctaaaattctggcactaattctaatgtgaacttagtagcaaaagacccagaaatagtaagcccttgacctaaaaactaactgatttgtatgatattcatgcagaaacaatgatgaaatggagtcaagttttctagtgtcattgttatcaaaataactgtcaaaatagtaagtttgaaacttaaatgagcacaaaataaaattttgttttctaacaagaccagatttctttttaaaaataattctgagttagacaaagtgattttcctaaaagctagctgaagctaccttaaatatcccctattttaagttacagcatctctaaataagttaatcacacaagatagtttaaatacacctttaggtgtaggggaggggagaagcgcctctttttctaatgcagctgttttaatttgaagcttttgcacaaaatcagatagaaacattaatgcctaacccataatgacccttgattacttgtaattttggactagaaataatgtggctttgaacatgccagtgttagaccatactgacttaaaaaaataaaagataaatagacaattgccagttcaaaagatacatggaagacatgtaccattccagagaaaacacaaaccttcccaaattaaggagggcagaataattttgagatgcaattagacaaatctctatgaaaaaaaaattaaggctcctataattaacagtctgtttatggagtaaaattaatttgtatcttaattcttcaggacccagaaacattagaaagtgcacttgggatatactgtgttagggtcctctatacctaagatctggcagaacactttactttttcaagtactagatgggtactttataaattcagtgatctgaatggtataaaaaccaagagtactatcaataatcctcatttaaaaacataagttggatgaagaaaataatcagtaagttcttttacattctgaggtatgaaatctgtttcagtagtatgatagtatcatatggttatactttgcttccagcttttatttaattaaaagcaaaattttataaaacaagcacacagtatatcagattccaatagtaaaataaaatctaatgtgtaaaattagtaatttttttctaatttctaataatatccatttttgcagaagagttcaggataattttggtgaatgggcagtcaatcaaattgcatttggaagatagataggacacattttctaagggtgttcatgttaaattaaaaaaatatacatataaattaataaaaacaagagcaaacatcacctatatgctacaaaagaaggcaaagtagtcagacaggcctgggttatcaggactcccactctagggccattcttactatccataaagcacagcaattttactttggaagaggaaacaatctgctacaactttttaaatggcaggatttacacaagattttcaatcttgtataaataacaatgactaacatttcaagtggcttaggaatcacccaaacaattgcatctgcacattttatatccacaaaaagagctgaagatattaaatgtggccataaacagaacctgggaaagttatacagtcacatctgtgagagacaatgaatccagaggtgtacacagtgtccaccaaggtcctgagatcctcatttctcttccttgtttgaggtatccatgctatcattcattttctgcttttgcattcgtgttcgagtagaagctggaaaaaggatgaagaactgttaacagcattgatggtactgggtaagttggcaagtggctgccatatatattatgctcatgtcaaactgatggcgctcaggaccttgcaaaagcagtggtcttcattctagtatttgacagtaccgtagggagttacagttaatttactgcatatttcaaaatagctagaattgtaatgttcccaatgcaaagaaaaatgtttgaggtgatatatatcccaataaccctgatttgatcattacacattgtgtacacgtatcaaaacatcacatgtacccctaaaatatgtataactatgatatatcaattaaaaaaaaaattccctccccaccccccaaaaaaacagtggtctccaaatctttaaaaatcatatatccctgtgagtaaatttttttccaagcctgtaccacaaaaatacgtatgtatgtacaaattataaaacacataccccaagcaaacattaaaatgagataaatagaacttctactttatgtaccccaaaagatgactttgcatacttcaggtatgccccattttgtaggccactattctagagatgaggtggttgatgcttggcatatacttcagcagactagaatactcggctggcccagactgaatctgccagagtgagtggtggtattctttacaaagctataggttcccttatgtttgcagatgccttgcaggtactgcaaatacatcaaatcatagctcatttaaactgggcatggattttttttttttgagacaaggtcttgctctgttgcccaagctggagtgcagtggcatgatcatggctcactacagctttgaccttctgggctcaagcaattctctcacctcagcctctccagtagccaagactacaggcacatgccaccaggcctggctaatttttggatttttttgtaaagatggggtcttgctatgttgcccaggctggtcttgaactcctggcctcaagcaatcctctcaccttgccctcccatagtgctggtattacagacataagccatcatgcctacccggggcatggccatgttaaaagcatattatgaattacaatatagacaaagccgggatacttattaaatttcttaaaaattcttaacttgattttagaggtaggcatgagttctttataaagaagcacatttggaaaaatggaatgcccttccattctgggcaatccagcattgtatgatgatcttttctaaatgtaattctttaagaaaagctgaagagcatcctaaagaaatgccttagcctcaggggttaaaattctgcctgctttgtcacaattttgtagatgcacaaaggtcctgaactttggcctggcagaggaagctcgccatcatagctaagtgtgtcactgggaaatgtactaactatagcaactgaacacttctctaagaaaatatacatgtttttacagctttcagctcctttttaagtgcatatttgtgggttccaaaatgtttccatatgtcttcaaggcctgattttggttatgagcctcttgtctattttcatgtactgaggggaaaagatgcaactatttaagagttaaaataggaatatgtaagttgacataaaatccaaaaagagattcatttataactagaaaattttgttttagttatttagttttaattacactttaaaaaaatacatagaaaaaaagcatccttttaaatatcttattttcaaagttagtatctacaaagatgtattaaaagaaagcctctcattttaattggtattgttctcattagtgtgtcctgtgacctaggaatgattgttttaacacctatctcctgaatatttgtcttctttcaaaatcccagttccttttcctatcaatggatctggcagcagatactgggaaatgttacactcactaccataactacctaagacaacccaatagtagttagtgaacatttatctctttcctaatgtgctttccatctactatccttggattattttttttgtctagtctcagagtagttttgaatagaattccacttaccctaacatgatatcactctgtataacttggaaaatgacataagtgttctttattaaaattctgatttccagtaatggaaacttttgtttgaaattgttttaagatttgcaaataaggaaagtttaaaaatggtagaatcaaaggttattccttaaataagggtgatgatgtttacatatgctaggtttataaaacttttccctatatctaacactcccaaatagctcctctttgtagttctgctaaagtattttctaactgtagccatttgtgttgaatgtggtcaagcaatgtttcacttcttagtcttcctgcatgaaagatcatagaaagggtaaaaatgaccttcattttacatcatacatttaatccacaaatgtttgtagataaataaccttgattgaattatattttaaatgcataaacaaacctgccaactgaagaaattatacattcttttatataacgaaaagacttcttgcagtgtaaacaattgtttatttcatttacacaaggtgaaaaaagtacttactcatttctgccagtttctgctgaaatttggactctcctgggagatgtttactgcagattaaaaaaatgcaaaacatttcatgtgtatttataaatggaaaactcaaatttccagtaactatgatgctttcgatgacttactttatgctattattttagtgagtagcttttaattttaaaatttaaaaactaaccatctaaaacataaatgtcacaaatttatgatgctatgtattttttcagtggttctcacaaaatacagtggttaatatttttcaagagtaaacatttttaaatttaatgttaagaataacaaaattttatcaatagctttgtaaaaaagatcagggtttattagatatcttcactgaatgttggtatgcaatttgtaagatgtttttaactttgcactacactcatatctattattttgagccattctcacaacttccaaataaacttggcatgaaagaaattggtataagccaggagcagtgctgagactctggattccccagatgaccatctcggctactggaaaacattcaaaactggttcctaccttccatctgcttcatctgatccttcaatatcaaagcgtagttttttcagtggtttaggagggttgcttccttcagcacttcttttgagcacacggtcgctgttacataccatctgatttattttctggaacttctcagaagtctacaaattacagaattctttactttaaatcattaaatgccagtgtttcatagttagcaacctcaagttatagtttgaggtgtgtcaaaaatcaggcaaaggtaataacttcatttaaattttctgcttcattggaccaaataaaagatatgaaaaatctaaaaatcagaataactacctaattccatccccaattaaacacccactctttgtaaatcctcctgtcttttcccatgcagctcacattcttcctccagcaactgcctactctgcaagtcctggttcctcattttcagaacccaccatacaggactacttttcagaagtaggcaagtcagaacagctttctggaaacttgcttttgtcctttttttgttttttaggctattatacaaccagaaggaaggtcacaagaatttgataagagatgatgtgttcaatgaataataatttttgattcactttatgggtattatgttgacaagtcatatagactttctgatagaaattatatctgatttgacggatagattcaacagtgaggattagctttgccaattatactttattttccaaaaattaaactagcgaattctcccaatattaaattcaaaacaggttttgatggtaaatctatttggagcacatatacaatttaacaaaaactaaatcccgtgctgctattaaatgtataatattttaaattatcagctttaagatatggaagtacattcaactttttcccaattattttagaggttatggcaagcaaaaatgtttgaagaccactatgtgatacctagccagttccaactgtccttataaggtcccatagctcctttgtaaagtctgacagctgagcccatcgtgaactatttgtaacacacattttaatatttggtcatctggcatataaacttttacctctccctagttacttgaggcagtgtggtgggcagcctctcagatggctcccaatgaccccacctcctggtattcacctccttgtgtgatcctcctcccctcgtgtgtgggctagatctactgttgtcttgcttctaaccaaaataatatgccaaaagtaatgggctgtcatttccagaattagattacaataagactgtgacctctctcttgctctttatttccctgcctccctcagagtccctgctctgggcaaagcaagctgccatgttgtgaatagcaagcagtactatggaggggcccaagggcaagaaaccaatagaggggccaatagccatcgaggatcagccaacagccatttgaataagtctgccagtgaatgctcctctagtggagccttgagatgactgcaggcccagcccaactgacaccttgatcacagactttggagaaactctggcccagctaagtcatgcctagattattgacccacagaaatggagataataagcgtttgttttaagtcactaagtttgggggtaatgtattatgtagcaacacataacataggcagtcttcccattcctataagaatataagctctctggccaggtgcagtggctcacatctgtaatcccagttctttgggaggctgagacggggtatcgtggaagccaggagttcaataccaatctggccaacatagaaaaccctgtctctacaaaaaatttaaaaattagctggacatggtggtgcatgcctgtagtcctggcaacttgggaggctaaggtgagaggactgcttgggccgaggagtttgaggttataataagtaggtgacagagtgagacactgtctctaaaaataaaaatttaaaaattaaaaatataagctctcaggggaatggagatggtgcaacatattaacagtaatgcatattgaatatgggactgctgaattagtgactttaatggaaggccaactagggttgtggatttgcagcctagaataaatgtttcaaagcaaagctttcccttggatctcctagaatgaagctctgccactttcactgaggcaggatctcatgcaaacaattcctaatcagtgtaccagaaaaagaatatcctagaagtctgagaggaaggacaagcaaaaagtgcatatgtatggaaggagaccagtaggcagggacaggctggtgacatttggatatcgggcttacattttggagtatctcatttcaaatcacactcataatgagtgaatttcaaaattgttttataaagattcctgtgaggttatgtacatacatacatggtatcattgaaagatatttggtctttgtccctggttcctgggacagagctcctaaaacccttcgaatttcatgtgtgataagggtgatgggaccatcttttgttctaatgaggtgatacttggtgggtacctagctaatttaggatggaagctggttgccagaaagaccaagtcttgagtagaagcttggaactttcagccccaccctctatccagggaggggagggggttggaaattgagttaatcaattatgcctatataatgaaacccccataaaaacccctcaacaataaggttgggagatctttggagttggtaaacatgtctaagtgctaggaaggtggtgcaccccaactccccagggacagaagcccctgtgctagggactcttctggacctcaccctatataatatttcttcatctggctgttcatttgtatcttttatgatgaactgataatagtaagtagaatattttccagagttttgtgagtagttctggcagtggatcaaactgtaaggaagaggcactatcggaaccccccaacttcgtattcaagtcagacggaagtgtggtgtagcctggggacctgacacttgtgactggtgtctgcagtgagaccatttttgtgggactgagcccttgaacctgtggagtctgatgctgactctgggtaattagtgtcagaattgaattgaattgtagaacaccagagagttgaagaatagatttgggtgagaaaaaaatctcacacatttggtgatagaaatgttgtgagcaaaaacagctcacgtatatatgtatgtatatacacaaatgtatatatgtattatataatctcaagtggatatttagaaaagttttgaagttcaccaattaggagtatgatttgagattaaacttgatttgaaagtaaatctgagatatatatatctcataaaattctatgcaatatgcctggatgaggtgtttgaataactgcatttggaaattcaaattatagaaagctttaatttcttttatacttacaatgcatactattatatttcatagaaagaaaatactcaccccgaatgattcaccaattgatactaagattctgtcaagttaagatgaaataccaattagtaataaaaaaccatatacaattttgcagagatgagcataaatacatcattctgaactattaggaataccaaattaaaggttacctctaccctagaaccactgacaaactatattcatttgggaattattctaacagtgcccgtctaatcatatactcacctagtctcttagttttaaagcaaaagttataggtctgcaagaacatattctgccattgcccatatttagggagggcaaaggcaagtttcaaggttacccctacttagttcttcataaatcaatgggtaagttatcaaatttctttcatattttctcatttaaaattcaagttatatttggaaaaaacttagaatattaagtaataatcagaattctaattagcatctatattgatatagtaaaggctatttatcatatatcatagagtcagaaatctttattagtctgtctttatttgaaccatataatttatgttctttataataaagctgaagaacatcattagcctgacatgactcgacaaagatttgaaaacatgaacatggaactagtgaatatagagatttttttgccctccaattccttgataagtggccatcactctacatataatatttgattaaccagagtacctaaatgtactgggtagagtgttaagatgctctcctaatgcctggtcaatgatttattagttaggatgttcagaatgtgacgtttttgctgaagaataccaacacagaatttatttcactaaggatcagcaagtagccatcattatcaccataatatggactaattatcactattaaaaaaaactacctaagtatacattttcatatagtggcatggaacaatgtaaattttcttaaatagacatgacgtggcatcttagcagcttagaacaagtagtagatatcagtacacagatatccaactacaagaacaccaaataaataaaggatgatacagagacacatgagagcatttgtatcatattgccaattatttcttacttcatatttttctgtagagtttgaaatttttataatgagtacgtactacttaaataattaaatataccatgcaaatattttctgaaaggccaacatatgcccccttttcttgcccattaggtacaaccatatgggctgataatttctgagatgagactacattaactatactagctaatctgcctcctacttcacacaaataaagtcagtttcaaatagcccatgataacatataattagtcaactgaagcacttcaaagctagagagcacttgtggttggatgtggaagataatataatgatttgtagttgcatacaacctttcatctgagaatttaaaacagcttcatactcatcatttccctgatccacagcacccttgtgaagtacagatagagacctgcccaaggtgaggtggtaaagaggccgccagcaggattagggatggacctctaaagacttaattgacagtaatctacatttaatataacaagcaaaaggaaaaaaatccacaggaagcaaaacttacaggacatccaataaactgcaaactaaaagtactcaacctaaagtaacctgctttgtttagcagattggctatttaaaaaatataaaagtgttttgaaacatataaccaaactggttctcaaattgttctcaaaagaagatacctaacagtcaggaaagctgataactaaatctgtaaacccatccaagtaaatagattttcttttttttttttttatttatattttttattatactctaagttttagggtacatgtgcacattgtgcaggttagttacatatgtatacatgtgccatgctggtgtgctgcacccactaacgtgtcatctagcattaggtatatctcccaatgctatccctcccccctcccccgaccccaccacagtccccagagtgtgatattccccttcctgtgtccatgtgatctcattgttcaattcccacctatgagtgagaatatgcggtgtttggttttttgttcttgcgatagtttactgagaatgatggtttccaatttcatccatgtccctacaaaggacatgaactcatcattttttatggctgcatagtattccatggtgtatatgtgccacattttcttaatccagtctatcattgttggacatttgggttggttccaagtctttgctattgtgaatagtgccacaataaacatacgtgtgcatgtgtctttatagcagcatgatttatagtcctttgggtatatacccagtaatgggatggctgggtcaaatggtatttctagttctagatccctgaggaatcgctacactgacttccacaatggttgaactagtttacagtcccaccaacagtgtaaaagtgttcctatttctccacatcctctccagcacctgttgtttcctgactttttaatgattgccattctaactggtgtgagatgatatctcatagtggttttgatttgcatttctctgatggccagtgatgatgagcatttcttcatgtgttttttggctgcataaatgtcttcttttgagaagtgtctgttcatgtccttcgcccactttttgatagggttgtttttttcttgtaaatttgtttgagttcattgtagattctggatattagccctttgtcagatgagtaggttgcgaaaattttctcccatgttgtaggttgcctgttcactctgatggtagtttcttttgctgcgcagaagctcttgagtttaattagatcccatttgtcaattttggcttttgttgccattgcttttggtgttttggacatgaagtccttgcccacgcctatgtcctgaatggtaatgcctaggttttcttctagggtttttatggttttaggtctaacgtttaaatctttaatccatcttgaattgatttttgtataaggtgtaaggaagggatccagtttcagctttctacatatggctagccagttttcccagcaccatttattaaatagggaatcctttccccattgcttgtttttctcaggtttgtcaaagatcagatagttgtagatatgcggcattatttctgagggctctgttctgttccattgatctatatctctgttttggtaccagtaccatgctgttttggttactgtagccttgtagtatagtttgaagtcaggtagtgtgatgcctccagctttgttcttttggcttaggattgacttggcgatgcgggctcttttttggttccatatgaactttaaagtagttttttccaattctgtgaagaaagtcattggtagcttgatggggatggcatcgaatctgtaaattaccttgggcagtatggccattttcacgatattgattcttcctacccatgagcatggaatgttcttccatttgtttgtgtcctcttttatttccttgagcagtggtttgtagttctccttgaagaggtccttcacatctcttgtaagttggattcctaggtattttattctctttgaagcaattgtgaatgggagttcactcatgatttggctctctgtttgtctgttgttggtgtataagaatgcttgtgatttttgtacattgattttgtatcctgagactttgctgaagttgcttatcagcttaaggagattttgggctgagacgatggggttttctagataaacaatcatgtcatctgcaaacagggacaatttgacttcctcttttcctaattgaataccctttatttccttctcctgcctgattgccctggccagaacttccaacactatgttgaataggagcggtgagagagggcatccctgtcttgtgccagttttcaaagggaatgcttccagtttttgcccattcagtatgatattggctgtgggtttgtcatagatagctcttattattttgaaatatgtcccatcaatacctaatttattgagagtttttagcatgaagggttgttgaattttgtcaaaggctttttctgcatctattgagataatcatgtggtttttgtctttggctctgtttatatgctggattacatttattgatttgcgtatattgaaccagccttgcatcccagggatgaagcccacttgatcatggtggataagctttttgatgtgctgctggattcggtttgccagtattttattgaggatttttgcatcaatgttcatcaaggatattggtctaaaattctcttttttggctgtgtctctgcccggctttggtatcagaatgatgctggcctcataaaatgagttagggaggattccctctttttctattgattggaatagtttcagaaggaatggtaccagttcctccttgtacctctggtagaattcggctgtgaatccatctggtcctggactctttttggttggtaaactattgattattgccacaatttcagagcctgttattggtctattcagagattcaacttcttcctggtttagtcttgggagagtgtatgtgtcgaggaatgtatccatttcctctagattttctagtttatttgcgtagaggtgtttgtagtattctctgatggtagtttgtatttctgtgggatcggtggtgatatcccctttatcattttttattgtgtctatttgattcttctctctttttttctttattagtcttgctagcggtctatcaattttgttgatcctttcaaaaaaccagctcctggattcattgatttttttgaagggttttttgtgtctctatttccttcagttctgctctgattttagttatttcttgccttctgctagcttttgaatgtgtttgctcttgcttttctagttcttttaattgtgatgttagggtgtcaattttggatctttcctgctttctcttgtaggcatttagtgctataaatttccctctacacactgctttgaatgtgtcccagagattctggtatgtggtgtctttgttctcgttggtttcaaagaacatctttatttctgccttcatttcgttatgtacccagtagtcattcaggagcaggttgttcagtttccatgtagttgagcggctttgagtgagattcttaatcctgagttctagtttgattgcactgtggtctgagagatagtttgttataatttctgttcttttacatttgctgaggagagctttacttccaactatgtggtcaattttggaataggtgtggtgtggtgctgaaaaaaaggtatattctgttgatttggggtggagagttctgtagatgtctattaggtctgcttggtgcagagctgagttcaattcctgggtatccttgttgactttctgtctcgttgatctgtctaatgttgacagtggggtgttaaagtctcccattattaatgtgtgggagtctaagtctctttgtaggtcactcaggacttgctttatgaatctgggtgctcctgtattgggtgcataaacatttaggatagttagctcctcttgttgaattgatccctttaccattatgtaatggccttctttgtctcttttgatctttgttggtttaaagtctgttttatccgagactaggattgcaacccctgcctttttttgttttccattggcttggtagatcttcctccatccttttattttgagcctatgtgtgtctctgcacgtgagatgggtttcctgaatacagcacactgatgggtcttgactctttatccaacttgccagtctgtgtcttttaattgcagaatttagtccatttatatttaaagttaatattgttatgtgtgaatttgatcctgtcattatgatgttagctggtgattttgctcattagttgatgcagtttcttcctagtctcgatggtctttacattttggcatgattttgcagcggctggtaccggttgttcctttccatgtttagcgcttccttcaggagctcttttagggcaggcctggtggtgacaaaatctctcagcatttgcttgtctgtaaaggattttatttctccttcacttatgaagcttagtttggctggatatgaaattctgggttgaaaattcttttctttaagaatgttgaatattggcccccactctcttctggcttgtaaggtttctgccgagagatccgctgttagtctgatgggctttcctttgagggtaacccgacctttctctctggctgcccttaacattttttccttcatttcaactttggtgaatctgacaattatgtgtcttggagttgctcttctcgaggagtatctttgtggcgttctctgtatttcctgaatctgaacgttggcctgccttgctagattggggaagttctcctggataatatcctgcagagtgttttccaacttggttccattctccacatcactttcaggtacaccaatcagacgtagatttggtcttttcacatagtcccatatttcttggaggctttgctcatttctttttattcttttttctctaaacttcccttctcacttcatttcattcatttcatcttccattgctgataccctttcttccagttgatcgcattggctcctgaggcttctgcattcttcacgtagttctcgagccttggttttcagctccatcagctcctttaagcacttctctgtattggttattctagttatatattcttctaaatttttttcaaagttttcaacttctttgcctttggtttgaatgtcctcccgtagctcagagtaatttgatcgtctgaaaccttcttctctcagctcgtcaaagtcattctccgtccaactttgttccgttgctggtgaggaactgtgttcctttggaggaggagaggcgctctgcgttttagagtttccagtttttctgttctgttttttccccatctttgtggttttatctacttttggtctttgatgatggtgatgtacagatgggttttcggtgtagatgtcctttctggttgttagttttccttctaacagacaggaccctcagctgcaggtctgttggaataccctgccttgtgaggtgtcagtgtgcccctgctggggggtgcctcccagttaggctgctcgggggtcaggggtcagggacccacttgaggaggcagtctgcccgttctcagatctccagctgcgtgctgggagaaccactgctctcttcaaagctgtcagacagggacacttaagtctgcagaggttactgctgtctttttgtttgtctgtgccctgcccccagaggtggagcctacaaaggcaggcaggcctccttgacctgtggtgggctccacccagttcgagcttcccggctgctttgtttacctaagcaagcctgggcaatggcaggcgcccctcccccagcctcgctgccgccttgcagtttgatcacagactgctgtgctagcaatcagcgagattccgtgggcgtaggaccctctgagccaggtgtgggatatagtctcgtggtgcgccgtttcttaagccggtctgaaaagtgcaatattcgggtgggagtgacccgattttccaggtgcgtccgtcacccctttctttgactcggaaagggaactccctgaccccttgcgcttcccaggtgaggcaatgcctcgccctgcttcggctcgcacacggtgcgcacacacactggcctgcgcccactgtctggcactccctagtgagatgaacccggtacctcagatggaaatgcagaaatcacccgtcttctgcgtcgctcacgctgggagctgtagaccggagctgttcctattcggccatcttgcgttgcttaagtcgtaaatagattttcttcaccccgcccccatattcttattatgttacttaaataagcaaatagagtttcaagagtctagcttatttgaaatgaagaatgctttatattttttattcttggatcaaaataatccccctctcattctttactacttccctaaagagaaaacacacaccttgatcttggagtcatttttgttggtgttggcagaccttctgaaattttatatggactcttcaggggtgaaatatagatgttccctccaggaatccgtaagggtgaactaggaaacttgtaagggcttcgaggaatgtgaggtattggtgacaaggtagggggctagagcaaaaacaaaaaagtagattatttatttaatgttttggtggacccattacattagatttttccaatcaaaggatacttttgacctaccctggtggaagcatactgcaaaatatttgttttcagtctctgcatgaagaccgagttatagaatactataatagaatcatactcctcttctttgatcaaaacacgtttgaatgtctgaggaagaacagtaaaaaaaaaaaaaaaaaaaaaaaagtaaaatttacttgttaaatgaattttaaaatttctacctttagattttcttttctaatagtttataatactttttgactggtaagaagcacatattataaaggaaaaaataataaataaataaaattacttcttaggcttggattatagctgctcttctagaagtgaaatgtcacagaatgattgagagaaatagccaggcagcagcagatggaagagctggccatccaagaagagaagagtatatagactgggaagagaggagtagatagactggtagaatggaaagcatgatgggaatcaaagggccagagctgagcgaaagccaataatattatccaccaatatttggactacattctctggcctgtacctcccggtatcccccccaatctataagggtttcagtatacattacgcaattgcaagaagtagacatttagtaaaagcactatattttagtgatagttagatttcactcaaattttagggaaaaacacagaggttatatcagatgcctctgatatatacaattaaaatgattgaatttagaaaataacttcaaacatacaaacaaaaatgacttggtttgtattacttttgaaaactccaataataaatgggaaaaatacccctcaactcactttccacagaacaatatgaaatgtgtcataccaagtatattttactactactatttctctaaagggaaggtaaaccggaaacacaaaatgtgtttatactgaacatttgtattattgatttgcaaggctgcatttatactggcttttcctataaagtaataaaaataacttcaaagaatatctaatgttctatgactcatgtcaagtttattacaaatacctgcttattacagggataaaatattatttattaactttataaaaaactatgaatatgggtaatttcataattacccttatctttccaattctatttaagttacaaataaataatataaaagtttttatttgtgaatttacataataaggtcagacagaatatatgatctcattaatgaataaatgagatcaaatgaattacctatgttatgttatggatatggatttatcaaaaaaacttactatggaaaattacctacctcctgaacagcatgaggaagatccttgtatgctgttacaatgattttgaatttaaggtctatattcttcactttgcatatgccatacatggaacacatcataatctagtaaataaattgatgtaaaagtagtcagaattttattacatggttttgttcttaaaaaataccattttctttcttttagcctcaaaaaagaaaggtttaatctacagagttatttctttccatactgagctcagtttgaaagtctacatgaagtgtttaacccaaagtgtgtttaaagaacaaaatgcaaatcaccaaggctcaattattcaggactgatcacctggtttgtaaattaccctaactttggctcttgtcccttaaatgtttcccagaaaagttgaaagtagaatcagttaattttgtataactagcactttaaaaagccaggtgtgaaaatgtttcaaactattagataaaataatattgaacacacttggtggtggtggtaaggaggctatggtgactggaagagcatgtaagagagtcttatgtgttgctgacaatgttttgtttcttgatctggatgctggttatataactaagctcagttgatgaatttttgttagaatgtatacttttgatacacaggtttttacatatgtgtattacatttcaataaaagatattttaaatgcaaaaataagatctgaaaatgattccctgtgactttaaaatgtcagattttctttatttgtatgaactttatagcctaatttaagtactcattgcttctgcaacattcttgctcttacctactattgccaagaatgccaaataatcatttttgcttggcatcctacagccaagtgtacagtgtagtcctgacataagaatagcttatgtagatctcatatgaaacagaattgagagtccagaaataaatacttatatatttacagtcaactgattttttgacaactgtcaatgaagagagaaaaaaactcttcaaaaaatggtgctggaacaactagttatccacaaacaaaagaatgaagctggacccctacctcaactatattaaaaaattagctcaaaatggagcaaaacctaaatgtaagaactacaattataaacattttggaggaaaacagggataaatcttaacaacttcagatttggcactggtttcttagatatgacactaaagcatcaataacaagaaaacaactacataaattggacatcatcaaaataaaaaacttgtgtttcaaaggacactaacaagaaagtgaaacaactcacagaatgggagaaaatattttcaaattatatatgtgataagtgacttgtatgtagactacataatgaccccttacagttcaataataacaagacaaataactctattaaaaaatgagcagtctgggcatggtggctcatgcctgtaatcctagcactttgggaggccaaggtgggtggcttacttgagctcaaccattcaagaccagcctgagcaacacggcaaaaccctatctgtacaaaaaaatacaaaaattagctcggcgtggtggtgtgtgcctatagtcccagctactcaggaggcagaagtgggaggaacacttgagcccgggaattcgaggctgcagtgagctgtgatcatgtcactgcactccagcctgggtgacagagtaagaccatgtctcaaaacaaaatgggctgggcatggtggctcatgcctgtaatcccagcactttgggaggccaaggcgggtggaacacaaggtcaggagttcgagaccagcctgaccaacataatgaaaccccgtctctactaaaaatacagaaattagccaggtgtggtggcacacacctgtaatcccagctactcaggaggctgaggcagaagaattgcttgaacccagaaggcgaagattgccgtgagccgagatcgtgccactgcactctagcctgggcgacagagcaagactccgtgtcaaaaataaaaaaaataaataaaaaataaaatgggcaaacggtctgatagacatttctctaaagaagatatacacatggccagtaaacacatgaaaaggtgctcaccatcactagccatcagagaaatgcaaatcaaaccacactgagatgccattttatacccactaggatggctattattaaaaaaaaaagataaaaaagttggtgaggatatagagaaattagaacctcatacattattggtaggcatgtaaaatggtatagccactttggaaaatgatctgggcattcctcaaaaagttaacatagaattatcatatgacctagcaattctactcctaggtatgtacctaggagaaatgaaacatgttcatgaatgttcacggtaacattattcataatagccaaaaagtggaaacaacccaaatgtttatcactttatgaatgataagcataatgtggtgtatatccatacaatggaatattgtctggcaatgaaaaggaatgaagtactgatacaagctacaatacagatgaaccttgaaaacattatgctaaatgaaagaagccatacacaaaagaccacatattatataattccatgtatatgaaatgtctagaagaggcaaatccatagagagaaaatagattagtattgccttgggctgagggggtaggggaatagggggtgactgcttgagggtatggagtttctttctggtgtgatacaaattctaaaattgattatggtgatgtttgtataactgtgaatatactaaaaaccactgaattgtacattttaaatgggtggtttttatggtgtgtgaattatttcagtaaagctattaactatatatgtatatatttttttaattaacaaaatttttttgagacaaggtcttgctctgttacccaggttggagcacagtggtgtgatctcagctcacttgcaacctccacctcctgggctcaagaaatcctcccagttcagtctccgaagtagctgggaccacaggtgcaagtcaccacacctggctaatttttaaattttttgtagagacagagttttgccaggttgcccaggctggtctcaaactcctgagctcaagcgatctgcccacctcagcctcccaaagtgctaggattacaggcgtgagccactgcacccagccaaaagtatattgttcttattaacctattttatagagaaaaaggaggagatgaaaaatgattctctcattgtaaactaattgacttcattcattcattcaataggtattgttttaaatcaactgattcttaagtctcatgcttttttcacactaaaatgatatctagctcactactacatagaaaaagccagtgataagaaggttcttcagctattttttttacaggtaagatcttttgtgtcattaaataagcagttactaaaatatactcttgagtgttaaagctctaatttgtaagaattacaacaaaaatgtaaatggtagccaaaaagtgaacatatattaagtctaataaattgatctagtttctcatttgaatctaatattttctttagaaatcacttaacaaggctgggtgcggtggctcatgcctgtaatcccaacactttgggaggccttaggtagacggatcacctgaggtcaggagtttgagaccagcctggccaacatggtgaaaacctgtctctactaaaatacaaaaattaacaaggtgtggtggtacacgcctgtaatcctagctacctgggaggctgaggcaggagaatcacttgaacctgggaggcggaggttgcagtgagccgagattgcgccactgcactctagcctgggtaacagagtgagactctatctcaaaaaaaagaaagaaagagagaaagaaagaaagaaaaagaaagaaagaaagaaagaaagaaagaaagaaagaaagaaagaaagaaagaaagaaagaaagaatcagttaacaagtaagtagggaggagagaaggtgaagtgcttgattttcttacttggtccaaatgcctgtctctcatgagttcatactcattctgcagggtgtgctggaaaagggtccagatgatatgttctaattctgggtgctcagacagaaggcgttcacaaagtgtatttagccggagataggctagccgatacactgtgggaataagaaaaattagtcatttttactgttcattttgaattacaagtagatttttttcaaatcatgaaatcgctctaattataatgctgttaagtagcattttaacagaaacctcttttctaccactcttttctttcccccagagaaacatgtttactggtttattatgaggcatattacaagggatacagatgaagaaatgcagagggcaaggcatgtgagaaggggcatggattttccttgccctccccaggcatgctattctccaggaacctccagttgggcaaatatccagaagctcccagaaccaggtccttttgagtttttatggaggcttcattatgtaggcatgagtttttttaaaaaataggtgtttgggggaacaggtggtgtttggttacatgaataagttctttagtggtgatgtttaagatttttctaccactattttccttaaaaataattgattccttgtgttagcacatttctaggtacatataaggcagaatgatacttgctgaattaactattatggcatgaaattggggcagaggtgggaagtagtggaggaaaggtcataagacactgtaaaattagacaaacccaatagggtttgtttcaattctattaataatcactcaccactggtcattcccactatcaatattaaagaggaataatcatttttttaaattatataattgccagtgtctatgaatttttccaatcctaaaaaaattaaaccacacatttctctataaaataccaatggaacatactctgttgaaaaatggtaaacttgtagattacctatatgtaaaatgactgcaatatgtaatttatttagtttataaaaaatactactgaaaatgcaaatttggcaaaaaggaatccataaaattgaattttccttcatctactttaaatatcatataaagaccttttatatatctctttcaacgacttgcatgaggtaatttgaaatttttaaagctaacaatttatctcagtggtcttaaactttagcatacatcagacttagctggagggttgttaaaacaaggttttgagggccctatcttaagagtttctgattgagcaggtctaggctggagccccagaattctcatttctacaatttccaggtgatgtggattctgctggttgggaacgacactttgaaaaccactgctctaacctaaggataatatctgacaatatgcctgtaaagctcagcataattcttacttgaataaaatcaggaaaaagattatcatggaggaacatgaccttttactgtctttcaaagagctccaagtggatatgcactaggaagtatatacgcatgcacagacactcaaatcaacctccccaccccaccatatatacacactcagagaatgctacatgacctggttactggccttcttaaatgtcctgaaaatatccaggaaatgtgtctgcagtaggcaacaacacactacttttgtatgtacatcacacctgctgcagcagagaggcgtggatggggcggcacgctccaggaagcccggaggagccggggacaagcaggaaccccgccccttccgagttgggacaggagctccccagtgcttctgcagccgcccaagccaccgctgcggacccaggcatccctgtgctctctgggctggggagcaggtaggagtcccaccctccccagtgcagctgcagctacccaaaccgtggctgtggacccaggcatctctgtatacttgggggccggggaaggcaccccccaactgccaccgccctcgcaggctcagaagtgcctgctcccactgcctggtttctccctgctgccagcgcccactccaatctcggagcaaagtcagggctgagcctgggtgctgctgcagcccagccagatgtgcgcacgctcaaggcagcgctgacacgccagccccctgccgcctcagccctctccagactttgggcgctgacgagcacgggggggaagccgaggcgggggctgagggcagcttggcactggcctacaggtgccccttgacgcatggatggcggcaggaggcagatgggctcctgagcagtagaggatgagtccctgttgaggccccaccttcaggccagggagcgcctgaaggctgggggtgggcgctgccagtcccacggacaggagtgaggacttgtggtaccttttctgggcccactagtggccgcccatgtaccaatcggtgcacactttcttcccgctgaggcccacagaagcccgagtctcagccagagcagagcagaggatggagagacaactagctgcagagaggaactaccctctctactgatagctgaacacttgtcaggacgagcagctgcagagaggagctaccctttctgctgagaactgaacacttgttgggacgacctgcctgcagagaggagctaccttctctgctaggagctgaacactcatcgggactttgtggttacagagaggagctgcccactatgggtcttctctaagctgttctattgctcaataaatctcctcttcatcttgctcaccctccacttgtctgtgtacctcattcttcctggctgcaggacaagaactcaggacccaccaaatggcgaggctgaaagggctgtaacacaaacagggctgaaacatgccccttgctcgccatgttgtgggtaaagaagagagaagagctgcggcccttcggggagcccagaattgggagctccttgagccagggctgtgactccctctttggggccctgtggtttctggcgtctccaagcttctgggagccattttattgttccccagtgccagctgtggaaaccgcttgtggtgtgtctggtccaggtgcagcctcacagagagttggcacctgtgccagcacctggagctgcccgccccgctgcagcagccagcatttctgactgtgggcaatggccagatctcatgcttgcccacacacccctctccgttccatgtctgacttgctcctggctggcatggacccaggccggtagtgtgagccgagtgcagcctgtcagaccaaggggctgaaatgagcccggtgggcctgagcaaaaattgatcaagggcgccaccggtcacagaggtttccggccagaaaaacgactctgaatagtcaagaaagatctcgcaacattatcatttccattttatagatgaggaaactgagacacagagatattaagtgacttgcccagtaatgtacctagaaagtagaagaaacatgatttgaacccagtcagcctagtttcagagtccatgctcttgaaaataatcatctactaaccttttttataaaacagtgaaagagaggtagatttcaatggcttctgggtctggaaggctgaggttgcttgtgtctctgcatttgcagtagaatttacacgcgtagttgaaccttttttctttggagatcttacaggagaaagatacctagatatatttaaaggaaaagtcttcatttcaagttggctaagaatcacagattatacatacacttcaaggttgtacacccagatacatcttgtctatttaattggtattatagcagactatttaaatgcaagctgggaaagatatattaataggaaaactgcttgtcatcatcatatctaattctattttaataaatggcttttcctggggattactgccttattagaaaaaaatagctatatatgtataatgtacaattttaataattatagtggtattgagaccataaggtgattccagcttaaaaaacaatttattgatattaaatactgttatcttgtttttgtgattctccttctaaaaatttttttagcgataactatggttcatatctaagatttcagttatacacacagatttacacacacctaaattacacagtacagaattctatgaattaatacttcaaataacattattcagacagatttacaccatactaaatatgtcaggcataactcaaggcagagatattacaaatattatcgttctgtgctgcccctatttaacagaataatctagatctactttctgattttcttttggtagctggcaaatgaacttatttttaaagacaaactttaagaacaaagagaacaggaagtagaatttgtaccttactatggatgtttctacaacacgtagtatattaaccagtacactaagaaaagcgacccattatcacaatgattttagaaggaccagtgtctggtctagtatccactttggattttcattcagttcactgacagtatcgtaaactggcctaacttgggcaaagttagtctctgaagttctaggtgtaaatctccaattacctaccggatataactactcgaatctcagacttaataagaacaaagcagagctctggatttattttcccatctcaaagaatagctccacattacatctagtgtcttaagtcaaaaacctagggttatttttaatttctccattttccaaattcctgaaatccaacataaaaccaatgtaaaacctattaatttatctctaaatacaccccagatctctccatttctatttctaataccataccttagaccaagtcacctacatccctcatctgaactacagaaatagtctccaaattggtttcctcgctttttgccttgccctgtccctttcctccaaacccacctgtacttcagatagcagctagagagtggagatctctacaagatctaccccagcttagctcttcagtctcatcttgcaccattctcctcttccaataccccagccacactaggatttctttctttctgttcctaaatccagctaagtttgatctgccctacagccactgcacttgctgtttgttctgcctggaatgcacatcatgcaggtttttgcctagctagcatcagcttgcccttcaggtgtgacgtcaaaatatcactttatcagagaaaggaaagtgccactaagcattctatcagcctctccgtttctctctttcacaccactctgtttatttcctttgtagcacttattatactctaaaatcatcttacatcttggtttacttgttcattgcctgtgttcctcctccagaatgtaagctctatgaggggaaggacccaggccatcttacttctgtattcccagtgcctacaccacttcctggcagtttacagatgactgcttcttgaattttaaaaaaacaaggcttaacttatttatacaatgcattacttaggaaacaaatgtatacatgaaggcagggtctccatatgccagaaacactttgggtacaagttagcatgaaaatgacatctctggaaaatggcccctgcactaatacagaatactgtaatgtcagttcctacacagaattaaacagaaacaaaatattaggcacatttctgtgaaaggcaatgtagttagagtgattaagagcctggactttgggattagatagcttgggtttgaattctattgaccttaggcaagttatcttatttctctaattcctattttatagttaacaggctgacagcagtatctgttaccttatgggctgttatgaagattaaatgaaaaaataaatcttaagtacttaggccattgcccagcacacagttagtgattgcttttgtgaaaggaaaataaacacttgggaccccaattcactatgccaaaaggaaaaaattaagctgaaatctgagtcatgcaagaaactgcctttccttttgttcccacacaaataaatacagataaaaggttaaatacctccacagacagtgactctatgttcaccttatcttatgtaaaatgtcgattcactcagcatgagatggatagataattgacgattcctctacctgctctttttctcttgcaacatgtggattaccataccctttttctttcccctccagactgactttcccatttaaatattggagccctcaaaatcatcactggagaaaggcacagatctctctcctgggcacgtccttaactttggcaaaataaactactacattgattgagacctgtttcagatacatttgggtttacattttcttttcccatcgtcatcaccagcacacactaatcaactgtgtgttagtccacatcccatacttctccctacacttatcctatgcttcactccaaatggactgacctgcacactctgaaaaatgttttctgcttcctttgacatttttgagttaatgccattctgactcttggaacacactcctctgtctcctctattctctccagtttccacattgaaatcctattccacctaaactgccaactctgccatgaaaactgctctcattatgcaaatcctaggtgattcagtagcactctgtactcttttatatgactttatttgggtcatgtaccttttattactaatttcttaaaaacagaaactattcttattcaaaattctattccctacagtttctttatagaatgttacattgcacttatgcttaaaatctatttgcagtttgaatggtcaacataacatatattttgcttacatatctgctgcagtgtgattattctggagaggaagattaagaggacaagcagattcaaggtgatcagttggtccttctcggtcctttgattgtttaataagatcaaataaaggtgaatcctatatgaaacatgatgaaattaaaaccacattagtaagcataattttcccaggtacatatcaaaatcatattgtttgacatggtaagtactatgaattttaggcacaattgacagtggcaatttaaaagtcagaatgaaatatttttctctacttcgaaattcccaattgacaatttttgtacttcccacacacaaaaaagtagaaaaatgtataaccttcaacgcttatattagaaaataagttagaagttaggaggaaagacagaaaaaaaacgaagaaagtggagagaaagaaatgaagacatgagcagaacttaatgaaactgaaaacaaagataaaacacagtttggtcaacaaagccaaaaatggattctttgaaataactaacaaatctccagtcagattgatcaagataaagaaaagagatagataggcagtattaggtatgaaaaatgggacaaaatcacaaagattaaaaagataatagggaattattatgaataattttatatcaataaattggaaaacgtagaccaagtggaaaattactacaaaaatacaaattaccaaaactcaataaaaaagaaataaaataacttacatagtcctgcaactattaaataatttgaatcaataatttaaaatcttcccataaataaaacatcaagctcatttggttttaccagtaaattctaccaaacattcaagggacagataattccacttttactcagattttcttcctggaatggaaaaactagaaacattcctcatctcattttatgaagctagtacaatattgatactaaaaccagttcaaagagcaaacaaaccccaaagctagcagaagacaaaaaataaccaagatcagagcagaactgaaggagacagagacacaaaaaacccttaaaaaatcaatgaatccaggagcttattttttgaaaaaattaataaaatagaccactagctagactaatatagaaggaaagaaagaagaatggaataaacgcaatcagaaatgacaagggagataccacccttaccccaaagaaatacaaacaaccatcagaaaatactataaacacctctatgcacataaactaaaaaatctagaagaaatgaatacattcctgaacacatacaccctcccaagactgaactaggaagaaatcaaatccctaagtagaccaataacatgttctgaaattgaggcagtaataaatagcctaccaaccaaaaaaaaaaaaaaaatcccaggatcagatgcattcacaactgaattctaccagaggtacaaatttctactgaaactattctaaaaaattgaaaggaagggactcctccctaacttattttatgaggccagcatcatcctgatagcaaaacctaacagagatacaacaaaaaaagaaaacttcaggccaatatctctgatgaacagcaatgcaaaaatccacaataaaatactggcaaaccaaatccagcacacaccaaaaagcttatctaccatgatcaagctggcttcatccccagaatgcaaggctggttcaacatatgcaaaccaataaatgtgattcatcacataaacagaattaaagacaaaaaccacatgattatctgtggttgcagaagaggcctttgataaaattcaacataatgttaaaaactctgaacaaactaggtattcaaggaatgtatctcaaagagccatctatgacaaatccacagccaacataatactgaatggggaaaagctggaagcattccccttgaaaaccagcacaagacaaggatactctctctcaccaatcctattcaacatagtattggaagatctggccagggcaatcaggcaagagaaagaaacaaagatattcatataggaagagaggaggtcaaattatcatcttaacccaaaacattcttaagctgataagcaacttcagcaaactctcagatacaaaatcaatgtgcaataatcgctagcattcctatacaccaacaataagcaagcaaagagccaaatcatgaatgaactccaattcacaattgctacaaaatgaataaaatacctaggaatacagctaacaagggaagtgacgggcctcttcaacaaccacaaaccactgctcaaagaaatcaaagaggacacaaacaaatggaaaaacattccatgcttatggatagaaagaatcaatattgtaagactgaccatacagcccaaagttatttatagattcaatgctattcccattaaactaccattgactttcttcacagaattagaaaaaactaattcacatggaaccaaaattcataaaattcatatggaatcaaaaaagagcgcaaatatccaagacaatcctaagcaaaaagaacaaagctggagacatcacactacctgacttcaaactatactacaaggctacagtaaccaaaacagcatggtattagtacaaaagcagacacacagacgaatggaacagagtagaggactcagaaataagaccacacacctacaaccatctgatctttgacaaacctgacaaaaacaagcaatggagaaagcattccctattaaataaatggtcctaaataaattccctattaaataaataaatggtcctcggagaattggctagtcatatgcagaaaattgaaactagaccccttctgtaaaccttatacaaaaattaactcaagatgaattaaagacttaaatgtaaaaccgaaaactctaaaaatcctagaagaaaatctaggcaataccattcgggacataggcatggggaaagatttcatgatgaaaacaccaaaagcaatcacaacaaaagcagaaattgacagtgggatctaattaaattcaacagcttctgcacagcaaaaaaaaaaaaatatatatatatcatcagagtgcacagacaacctacagaatgggagaaaatttttgcaatctatccatctgacaaagttctaacatccagagtctacaaggaacttaaatttacaagaaaaaaacaaacaactccattcaaaagtgggcaaaggatatgaacagatctgaattcatataaattggaaacttctggatgactaaaactacaacaaactaaattaaatggaatctgcagaagataaacaacattggttaaagatgccaaatgaatgcagacattaactctctctcataaaaccccactaaaacggcaataaactgacttattttaaaagacataaacctttcagatacaacactttttttttaagagacagggtcttgctctgtcacccgtgctggagcacagtggcacaatcatggctcactgcagcctcctgagtagctgggactataggaatgcgccatggtgcccagctaattttctgaaattttttttgtagagacagggtctccctatgttgtccaggctggagatacaaaattttgaaagcttggaaggcagatacacaaatggtaacctactcagtaggtgagaaaaaactgaattggaactcagcattaaggaaagccaacaggcaaaccagataaacttttaacccaccaaaaggatgtggcagtggcgataccaggtactttgggcagtgaggtactgagtaacaggataaaaaacctaaagatacgcaatgggggtttcttaagaaattgctctaccaaataactatacaatgaagttcccaaacctcatccaggtgctcagagtttctaactaatttttagtgatttactcttttatatgagtggcaatcaaatatttccagaaagtccctaatataaatatgccaaaacaaaataacaaaaaggcgatctgggagatgcagaaactatgcagggagaagaaatttaaaaagaaagaaaaaaaaacggcgattacgcaacagttctttcaaataggaagttactcatgcctaagcaatacattactaaatactatttttcttatttatcctgctcttaattcactcaataaaaaaaagcatgaagaacaagttttaaaaaagccattagcaataaaagcacaggtcctggaattagagatatataagctcaaattcttgtttactagtttgaagtttactagcaatgaaacgttttgctctctgaacctcagtttcattacttgaaaaacaggaatacagcactcattttgcaggattacatgatacatcacatgaagtgacttcaagtagccacttgaacattcaactcttttctcagctttcagtgatttggcttgattattttatttgaatttcttggatgtatgtatgaatgtgttaaagatgcgctttcaactctaaactttcaggagaaacaaactgtcttttcttaactttactcttttcctttctacatgtcaagtaggtacttgataagctgtgaataaaaagaggcatgataatcatatagtcattacacatatcactgcaaaagtttaacaattttcagccctttttcagtttcagcagaccaacaggagatgggttattatctgtaatagtgactcactacagaaataattcttaaaggtggagatggtgagcatgagttgtctcctatggaggcatcagaagaaaaggtgtcctacaggagctggattttatggcggggagaaaaaagagaaggtggcatgtatgctttggaaaaagaagcagactctacaactccaatcatataatttttgttgacaagtcatcttttcctatattcattaggggcactgcagtgtaaataatggctttcatctgagcaaagtaatgctaacaattaacacttaggaaattcattccagctaatacacatactgttatactaaatattttatacttcctagccatggatgaattgaaaatctttaactaaaatggtatgagtataaacccacatatattcaagagtggcctactaccaatttttctttcaaacaatgaaattttaggagactcttgagaccttgcaaagatgtgtgattaataggacttaagtacactaattagatattttagatacctttcagatatgagataaaatctagttgtgcttcagattcacccaataggattatactaaaagtaaatttctcttccaaggattaaggtggcatttttcaccaatagtcttcatatttcattcaaatatcacttttatcactccatcaccccaaaccaaatggtcacacagatatatagatattggtttatgatgatgagtatgtcatgatcacgggaaaactatagtgcagtaggtaggagcacaaactctggagccacagtacatgggttcaaatcctggccacctgtagctacatgaccctcaataagcttctcaactgtagagcagagatactaatgataatagtagtaacttaaatcatagtatatgagaagtgaattaataatgttaagaattgggaacagtgcttgacacagagtaatatataatatttgatattattatggttgtgattatttacatctatgagtgccattatacaaagaacactctatttcctcaaacgtatgactgtatgcctagttatccatccatccacccagtatatgttgtatgtctatgctaggaagtagagccataaatgtaacaatgctccatttgtcagatactaaatagccttgaaggagtatttcagaagcatctgccctatttgaccttactcaacatcttcacttgatgtctatgtataaaataaactttaatcatcctctaccaccccccaaaaacgactgcttctccctagtctttaccatatcattaaatcactccttgtatccagttgcccaaagcaaaaaagacaaggagtcatcattattattctttctctcatacttatccaagacaccaggcaagtcatattggctctaaattcaaaatatattccaagtttgacttcttttcattacctgtaccattgctagagtcaaagcaattcttatctcttttctgtcccactgcaaaagcatcctacaaactggtttccatacttctactcttgctgcctcctagatgtcctcatagagctaatatgttactccctaacccacctccacactcaaaaccctgcaagagcttcctgtcacacgtagaataaattcaaatgccttatcttggtttacaaaacactacatgagttctggccccttgatacctctcagacctcatgctctaacactcttcttactccagccatcctggtcatctttctattccatgactgtggcataattcttcctttctctgggtttttgtacttgctgtttcctctgcccaaaatactctttgaccatgcttcctatgactcaccccactccattattcacatatctcctcaaatagcacctcctaagcaaagccttgtctaaacatcttgcctaagacagccataattcccatttatttgctactcctacctctgctctatttccttcatagtattgatcaccacttgaggttatgttataaattcatttattttcttatttattatctcgctactagcaagcaagatgcaggaaggcttgggctttgtctatcttattcaatagtatccccaatgtttaaaactacctggcacacagtaagggctcaataaacatttgttgaataaatgaataaagtgagaaggttgatattaagataacttaatctcaaagttttctgagattaactccacctcaaagtgagaataagatttaaaatggggccaggcatggtggctcaggcctgtaatcccagcaccttggaaggctgaggcaggtggatcacctgagatcaggagttcaagaccagcctggccaacatggtgaaaccccatctccactaaaaatataaaaattagccgggcatggtggcacgcacctataatcccagctactcaggaggctgaggcaggagaatcgcttgaacccagagggcagaggttgcagtgagctgagatcgtgccactgtactctagtctgggtgacagagcaggattccctcccaaaaaataacaaataaagggaaccttcttagttatatatactctaaatcctctaaaaatatgtgttatctgctcctttcccccatgttttttacctcaaatgttagtcaaatagaatacgtgtacatgtataccttagccattaagtataaacagataaaccgtttcagacttgggtctttgaaataatactttgttcctacttacacggtgctcagggtctggtgagaagaggcacacaaacaaggaaataagtatgtgatgacaaattcagaaaaatcctatgaaagaacagggttctctcatgaagaataaacagggagatccaggtggatggggtgggttcaaggaaggctgatctgggaaggtaacatggacgctgagtcttgaaatgtgagaaggaggctgtgctttgaaaggagaaggggcagagatcttccaaaagatgaaagatcatatgctaagaaactgatgttctttcagaaaatgaaagaggccaccagaactaaagtacccgggtgggatagtggagaggttgctaaagaagaggttgctgtatgatcacgcagaatctgaaagaccatggtaaaacgtttaaatattctaagagaaacagtaaaccaattacaacagaaactctgttttaggataagtcactaatatagagatagctagttcaattgtgtctggcttcctatcacatcactagcacttagtacagaattggggtcctaaaaatatttggcaatgatgacctgtgttgctttcaggaaagtattccaagtgatagggtccaccataatccatattgctttagctctgttacaagtgacaaaattttctatcaatttccaacttcctagctccaatgtctcaagaatatgccaggcgggtgtaggcacagctccagacagcaaacaactttggggttgtatgcatataactcaggagttaactctattgatctgtgaaattaaaaaaaaaaaaactactatttactcaatttacttaagtctttaacttcatattatgcaaaactgaaaatatataaaaactgttgtgttgttataacgtttggtgtggtaggcctcaggggcaggcctcggaccttctcttgccctcctttaacctgttccaaggcaggactctaatttttcccccatcattgtaaattgtgtgtctttaagaccctccccagagatggtttttgccctatagtgtaggggaggaatgctgacatcataaaaatcccaatgctgacatcataaaaactggattaggagagcttctggatagctgaacacatggaggtttctggagggtgtggcccccagagggcatggaagctctgcacccctgctcccatacctcaccctacgcatctcctcatctgtatcctttgcaatatcctttgtaataaaccggtaagtgtgtttcctttgattttttctttttgttttttcagacagtcttgctctgcggcccaggcaggagtgcagtggcacaatctcagttcactgcaacctctgcctcctgggtttaggtgattctcgtgcctcagcctctggagtagctgggactacaggggcatgccaccacacccagataatttttgtatttttagtagagacggggttttgccatgttggccaggctgttcttgaactcctggcctcaagtgatctgcccacctcgacctcccaaagtgctgggattacaggcttgagccaccgtgcccagtatccttgagttttgtgagcagctccagcaaattaattgaacctgaagagtgtggtgtgagaaccccaatttgaagccagtaggtcagaagttctggaggcctaggatggtgtctgggggtatgaggtatgggcactgagaccccaaccagtgggatctgacactatctccaagtagacagtatcagaactgagttggaggatgcccagctggtatctgctgcttagtgtgtggggaaaaaaacccacacattttgtcacagaagtcttttgtgttgacaactgttgtggtggtatgagagcagaagaaaaacatggtttgagagagttttttcctacacatcactatgttctgggtttttatttcagcaatagcatgtcatcaacaaaaatgtttttcagcttatcttttttccaaaagaaaaaaaaatgtatataagcaatataaaacatagccaggtctaaaagcaacggaggtgcctaagatggaaaatttaaggaggcatttactctcacttgcacaatcttagtatgaaatgtacccttggtgccctgaacactaaactgacaataaaagctagttaatttaagatacactggcaaaatagaatgatgtgtcttttactttcatggtttccttacacaagaatgaaagtactttcagtttaaaaggttttatttgaatgtattacctcatttaatcttcaaaataagtcttaaaattaagtgttattattcattttatgaatcagaaaacttagctattttagtaaactgtgacttaatacattagaaatattttttgagtgtggaataacatttgaagtttatagatattaaaactaaaactcttttaaacttctttttaaaaataaaaaagcaaatgaatagagaagcttcctagaattaaatattaagatatttatgactctttctttaaaacattttattaatttcttatttttcagctttatccatttactgaaaaaggaatcttttttcttagctaaaaaatagctaagcattttttttaagtctttcaaaacagtaatcctttcgctaaattatagactaagaggagatatttttaagaacataacaatgtttaaaggaatagtaatgttatatcaatgacataattttatacacatgaacaaacacattttaaaatgtgtttcaaatggatttattaattaaatgtcttaaaatgtctttcaaagtggatttattaattgatatcttggtcaaaattttcaaagaaaatgagagatatatcaatttgattaggtctgatttcaaaaatttttattttattttaaactaagttactttgtggtgttgggtatttttttaaatatttaaagtattttgaaaagtgcaatatgtaaaatatattttgtgattgttctgttaattttaaaatattgtttaaagaaaggacttcctaactcaaaattagccaagatttctaaaattgggtccaggtttacttgaggatgtctgatataccagctctgggaggcagctccaagggagatgacaaaattcatgtaattaaactaaaatagtcacttatctgaatgaggtgttaacagaagtcaaagtcctcacccatcattactatcttcaattcagtgagggtcttcctcctttctaatagccaggaaaaaaaccttgttaaagagtttttgtggaatttatcctaagtacagtaggaaagttaccttctgaatccaaagaaaaaaatcctgttctaactgaaataagacaaaaatatctatgatgaatatttgcaaaatgaataaaaactcatactatatccatcctggctaacacggtgaaaccccatctctacaaaaaatacaaaaaattagccgggcatggttgcatgcgcctgtagtcccagctactcgggaggctgaggaaggagaatggcgtgaacccaggaggcagagcttgcagtgagtggagatggtgccactgcactccagcctgggcaacagagcaagactccatttcaaaaaaaaaaaataaaattcatactgtaggaagaattaatactataaaaggaactaatacaatgtgagaaacagacattaaaagaggaataggaaagttcttgaagctagcatgtctgaatatgatgaaagtcaaagatgcctcaccaaattttgtagatgtagaaggagtgggttacgactgaatagaaaaacacaagaagggtgaattcgagtttaaaagtcagaaataaacatgcttgtactgctaagtgacaaggcatcaaattatctattaataatgctcatgactaagatttgtgaataagttaaaaacaagtgaataaataggtcctataattaaatgatcaaaattaaagtcatttttaaataattcctgcctcttaactaggatctctataccacagaatgaaaatcaccaggtttttgccaatgggaatctaactggtaccctttacccatatatataattctatgatagcaaattgtgtcaagtttaacctattcctagtgctaaacttttttgttaaaaattgcttgatgattaaacacagtatagttttattttctagtaaataacacttaaaaattaaacaacactattaaaaattgtattggttttttgggttttgctgcttctacttctaggtggacctactccaagttcccagaatttcataatccttaaagcttccaattctgaaacagaactagatctaagacagtaggagtaggcttattagctagtattgggttcctaccaagtgatttttgttgatatgcacatgttactacttctatatgtttggaaacccgttggtcattcttgccctagtgccttaaaatcaaaggttggccagatacaatagaaatttgatatgtaaaggtaacataagggtcttcaggcacaatttagtttcaacacatccctcatgaaaaggatgattagtacccttataaaagggaccccagagagctgccttgtcccttccaccatctgaggacatggtaagaaggtgccatctatgaaccaggaaacaggcctccgccagatatcagatctgctggaaacttgatcttggacttcccagctttcagaactgtgagaaatacatttctgttgtttataagccaccaaatctatggtattttgttaaagcagactgaacagatccagtgtaataagagttcagaaaatctaatgattaatttcaagcttagactatcaatggcctaggtcatccttagaatgtctgcaggattctttttttcttccctacattttaattataagcaaaccttgaatattacaatatagggcattcttagcaatacagatgagagtttaaaatcataattttaaaattgttttctctgataactatgtgttcaatttgctttttaagctcctttcattttctatttattatgaatacattaattttttaaatgaaaagttaagcaagtataagagatgtctcttttttaccttttaacaaagaaaaccctttatctatgagtgcaactacaattttaaatttaactaagttcttcttggttaaaacaaaatcatataattaatactgactctagcccttgatcataaattctttgacacagtagaagaaaggcaaggcagatcgccttaccccaatctttatatatatgaagccaaatactaaatttcaaccaaaaaattaaactttggatcatgtgcccatcaggctatgcatgtaaataacaaacattaaagttaaaaaatatgcattagctatttgtacataagtaaatgaaaattaacagggcccaacatagacaatatcatacataaaagaaagatgtcttcatcaactctagcctccctcctctttgcctcacagaacatagcaaaagttatctcccaaatttcaaccacttctatctcaggaaaaatagttaatattttgtagaacatctgactttagttttcggttatattttatactgtaaactcctatttcctgatatggcttgtaatttatttgggaggcagcatatatcagagtccccaaggaagctttattaaacatgcatgccaggtttcccttttactcccaagattttgatatacccaaaaagagagaatatctacatgtaagaaaagctcctaagcagattctaatgtaatcctactattctatctccttcctaccctattcctgatacttctctcatatacatataaaaatatttagacttatgtatatatgtatgcatgtatctatctaatctcctccaccacctccttaagaagtataaactatatttctgcatttttctaattctgatataaatttctgaaaagtgacttaatattctttcttaaatagcaatattgtgataacagttcaatttcttgtcttcttaggttcaaaaaggccttctttcaaaccttccccaaagcctattttctggaacactaaaaactcaggcaaatttgaggtctatcaaatgtaaaaagtacagactctactgtgaatctcagaaattctctaaatcataacacattcaatagctgacagaagacttttgtttctctttttcccagcatttgggctaaagtgatgatacggtaagaaggcagaatattctgaacatttcattaactttagtttatgaggattaatttttaactttatcccagactcagtgggcaaaaatgttgtgtggactggtgaggatattgcactataaggaagattaacaaccgtaatctttctatcatgcctgatttcgataactatgattaatgattcaaagtcattaccttatacttcatgattctattttatttctctcactacctcactaccaaaattctgtcttcatgattatcttaatttaataatagtactagttaatatttattgaatatctactatatgctaggttctatgctaaatattttacatatattatctcatttaatcttcaaaatacgtccataaagtagatatgtgtattttatagaaattataaattttgccccatattatatggctgataagtgatggagcagtgattcaaacccaagtctacctgtttctaaaacttgtgccgttagctgctatactagtatgggagtcacgttcctttgcttactgcctctttcactctttctttgcccattgtcatgcttttaaccatgtttctaggttgctgtttacccctacaattagttccactggccacaattccatctatcattcattcactgatccattcatctagagatgctaagagaaatagcacattcatagtagtacccactacatagagttgttgtgaaaataaaataacctatataaaaagtttggtatgatacatggcacatgataagcaatcaataattctaccctcaaagagcttaacagataacatttattgaatgccagacatagcaccaaccacattacttatattatttaattctcacaacaaactctagaaagaaggtaattattttttaaatgccattttataagtgaagaaaggtagacaaggagtaaattgtccagtcacatgaataagtggtggatccaggacacagttccaaactgtttgatttcagagcctttgttttgaacttttatgctatagtttacagtctaatgaaaaaaaaaacagataagtaaataaaaaatagcaatacaaagtgctaagtaccagaataaaagaatacacagggtgccatgaaaatcagaagagacaactaactcagattaggagcattagagaaaacttcttggaagagattatgcttgagttgaatcctaaagaaagaacaaattattttaagtaaaaagcagaagaatagtgtgctcagaagcaagagaagaaaaaataatatggccctggggaaacttcatgcagctaatctataagataagaaaaataatgcttactatagggctgttttgacaactaagttagataataaatgtaaagtgcttagaagggcacctggcacacaagcctttgagacagaaatttttctttccataatgctaaaatacagatttcatagcaaggaaatagcaaaatataaactcgctgaaggattttagacaggtgactaccagggttcagatgggactttcagggagttcttaaaataaaattccagtgccaagcatataatggacacttggtaaatatttctagaatattgacatatgatgcagccatatcatgagtcaaattaactacagcaaagcacaaacaagaaaactgataataggatttgttttctaattgacactaagtcataactatggcagccagcctccaagatcaccccaataatctctgacactgggtatttatatccttgtgcagacagttcctaaactgtaccagggttagtctgtgggccaatgacatagggcagaagtgatggcatgtcacttctgagatgaatttataaaaatctgcagtttccatcttaggttctctccctctctaggatctcttccactggggttgaggcagggagctgctatggagtagccctacggagaggctcacatggcaaaaaaaatgaagcccctggccatcagccagcaaagaactgaggcctgccaacaaccacacgagtgaacttggaagtagactctccaatcccagtgaagccttaaactagctgcagccttggttgacaatttaagaatctctcatgaggaaacatgagtcaaaatcacacagtaaagccactcccagtttcccgactttcagaatttgtgtgagataataaatgttagttgttctaacagataattaatatagcaattgatcttttttaactataaagaaaatatttcatggaatacttaacttttgaaagtaaaatatgtatatttctttctaaagcattgtttctatccaggacttgggcagtagttttctcttgtactcaactcatgttattacttatctactcaaattaactgtcagcctaattgctctctgaacaacgcttcactctgttttgctacttagtcttgtgaaggaaaccaggctctcactgtcagcaagattagtataaatttcactgggtaaataatattgatagaaaaagtagaagctataagtctgttctacatgacttttcataactaacatacatttctaaggcaagcatgaacttgtctagaaagtaaaggactccaaggctattaagtcaaggtgctcctaaaagagattctgattatcaaagtaagtacaagtcagtagtgctagtagaaaaattaacaatagaggaagtggaaggcagaaattgctattgttttctgggtattttaaggaatattattagaactacattacaggaaatgtttttgtgccaccctaagctaaattctaagactgttttgcctcgcaagaggaaactagaatagaaaatagaagaattttggcagaccttggcctttctgaagatcttttccattttaccttgctggtcctttaatactaatatttctgcagatctgcttgccaatacatatgctggctgagccactatcatgatttttttttttaagagagagtcttgctcttgtcacccaggctggagtgcagtggtgcaatcttggctcactgcaacctccgtctcccgggttcaagcgattctcctgcctcagcctcccgagtagctgggattacaggcatgtgccaccatactcagctaatttttgtatttttagtagagatgaggtttcaccatgttggccaggctggtctcgaacttctgaccgcaggtgatccgcctgccttggcctctcaaagtgctgagattacaagcatgagccacagcaattggcctcatgattttaactatatctatattattcctaagtctacatttctgactaaaactatgctttcaagttctagatccatatttccaactggacaccaaagatatccacatgaatatgtggcaaacatctcaaatataataggttcaaacattaacatgaactcatttccttcatcaccaaccagctatgagatggtctttcaatacctactttggttaattgtgttatcaaccacctaatcacccatagtacaaatcttaaaattatcctcagttaacctcagttccatccaggacctaatcttttcattcatccttttaacatattcgtgtctttatatttacaatagatttcttttagatagcatagagttgggttttgtttttcatccactctgataatctctgccttttaattgggctgcttagagcactgacatttaatgcaattattaatataattagtttaaattctacatctatttgtctcatcttttctttgttccctttttgacaaagatacaaaagcaaatcaatagaaaaaggatagcctttaaaataaatggtgctgaaacaactgaacatccatggtgcccaactcagcaccccctaaaaaaacctcaacccaaatctcaaactttgtacaaaaataaacttaaaatggatcatggacttaaaatgtgaaactataattttttaagtataagggaaaatcttcaggatctggagttcttagatttgacaccaaaagcataatccataaaaggaaaaagtgataaactggactttatgaaaattaaaaacttttggatgagaaacatgatgtgaagaagatgaagaaagaagctacaggccaagagaaaatatttgctaaccacatatctaacaaaaaagactagtattgagaacatataaagaaccctcaaaactcaatggtaaaaaacaaacaatccaatcagaaaatgagcaaagacatgaagagaaatttcaccagagaggaaatacaggtcacaaataaacagggaaaggttaatcaatatcattagctatcatcctgatgggaaatgcaaattataacctcactgagatatccttacactatcagaatgactaaaataaaaaataaagacatcaccaaatgatggaaagaatgcagagaaactggatcactcactcgtatattgctggcggaaatttaaaatgattcaaccactctggaaaatacttttgcagtcttttatcaaagaaaatgcaaaataaccatacaactcttcaattttactcattaggcatttatcccagagaaaagaaaacccatactgatactaaacataaatgttcatagcagctttatttgtgatagccaaaaactagaacctgtcctgatattcttcaacatgtgtctggccaaagaaactgtagtacattcatgctacaaaatactagtcagcaataaaaaggtatgaactattgatacatgcaatatcgtgaatggatctccagaaaattatactgaatgagaaaaaaaactaatcctgtttgattccacttacataacatttttgaaatgacaaaatttgagaattgaagggcagattagcagtggccaggtgttagggacaggggtagagaggctggagggatatgggtgcaattgcttgtggtggtggatacatggacctacacattttcaccaggtcaagctgcctggtggaatggtgtatagtggaaacccctgaatagtgtctctctacaggcctggtgttcctgggctgagaaagagtctcggctgtagggttaaagagacttcctgggccagggtgttttttgtggctgggtgccttctgctggtttcacttgcttgcctggagcttcctaatggggaagggaatcttaggagtcttaggcttgttggataaaagcacctgaagaaaaatgactaatgctatttccagatattgctgacagagcaatattgaaataatctatctgttaaaattttttttctccgtttttattatcaagactgaatccaaaaacagattcactgaagaataattttatttatttatttattaaatggagagagattctcactatgttgtccaggccgttctcaaactactggcctcaactgatcctcctgcctcagcctcccaaagtgtaaggattacaggcatgagccaccaggcctggctcattgaagaagaattttaaaacttcaatgtttcaatttataatataataaaatacaaagctattatgattggagaaattatttattttaattctcaacattttaagaacatatattcttgtaacctttaaataaatattgaggccaggcacagtggctcatgcctataatcccagcactttgggaggctaaggcaggagaataacttgagtccaggagttcaagaccagcctgggcaacatagcaagaccctatctgaaaaaaagtatatatgtatatacatataaataaaacatattgaggtaataaagacaaaagttgtaagatatgcttcttctcaagaagaaactaattcaaagatgatgaatggaataaatctgaataagccaaagtccttatttgtctagtttaactgaaagttttccaaaagatatcattgttttgtaatacaatgcatacctactaaaggtaaaaaaaaaaaaatgcatttttgttaacagtaaaacaaataaaacagtggaacagttttatcaagaaacaattatgcttttgtcataatatttggtgtaagttataaaaaatggtttcatttaaatacagtctatcctatgtggcatacttatttaagacttatttagtggcagaaattctctgaacaaaaattttttacagattcatctccagcaggtactctgagggagtccctgaaaaagctcttttaagttacaaagcaaggcaacagaatcccaattctcttcttcaaatagtatacatcttaaataagaattttaatgcttctaatcaaagataattttaaaatttagagttagtggtatatttaaataattttaaatgttttaaaacatcaaagtacattttcctatgttctatatttacccaggtatactcataaatagaaaagtacatatgtatctttttgaaaaaaaaattaacgtctaaaagaatctatttctaataagtcacgttttagatatttcataatactgaggtttagtagcttacatgtatgttcatatcagaaattaatttatttctcatattgtttaaaatgtacagtggttaaaatcactttgagaaacttatggtatgacagagtttataagacacagtagaaagagttcttatctaagagcacataaaaagaaagagcagtatcccattccaaatcttaaagatattattctctgatttcaactatataagcataatagcaaagactgaaattaaatctggaaaatcataaacagcagatttattagagttgtagggttatgctatcttttttccttttaattttattctgtctcttataattgcttttcaagagccttaatagtaatatctctcctatattataaattaaaattttattccaaggaaataaaattttatattcctgtacgcttactcaagcatagttaggacaaataattgacagaagtcaaggaagacagttgacataggctgtcagatgtccctgctatcagggaaattaaattcaggagaagaaagttcagtctcttgaggtaaacaggatgctaaccaaagcattaaagagtaaaagacatgaacctaatcaccgaatggtgagaagagacaagtcagggtggaatgtgactgaaatggaactgttgatctggggctctttaatgagagacagctactctccgagaagtatttagtttcagaacactggcaagtagcccaaaaaaaaaaacaaaaaaacaaaacatgcattcctattttatgaggtgccatgaaaaataagaatcagaagcagaaatgtagaatcttaccaagttgaaatactgtttagaaatttctatttgccccaaagatcttggggacatgaacatggtgagtgaatttctgggaggtgagctggaaatacagattggagaaggccttttaaagatgttgatcagttaaaggttaattccctgagacaaccacatgattcattccttcacttctttcaagtctctgttcaaatgtccccttattagcaaggccttctttgacctccctatgtagaacagtaaaagcccaccccctttttcctcctaaattatttttcttcagagaacttatcaccatatgaccagttgtataattgtttatttattgattgtcttctccaaataaaatataagctcagggattttgttttattcactgctatattcccagcacctagaaaagcacctggtacacagttacactcaataaatattttgctactggaaaaaaaaataagtatcagttgacccagagatgaagacaacataagcaggaaaaaattttaatatgcctgtcttaatttcctatttatatggccagggcaaaaatccagcaatctttttcggttaggttgaaatagtccacttctgtttaactaaaacaacaacaaacggctgggctttaacagggggccttttgtagaagccgtcctttggtcttttgtttctaacctttctggagtagtgctcgtatcttctagtatagacaggaaaccctcaaattttccaaacatgtgaaaacagttgattaaagcaagcacactagaaaaccaataaaaaaaagtaaccacagaaattttgctctgggaatagatgactagtggcttagaatcataccaataattcttccttacctttgagtatcagtatctgttaaagagctagtctctttgaattccaagtgggttaagagcgaaacatttatctgcataaatgcctaaagtcaaaatatgtttttggttttaagcatacttgctttaatgttcatagcactagtccttaaaaatcaatcatctataataaaaagaaaagaaagaagtctaatcaaatgtatagtcatttttattttgaaggccaaaacttaaaaaaaatacaaatattaaatttgggtacctaaaactgagaaccacttttaagttaaggacaaaatgatatgcttgtttagatgcatctcccacctttttgaatgggttgttattttttgttagtttgttctaacagacttgtttccataatttgtcatttaactattctgtaaatgttataactcatatgattcatatgatggactgatgttttcattccactttatgttgttcttgcaacaaaattatttagtcaaacctatctttttttaaacactagattttatataatacttagaaagcctctactgctatttttaaatatattattttattttaattgttagagttgggctgtcacccaggctgaagtacagtggcatggcctactgcagccccaaactcctgggctccagaaatcaatccttctgcttcagcctctttgctgggattacaggtgtgagccacagcaggcctctactgttttttttttttgtttgtttgtttgtttttttgtttttgagatggagactcactctgtcacccaggctagagtgcagtggcacaatctcggctcactgcaacctccgccccctgggttcaagccattctcctgcctcagccttccgagtatctgggactacaggcacgtgccaccatgcccagctaatttttgtatttttagtagagacggggtttcaccacgttagctaggctggtgtcaaactcctgacctcagatgacccacctgtctcgcctcccaaagtgctgggattataggcatgagccacagtgcctggcctctactgttatttttctaacgtgctcatttttttccagaacttatatggagtcattttttaaatggagtcattttttattgagattattgatctagctagaatttattttggtataaagaataaatcaaagtctacctctttttttcaaattgctatcctgataactcatgagcatttactgaattatcctgaattttctccactgatttgaagtggataaattatcatacattaaattcccctgggtatgggattatttctggactccttataactaaagaaatgcaaactaaacaagatactactttgacctgttaaaagtctaataataatctggtttgggtgaaggtgtggagaatgcaaattaggaggggatttttttcttagaaatgaaactgctaggtgatataacccacagtatctacaggtgaacaaacttgtaaaaacatgcactgaaaacatactgagatttttactggattggcattaaatgtatagatttgtcccagaaaaactgcctggcacatgttcaagtattctcttatggcctttattaaagttttgtagtcttttgctttgttttcatctacatcctgcactttgcctattaagcttattcctaaggtattttgtactatttgttattgctgtaaattgaatatttttcattacattttccagttgattactgctggtacataaattgtcttatttgagagattggcaccagttaatttaaaaagctaagcaggaaatcattttaaaataatatatataattccatataacattttaattttaaaaacacaaaaagtgtattcatttgaaaatctctttacgtaaggtcaaggttttttgttttttttttagttctaagttgtttttcttctataaaccacaccaataatgtgggtttatgattttcactatgtgcagggtgaggacagaaaaatgcaaaggagtctgaggcctagagacacaatccttctactttccgacctgggtgggttcgcccctccttgggcaacctggtagtcccctgctcccaggaggtcaccatattgatgcagaacttagtgtggacacctaatcagcatagcgcacagcccagaactcctgggctccagtgatcttcccacctcagcctacagagtagctgggactacaggcatgtgtcactgcacctagcaatcctttctagtttcttacgttgccccctcatatcttttctacatctaagtctacaatattttctgcaacttgcctctgagtcatttcaaagcaccgaacttggtttgactaaaacaacccttttttgcacttccattttataacattacaataatatgaaaaatcagcaaatataaatcagggagtaaacaatgcttaaacttttaatacacacacaatttcactactgggagcaaaagaattcaggtatatcagagaatagctttatagccacaagcatgcagcttccaggagcatcctgagagaccaatcctttttaacttctacccctcagtaataggtaaaagatacaagtcaataagtgtttactttaactgaagagtacttggatttctgataataatctatgctggaaggtgttaaatttactattcacagaaaacccttgttctaattatttgaaagcagcagagatatttcctgcttttgtataaaacttggcacattactatgtacaaatgcaaactttttaaataaataaagatgaagctaaaaatgaaggatggtcatcatacgattttaatctacagaaggatgaaaatgtctaaaatctcttaatcttaaatttctatcataatgttagaatttagtgttttaaaaagtctgcagagcttactcatttaaagacaaagttctttgcttaatatttacctaagctatggaccaagtttcctattttatgtctgatatggtttcaatgtttgtcccttccaaatctcgtgttgaaatgtgatccccaatgctggaggtgaggtttggtagaagatgactcgtgttgaaatgtgctccccaatgctggaggtgaggtttggtagaagatgactcgtgttgaaatgtgctccccaatgctggaggtgaggtttggtagaagatgactcgtgttgaaatgtgctccccaatgctggaggtgaggtttggtagaagatgactcgtgttgaaatgtgctccccaatgctggaggtgaggtttggtagaagatgactcgtgttgaaatgtgctccccaatgctggaggtgaggtttggtagaagatgactcgtgttgaaatgtgctccccaatgctggaggtgaggtttggtagaagatgactcgtgttgaaatgtgctccccaatgctggaggtgaggtttggtagaagatgactcgtgttgaaatgtgctccccaatgctggaggtgaggtttggtagaagatgactcgtgttgaaatgtgctccccagtgctggaggtgaggtttggtagaagatgactcgtgttgaagtgtgctccccagtgctggaggtgaggtttggtagaagatgactcgtgttgaagtgtgctccccagtgctggaggtgaggtttggtagaagatgactcgtgttgaagtgtgctccccagtgctggaggtgaggtttggtagaagatgactcgtgttgaagtgtgctccccagtgctggaggtgaggtttggtagaagatgactcgtgttgaagtgtgctccccaatgctggaggtgaggtttggtagaagatgactcgtgttgaagtgtgctccccaatgctggaggtgaggtttggtagaagatgactcgtgttgaagtgtgctccccagtgctggaggagaggtttggtagaagatgactcgtgttgaagtgtgctccccaatgctggaggtgaggtttggtagaagatgactcgtgttgaagtgtgctccccaatgctggaggtgaggtttggtagaagatgactcgtgttgaagtgtgctccccaatgctggaggtgaggtttggtagaagatgactcgtgttgaagtgtgctccccaatgctggaggtgaggtttggtagaagatgactcgtgttgaagtgtgctccccaatgctggaggtgaggtttggtagaagatgactcgtgttgaagtgtgctccccaatgctggaggtgaggtttggtagaagatgactcgtgttgaagtgtgctccccaatgctggaggtgaggtttggtagaagatgactcgtgttgaagtgtgctccccaatgctggaggtgaggtttggtagatgactcgtgttgaagtgtgctccccaatgctggaggtgaggtttggtagaagatgactacatcaggggggtggatccctcatgaatggtttagcaccacccccttggtgataaccgagctctcgctcagttagttcacaagagatctgcttgtttaaaaagggcatgggacctcctccttcctcttgctcctattgtcaccacgtgacatgcctgtttcccctccgacttctgccattaatataaacttcctcaggactcaccagaagctgaggagaagctgatgccatgcttcctgtacagcctgaagaaccgtgagccaactaaaccctactcttttctttacaaattacccagtctcaggtatttctttacagcaatgcaagaacgaactagcacaacatcagtaagaaaaaaagggtgaaagctacctgttactacgagaacatttgactagaagtcaagaaactaggattcgagttcctgctccagcaataatcagctatggttttagtttcctaagttgtacttgagtgactggaaggagagctaaactatataccaaagaagatgaatggctagttgtaacaggggtaaggtggacttttattctgaatttctaggatccagtgctagctccaacattagaggatattaagactaatgcaatatgcaatgtgttaaccaccaagcaaactaacttagaaatatatgtggtttttataagcaaagcctatgtctatttgatttaaattggctgtacattagcagtgctaaaaaaggcataccaaatgcatcacatgatcacttctttatctgacagagcacaggcatcctatctggtcaagaaaacaaaacaaatcttattgttccatgatttcccacaacataacctttatttctataaagttaagatattataggtgatgtcatctataatagtatctttttagaggtttacattcagaatatgttttcatttcattttattctgaaaactcttcataaggtcaaaagggcatgtcatatccatcttaaagttcagggcagagtttgcccaaggtaaggtcaaaatttagaaatcaaggattctggatctctaggtcacagtgctttctattatcctttatgcatgcactcactaagttgtattctttcattatacaaacatgtataaggaactgggttgggtacttcttgtgaggacccagtttttagttttgacttcgtcattctccaccaataatcactttgtaatcctaagcaagtcacaacttctctgaattttagtttcttggtctgtaaaattgaaacaataatatatgttctttcttgtcattgaaaattagtggggagactgaattagatagaaagctaagagctgaaaagaattctataggtctaatttaatactctccttttacaaatatacaatagagaagctaaattatttgctcaaggtcatgtcattttttttttcctttaagagttgaggactctctatattgcccaggctaaactggaattcctgggctcaagagatcctcctacctctgcctcctgagtaggtggggctcaggagacgcacattaatttttagtaacttggattagaatccaagtcacttaacacctagtgaaattggtcctttcattacactttgcagcgtctaaactaggtgaaaaatttttgaaagctacaacccacctagccttacccaactaaggttttatgaccaaattcagcctttatgccacaaggcatatattgtatgtgaagaattaacatcttccaggaattcagagtaggactaggttacatagcatccttgagagaatggagaaaatagtcactcaaatagttttctgtgtttttggatgagaaaggcagcatgactatattaatgggacattattaccaggaatggctctagccttcaagacctgaaatttaaaatttgtattcaactgtaaaggctagccttcattacacatcatctcctcaagaagctctttactaaattcgtagattctcatgtctatgtgttactaatagctgttgttatatcttgtattgcaattatttctttgttttgtattcttttatttttctttttttttgagacagagtcttgctctgtcacccaggctggagtgcagtggcatgatctccgtcactgcaacctctgcttcccaggttcaagtgattctcctgccttagccttctgagtagctgggattacaggtgtgagccaccacacctggataacattttgtatttttagtagagacagagtttcaccatgttggccaggctggtttcaaactcctgacctcaagaggtctgcccgccttggcctcccaaagtgctaggattacatgcatgagccaccacacatggccttgtttttcattcttaattgaattgcacgtatatgtcttaaaaggcaaactaagtactgtggaagtacagaaaaggaactgatgagattaaggagactccatagaaaagacgtgatatgattctaagagttggagatgaagaagcaacaagagagttcggaaaaaaagataaggaagaagggacaactcaagtgtatgcacagataaatatgcttattcaagttttaaatcttaccacaataacattttcactcctcttgatttcctttccctacttgtttgaacctgcttcaaccatcattcccatcaacttttactttgctctaatcatcattcatcaccctttaaatctttcctcttctactcccatccaactctataaaagttggttcaactctttgaacttgggtagatgactcacattccggtaaaaagtaacataaagtattaagtgtttacaataatgaaaggaaggtaaatcacttcgaaatgataccgatagacttatggtaatactagtctagaatttaagattttttctccttaggctaaaagatatttttatagaaaataaatatattctgtcaacataaattacaaatgttcatttctcaaattgaaaaaggtttatttgtttctatacctaaatagaaaattttatcataatgagcatcaaaagaatcccaaatgagaaaactgctttttgcataagtgtaaattaagagatggaagtcacatttcaccatggcaaacatttgctgcatgcaaaatgactgaagtaagtttagaataattctttttaaattttaaaatatcaatgtcccatacttttttctttctttcttcaagagacagtgtctcgttatgttgcccaggctggagtgctgtggctattcataggtgtcatcaaagagcaatgaagccccaaactcctatggccttaagtgatcctcttgtctcagcctctagagtagcttcgactacaggagtgtaccactatgcctggctcacactttcttttgaacttaaatcaatttatttctgttttaagtctcacatactctctcatttgatttttttcttttttctttttgcatatcccctgttctcaatgttatgtacaatttcaattatggccttcgaaacttttaatgagagaattctttaaagttttaatcgattcctctttgatcaattttatagtaaaagaacacggtgtcttattgtggaaaaaaataggtcttttaaagaagaatgctattgaaacataaagggaagccttttacagaatatttaatcttatacatgtttcttgtgcaacctgtttcaaaaatcagaaatccttaaacataaagagtgtaaggtgactccttgatctattatacctgagagtgaaaaaacccaacctgcggaggttgcagtgagccgagatcgcgccactgcactccagcctggatgacagagcaagactccgtctcaaaaacacaaaaacaaaaacaaaaacaaaaacccaacccagcagcttaagcagtgaaagtattcaaagaatcagaatcagatgtcattaaattttaaaaaccgatgcattacataatgaaattcactatatttcattctttttatttatttacttatttatttgagaacaggcctctctctgtcactcaggatggagtaaaatggtacaatcatagctcaatgcagcctcaatctcccgggcccaagtgatccacccacctcagcctccctagtaaccaggactacaggtgcccaccaccacacttggctaatttttggaaacagggtgtcactatgttgcctaggctggtcttgaaatcctggtctcaagtgatcctctcatctcagcctcccaaagtgttgggattataggtgtgaaccacagatcctggccaagattcactatattttgaattggttgtatatgtaggctatattctttcctttttgttttttttttagacaaggtcttgatctgtcaccaggctgaagtgcagtggtacaatcaaagctcactgcagtctcaacctcctaggctcaaacaatcctcccacttcagcctcccaaccagctgggaccacaggttgacatcaccacacccaggtaatttttaaattttttatggagacagggtttccctatgttgccaaagctgatacactatatttcaaatcagtctacaaggtcattatggcaacagtcctaaaaaaaggcttgtcttcaccattttttaaaagtattatactttaagtattgggatacatgtgcagaacgtgcaggtttgttacataggtatacacgtgccatggtggtttgctgcacccatcaacccatcatctatgttaagtatttctcttaatgctatccctcctctaacccccaaccccgacaggccccgatgtgtgatgttcccctccctgtgtccatgtgttctcattgttcagttcccacttatgagtgagaacatgcggtgtttggttttctgttcctgtgttagtttgctgaaagtgatggtttccagcttcatccatgtccctgcaaaggacatgaactcatccttgttcatggctgcatagtattcgatggtatatatgtgccacattttctttatcctgtctatcattgatgcgcatttgggtgggttccaagtctttgctattgtaaatactgctgcaataagcatatgtgtgcatgtgtctttatattagaattatttataatcctttgggtatatacccagtaatgggcttgctgggtcaaatggtatttctggttctagatccttgaggaatcgccacactgtcttccacaatggttgaactaatttacactcccaccaacagtgtaaaagcattcctattctccacatcctctccagcatctgttgtttcctgacgttttaataatcgccattctaacggccatgagatggtatctcattgtggttttgatttgcatttcattaatgaccgctgatgatgagcttttgttcatatgcttgttggccacataaatgtcttcttttgagaagtgtcagttcatatccttcacccactttttgatggagttgtttgcttttttcctgtaaatttgtttaagttccttgtagattctggactttagccctttgtcagatggatagatcgcaaaaattttctcccattctgtaggttgcctgttcactctgatgatagtttcttttgctgtgcagaagctctttagtttaattagatcccatttgtcaattttggcttttgttaccattgcttttggtgttttggtcaggaagtctttgcccatgcctatgtcctgaatggtattgcctaggttttcttctagggttttcatggctttaggtcttacatttaactctttaatccatcttgagttaatttttgtataaggtgtaagaaaggggtccagtttcagttttctgcacatggctagccagttttcccaacaccatttattaaacggaatcctttgtctcatctttgtcaaagatgagatggttgtagatgtgtggcattatttctgaggcctctcttctgttccattggtcaatatatctgttttggtaccaataccatgctgttttggttattgtagccttgtagtatagtttgaagtcaggtagcatgatgcctccagctttcttctttttgcttaggattgtcttggctatatgggcttttttggttccatatgaaatttaaagtagttttttctaattttataaaggaagtcaatggtagctcgatagggatagcattgaatctataaattactttgagtggtatggccattttcacaagattgattcttcctatccatgaacatggaatgttcttccatttgtttgtgtcctctttatttccttgagcagtgaagtttgtagttcttgaagatgtccttcacatcccttgtgtgttgtatgcctaggtattttattctctttgtagcatttgtgaatgggagttcactcatgatttggctctctgtttgtctattattgttgtataggaatacttgtgatttctgcacattaattttgtatcctgagactttgctgaagttgcttatcagcttaaggagattttgggctgagataatggggttttctaaatagacaatcattgtctctgcaaacagagacaatttaatttcctctcttcctacttgaatacgctttatttcttcctcttttctaactgccctgaacagaacttccaatactatgttgaataggagtggtgagagagggcatccttgtcttgtgccagttttcaaagggaatgcttccagcttttgctgattcagtatgatattggctgtgggtctgccataaatagctcttattattttgagatacattccatcaatatgaagtttattgagagtttttagcatgaagcagtgttgaatttcatcaatggccttttctgcatctattgacataatcatgtggtttttatctttggttctgtttatgtgatggattacgtttattgatttgcatatgttgaaccagccttgcatcccagggatgaagccgacttgtttgtggtggataagctttttgatgtgctatggattcagtttgccagtattttattgagggttttcacgtcgatattcatcaaggatattggccgaaattttctttttttgttgtgtctctggcaggttatggtatcaggatgattcttggcttataaaatgagttaaggaggactctcttttcttctattgcttggaatagtttcagaaggaatagtaccagctcctccttgtacctctggcagaattcagctgtgaatccatctgctcctgggatttttttggttggtacgctattaattactgcctcaatttcagaacttgttattggtctattcagggattcgacttcttcctggtttactcttgggagggtgtatgtgtccaggaatttatccatttcttctagattttctagattatttgcatagagatgtttacagtattctctgatggtagtttgtatttctgtgggatcagtggtgatatcccctttagcatttttttattgtgtctatttgattcttctctcttttcttctttattagcctggctagtggtctatctattttgttaatcttttcaaaaaaccagctcctggattcattgattttttgaagggtttttcgtgtttctctctccttcagttcttctctgaccttggttatttcttatcttctgctagcttttgaattagtttgctcttgcttctctagttcttttaattgtgatgttagggtgtcaattttacatcttttctgctttctcctgtgggcatttagtgctataaacttccctctaaacattgctttagctgtgtcccagagatttgggtatgttgtgtcttggttctcattggtttcaaagaacttctttgtttctgccttaatttcattattttcccagtattcattcaggaacaggttgttcagtttccatgcagttgtgcaggtttgagtgagtttcttaatcctgagttctaatttgattgcactgaggtctcagagactgtgttatgatttccattgttttgcatttgttgaggagtgttttactcccaatcatgtggttagttttagaataagtgtgatgtggtgctaagaagaatgtctattctgttgatttggggtggagagttctgtagatgtctattaggtctgcttggtgcagagctgagttcaagtcctgaatatccttgttaattttctgtctcattgatctgtcaaatattgacagtggggtgttaaagtctcccactattattgtgtgggagtctaagtctctttgtaggtctccaaggacttgctttatgaatctgggtgctcctgtattgggtgcatacatacttaggatagttagctcttcttgttgcattgatccctttaccattatgtaatgcccttcttgtcttttttgatcttcgttggtttaaagtctgttttatcagagactaggattgcaacccctgcttttttttttttttgctttccatttgcttggtaaatcttcctccattcccttatttagagcacgtgtctttgcatgtgagatgagtctcctgaatacagcacactgatgggtcttgactctttatccaacttgccagtctgtgtcttttaattgtggcacttagcccgtttacttttaaggttaatattgttatatgtgaatctgatcctgtcattatgatgctagccagttagtttgcccattagttgatgcccattagtttcttcatagtgtcaatggtctttacaatttggtatgtttttgcagtggctgggaccaatttttcctttccatatttagtgcttccttcaggagctcttgtaatgcaggcctggtggtgacaaaatctctcaacatttgcttatctgtgaaggattttatttctcattcacttatgaagcttagtttggctggatacaaaattctgggttgaaaattcctttctttaagaatgttgaatattggcccccactcttttctggcctgtagggtttctgcagagagatccactattagtctgatgggcttccctttgtaggtaacccgacctttctctctggctgcttttaacattttttccttcatttcaaccttggtgaatctgacgattatgtgtcttggggttgctcttcttgaggagtatctttgtggtgttctctgtatttcctgaattggaatgttggcctgtcgtgctaggttggggaaattctcctggataatatcctgaagagtgttttccaacttggttcaattctccctgtcactttcaggtacagggacaatcaaacataggtttggtcttttcacatagtcccctatttcttggaggctttgttcgtttcttttcattctttttcctctaatcttgtcttcacactttatttcataaaggtgatcttcaatctctgatatcctttcttctgctttggctgttgatacttgtgtatgcttcacgaagttcttgtgctgtgtttttcagctccatcaggtcatttatgttcttctctaaactgcttattttaggtagcaattcctctaaccttttttcaaggtttttagcttccttgcattgggttagaacatggtcctttggcttggaggagtttattattctctgtccagttttgttcccttgctggcgaggagttgtgattctttggaagagaaaaggcattctggtttttggaattgtcagcctttttgcgctggtttttcctcatcttcatggatttatctacctttggtcttcgatgttggtgaccttcaaatggggtttctgtgtggaagtcctttttgttgatattgatgctattcatttctgtttgttagttctccttctaacagtcaggcccctctgctgcaggtctgctggaatttgctggaggtccactccagaccctgtttgtctggatatcaccagcagaggttgcagaacaacaaagattgctgcctgttccttcctctggaagctttgtcccagaggggcacccaccagacggcagctggagctctcctgtgtgagttgtctgtcgattcctgctgggaggtgtttcccagtcaggagacatgggggtcagagacccacttgaggaggcagtctgtcccttagcagagctcgagcaatgtcctgggagatctgctgctctcttcagagccagcaggcaggaacgtttaagtctgctgaagctgcaccaatagccacccatagcacccttcccccaggtgctctgtcccagggagatggcagttttatctataagcccctgactggggctgctgcctttttttcagagatgccctgcccagagaggaggactctagagaagcagttgggctacagtgggctccacccagttcaaacttcccggtggctttgcttacactgtgaggtgaaaaccacctactcaagcctcagtaatggcagaagcccctcctcccaccaagctccagcatcccaggtcgacttcagactcctgtgctggcagtaagagtttcaagccagtggatcttagcttgctgggctctgtgggggtgggatccactgagctagaccacttggctccctggcttcagcccctgttccaggggagttaacagttctgtctcactggtgtttcaggtgccactggagtacgaaaaagaaaaaatcctgcagctagctcggtgtctgcccaaacggctgcccagttttgtgcttgaaacccagggcctgggtggtgtaggcacccgagggaattgcctggtctaagggttgtgaagatcacggaaaaggcatagagtctgggccggaatgcatcgttcctcgtggcacattccctcatggcttcccttagctaggggaggaagttccctggccccttgcacttcccgtgtaaggcgatgccccaccctgctttggctcgccttccatgggctgcaccccctgtctgaccagtctcaatgagatgagctgggtacctcagttggaaatagagaaatcacccaccttctgcgttgatttcgctgggagctgcagactccagctgttcctgtgttcaccattttaacatctatctggctctgtttaattttcgctccccccaaaaaatccatataagaaataagttgattctcagagttaagttccagaagtgtagagatctcacattaaaataacagtttgcctgagtttatcaaatacaaaagtatctattaaatataattgattatatggattcattacctccctttgcaagtagttactctgtatttttccaattctaacctaagaatttttcaaagtttctaaattcccctttggttccttaattagaggccaaatttaatatctggaaaaaatgcagtattcaattatcttcttcctgttcaaacagtccctctgctatggctcttcctcagtagaaacaactggcaacaaaattcaagtttatgattcattcatcagcaaacatgtgagaatcatctacaaagaaccaagaattgtggtaagaattatacaaacatttactatgatactgataataatgaaaagcctaattcaacaaatagtgatctatccatttttaagccccagtaactcaaacattaaaaaactataaatgaacaggccgggcacggtggctcacacatggaatcccagcacttggggaggctgaagtgggtggatgacttgaggtcaggagttcaagaccagcctggccacatggtaaaaccctatctctactaaaaatacaaaaattagctgggtgtggtggcgggtgcccataatcccagctactcgggaggctgaggtgggaaaattgctggaacctgggaggcagaggttgcagtaagacaagatcgcaccactgcactccagcctgggcggcagagtgagaaaaaaaaaagaaagaaagaaaaagaaaaagaaaagaaaagaaaaaactatagatgaatgacttaagtgaataacaagtcaagtgagtaatgacaatatgtagaaaaatattccaagtagaattaataaattttaattatttgaatgagaaaatgccgccatattcaaaatgaaagtaaaagtaggatgagatcagcatatacaactgcatatatttcattaattaaagatgactaaagaggagactatcaatttgaaagaagattactaagattttgtttttttaaaacatactgaaccaaataaaaaaaaaataacagtaagacataactactaacagaaaattttttccaatgagaatacaagcttattaaccactccttttttcattaatgctcactcagcttctaccagccttctaataagaacacacacatacatcttttctataccaaatgtgatataaaagatattcaacccttcaaaattttaagtattggttataagtaatactcatctttttttgtcatttgataatagatgaattttctagtccagacagtagaaatagattatagttcatcaacaaatgacaaaaattgctgagtgtgaaagaatggtgcaaaacaacacaaaacattttactgtaataagttatttttaagctagctaagtaatttatgagaaaaaaataaattgttcttaaattacttaatacccaagaggaagagtttcagcttaaactagaccaaattaaaaaaataataacagtaaggcataactagatctagccttttctgaagaaaatgatatttaaaacaagaaaaacatgtgccatagaggttgtgatatcctcaatctttgaggaaataacacctacatttaagtaccctcaccttacacacactttcttcttctgattttggagtctttaaaatataagtatactttttttttttttttttgagatagtctcgctgtcgcccaggctggagtgcagtggcttgatcttggttcactgcaacatctgcctcccaggttcaagcgattctcctgcctcagtctcctgggtagctgggactacaggcacgcactattgccctaggctagttttgtatttttggtagagatggggtttcgccattttggccaggctgctctcaaactcctgatctcaggtgatccacctgcctcggccttccaaagtgctgggattataggcgtgagccactgcacctggcccaaaatatgagtatactttaaatataaacatataaaccattcatagaaacttttagatggagacaaaatctgaaatatatttcaatatatagttaatgtcatattaaggggttaagggaagagctgggaggaagaaggaagataagactatgaacctaaaattttgccaagtagtaggatttttattctctaaaccttatttcaatcaatttaaggttaaaaaaattttgcttaaaaagatgcaatttcattttgtgcttagaaagtaaaattaacaccacaccaaagataaacattcttgagtttgttcttttggagaaatgagtaatttaaaaatttaaacagctctaaaatattaatacaactgcataggaaagaggaaagaatgttagaaaattgcttatcaaaaactaatgagacccaggataagagctactcataatgataacaattaaatattgagtatttttcagaaaccaagagtcaaatgcttgttataccttaaaggttaaaggcccctgtttcatagtcattaaacagttctttgaaatgctatgttaagatatcactaacaatttcaatttataaatacacacccatacacattttcttttctaaattgtcatatcccaaacacgaaaacaatcgaataagagaacaggctgaatagtgatttttttctttcaattattactactgaaacaaatcaaaacaactctgagaggttgccagcaccgcagaaggcatttccacataaaaagagttaatgagcagaccacgcagttcaacagccagtgaccatttgcaagcctcctaggtatattcccagcagacacattatcagattaaaggaagtgcaaacaaactgggctgaaagtttctttgtccaaacccagcctcttcttcctgtgatgtcatattacaaatctaggaagcctttctttttcacttcagagaaagcgacctcaagatacaactggcaactgaggaaaaggcctcaattcaacaagagctaacaagcttgggagtttatttcggaatctttaaaagactcttctgcttacccacaatctgggatccactgcaggaaaacaaaaaaggaaaacttcatttaaaagaagcaagaagtaaaatgggacaaattgggaatgtttaagtctctgaaactctgcactgaaaagaaaataagattgataacttaagcttaacattctgaggcataaagaaacattaactttggagtattcatcttgactactgaaatacaagtttagaagacaagtggtttcattctggtcacagatcacagcttttctttaaatttataatcctatgggttggactcgttgactgtattttttaaaggttgctcgtcagttaactgagccttggaattcatggattttctaaagactaacaaatgaaaatattttcctgttgaagaacccagcggaaattttacagcaacaaatttcatgtttcttttgggtatttctgagaaaaaggaaatatttataaaaccatccaaagatccagataatttgcaaataaattggaggttatagaggttataatctgaatcccaaaggagactgcagctgatgaaagtgcttccaaactgaaaattggacgtgcctttacgatggtaagcgttaacagctcccactgcttctataatgactcctttaagtacactttgtatgggtgcatgttcagcatggtgtttgtgcttgggttaatatccaattgtgttgccatatacattttcatctgcgtcctcaaagtccgaaatgaaactacaacttacatgattaacttggcaatgtcagacttgctttttgtttttactttacccttcaggattttttacttcacaacacggaattggccatttggagatttactttgtaagatttctgtgatgctgttttataccaacatgtacggaagcattctgttcttaacctgtattagtgtagatcgatttctggcaattgtctacccatttaagtcaaagactctaagaaccaaaagaaatgcaaagattgtttgcactggcgtgtggttaactgtgatcggaggaagtgcacccgccgtttttgttcagtctacccactctcagggtaacaatgcctcagaagcctgctttgaaaattttccagaagccacatggaaaacatatctctcaaggattgtaattttcatcgaaatagtgggattttttattcctctaattttaaatgtaacttgttctagtatggtgctaaaaactttaaccaaacctgttacattaagtagaagcaaaataaacaaaactaaggttttaaaaatgatttttgtacatttgatcatattctgtttctgttttgttccttacaatatcaatcttattttatattctcttgtgagaacacaaacatttgttaattgctcagtagtggcagcagtaaggacaatgtacccaatcactctctgtattgctgtttccaactgttgttttgaccctatagtttactactttacatcggacacaattcagaattcaataaaaatgaaaaactggtctgtcaggagaagtgacttcagattctctgaagttcatggtgcagagaattttattcagcataacctacagaccttaaaaagtaagatatttgacaatgaatctgctgcctgaaataaaaccattaggactcactgggacagaactttcaagttccttcaactgtgaaaagtgtctttttggacaaactatttttccacctccaaaagaaattaacacatggacattttaaagtctttagtataaagaaaatttgtattcaatgtgttaagcattaacatgtattttatttgtgtatccactccatctgatttttctgagccattttgatttgttccttcattaaaaaaaatctcttaaagttatttagtgtctaaaagtgactgacttaaattatgtggtgccaatctgtaatgtctttgaattcctttttatattaaatgatttaatttactaaattattttatactaatttatgtttatgtaatattttattcaacataccatttttattttgaattaaaactactaatcatatttcttaaactatgattaacaaatgagaaagaagagtaatttgaaataaatgttttgggagtattttaaaatatatgtataactaaaaacgtagtcttctgtagaaatgatgacatattaacattgttggaagatcttgagcagtaacacattgataacattttgggagtttggtctgtgtaggcaatttgtagaaagcagatgctatctatatggtatgctttgaagttactattttgattttctgtatataatgcacccaatttcaaaatgatatatgccacaaaaattgagagggagaaaactaataaaatgtcattttgctaagtttttacttagcaaaaaaataaaatactaccagaggtacattttaaaggtgcacttacatcacagtcaagaacttatgttttaagtatgttaggtcggagaaacatcagagatagtgaaatatagtacttggcatttagaaagtaatatactgtcacgtgttgcttatgatgcttgcttaggtaattatgtcgtgcaaacatcacagtgtgtacttacacaactctagaaggtatacactattacacacctaggcttatatggtacaccctactgcttctaggctacaaacctatacagcatgctactgcaaagaatactgtaggcaactgtaaaataatggtacttgtgtatctaaatacatctcaacacagaaaaggtacagtaaaaatatagtatgataatcttatgagaccaccatcgtttatgcggtcattgaccaaaatgctattacgtgatgcatgactgtaaatattttcttttccttcactcttctggccattttaagccaaatattgggaagttcaaaacattatttcaagtaggcaagatgttattgtacgtcaaaatgattaattaaggacacagttccttacattataaagtaacaaaactacaaggccaaataactaaacaaaactatattttcatttcactaaacataaaataggtctggctctgaggtatactttagaaaaaaagtaccaagtacactaaaacttttttattatccaacatattccttttttaaaaaaattcaggccgggcacggtggttcacacctgtaatcctagcactttgggtggctgaggcgggtggatcataaggtcaagagatcaagaccctcctggccaacatggtgaaaccccgtctctactaaaaatacaaaaattagctgggtgtggtggcacatgcctgtagtcccagctactcgggaggcagaggcaggagaatcgcttgaacccaggagtcagaggttgcagtgagccaagatctcgccactgcactccagccgggcgacagagcgagactccatctcaaaaaaaaaaaaaaaaaaaaaaaaaaaaatcaagcagttctccaaagttaactaaaaaagaatgccttctatttaaggaaaaggacatgtaattaaattcagcatccaacctatctgatttctactgtcttaatctttcaagtcctcaatacaacttggacaaaaaactcttttaagacataaatttgatttttgctgttctctgggtttgaggtgtaatgatttcagaaaaatcacaatcatttgctagacaggtaaacccattttcaataaaataacagtggggggttttctttagggatccatggtttcctttagataaacctaaagcaaaatacatctttaatgccttcagcccaggagttccaagttagagtgagatatgatcacaccactgtactccagcatggacaacagagcaagatcctatctcaaaaaaaaaaaaaaaagagaaaagaaaaaaaacccaaaaaactagtgaagatactaaccatggtcctttatatcccaagagaaatatatacataatataaatgtgttttcttccattgacctgaaattcctttatttgatattacacttcagtaaataaaaatacactctttcttaaacatactgagttgagaagcaactaccaatctactgatctgggggaaaggggtggagaattgtataactttgagatttctcagaactctcctcagcttaaagatctcaacttaaggcaagatcataaaacatgaatataactttaaaatgcaaataaaacagtcattaaatagttgttattactatgttcataaagaaactttttggtgtctcttgtcaacaggaagataaatgaatcaaaagttttgtaagattcttcataaagcaatacataacagataacaaacatggttttctcatctagaactatggaaaaaaagtgtaccagaacaaaatttattttcctttgctagtgttgtactttgtggtaagtcatatattctgagggttttctcttcccttccccctttattcagaaaaacctatattaatattagaactctgatgattttacttttgattacctgaaaatgatagcactaagcccccctataaaaactgtgcccactgttattaacattttcataaaacggtagatgatttgactaatcttccttcccacattaactcccttcaaaggaacacagtaagctgagaaaatttttcaggtgtggaaaaatggctttccagcatcctaataatttctgaacttagaaatcatctttactgagaaaatatcaagtacctagtttattttaaaaagcataaaaatatatgtattatatatattatattcacagaaaattaaactgaagacactacttaaggagctatcaatgaaccttaatattctacattcaaaatgctgaaaagtaaattggaaatagaaatcttaattatagatattggtatttaaagaaattagtcactaaattgagaaatataaaatagaaaatggagcaaacttcatattcccatccgagaaacatttggttcatgaatggtacatagttatcaagaatctgaagcaattgctttttggtcctacaattttggacacctgatgaaccaagtattttgtcctttgtcaatatattaaattactatttccaagaagaagcatcactaccttccagcacctaaacttttttcgtgcctaaatgccagtccaactctggatgtcacaaatgttcttagttgtgaataaatttttgtgtagaaacaattttataaacagtgcttaggcagggatgaaatcttaaagactccaaaaacaaactttttaaaaagctttttggggctttcctgaaaactgaattacccatttataacatggcttctaagaaataaattacaaattaaaaaggactaatgaacaaacttaagaatgtagaacacacattaatatctaaaccgaccagagtacttaatgatcaacagcattacttatttagcaatattttccagagatcagcatgtacataactcctaaaatctctaattctcaaatttctattttctctttatcatttttacttgatgtcagacagttttataaaagtacaaagaatgtcaattaaacaaggcaacagatcagataataaatgaacaggagattaacaccaggcaaacttctctctcttttttattaccttaaaatgatagtgttaagcctctcctaccttcctgtcttcctgctcccaaaagatttactacaataacctcttaaaagggtagaaaattacctctttcattggaaaagcagtgttaaaaacagaattcaaaagatagagccccagaaggggtataattcaaaaatttaataatcagttttctcaaaacttggtttactcataatagatttcaagtgatttttaaaaataaataattgtaagaaacaattatgtgttgtatacttacagcagcgttacagttaatagccatggggtaaatgtgctaggttccattatcgtcctatcaaaatggcttctggaacattcacaacttagaacagaaagggcctgatggtcatctgatgtaactacaccttaggctggggaaactgaggaactgtaagactaaacaacagacacaatgtcacataacaaattaatgtagcgccagggtaagaaccctgtttgtttgtttgtttgttttaatagaaagatgaggtcttgctatattgcccaggctggacttgaatacctgggctcaagcaatcttcccacctcagcctctcaagcagctgggactacaggtgcaggccactgcacctggctgaacccagattctttgtttttacttgtctagttacttaatggtggcaaggcaagcaccacaggcaaaggccctgtgggagagaatttggatactgaaagaattaaaacattcaaagtggctggagaaatagggctaacatcttacacgtacttatatgccatgttaagaccacgttaagtgctgagaagctgtggaaagtcctcaagaatttcaaggtaggggagacatgatcaaataaagattcgtctgatacagggtagagatgcatttgtcttcagcaagaaaagaaaaataatcacaacaagaactatatttatacaatttaaagggctcttcttatcctttttttctgatttgtcctttttcctttattaaaatgggagaaattcttttttaaatgatggtgataatagatgagaagaatattttaatgtcattacttggcaaaatttggacagtggccgtcatggagaaattgctaccttcatacatttctggtgggaatgaaaaatagtacaaaccttatggatgggatttggcaatatctaacacacacatacacacacacattaaccctttgacccagcattcttacttctaggtattgatcctcaagacacaatttcaattacataacacacacatacatacatacatacacacacacacacagagttatttattgtggtaatagttgaaattgcaaaatactggaaaccacctagatgtccaatcatagaaaactagttgaacagactgtagtatatatacaaaatacagtactatgcagctgtaataatgagaaatatctctataaattgatatggaatgacttcaagaaggtagtgttaaatgaaaaaaagcataaaagagcacacatagtatgccaccttttgtataagaaaaaggcaaaataaaacgtgcatacctgcttatttttataaaaagaaacacaggaaagataaaccaaaaaacaagggtggggttggaaatgggatagaaggaatatcaaagaatatgacatttttcagattatacctttttgtatagttacgactttgggaaacatgttaatgctttatattgggtattgacaaactttcttctcaaggagtagatagtaaatattttcggtttgcaggctctactttctggctgcaacttctcagctctgtactgcagtgcaaaagcagccacagacaatatataaatgaataaagcggctgtgttaaaacaaaatttatggtctgtgggctgtgcatgccatctcctgttatatgcagtcaaaactatgggccaacaaggatgggagaaaaacaccctagaacttcatttattttagtgtctggcacataattggtctcaataattagaatgaatcttaaaattcttcaaaagcccgaggaaaaaaggcaaattttcttttgttaatacacaaattcattattactcttattacttgatttatcaactttaaactgtatttgttaaattcccaccatttagatgaggttatacaattgttaaaagaaaccattttgttgttgaaggcattctttatgaaactatctgatttctcatgtggaacaaacattttctgggcttgttgcatcgtaggattttttgcatttttctctctgctctggtgtgacagtttttttattaggtcttatgatttcccttttgtggattcttttttcatttttttaaagcatattccctagtaatttcatttcaaaagggcagtcaaaagataaacattctgagtccttgcatttccaaatttcattttgctgtcatatttgacaaattttaggttataaaatatccagtattcctaatgagaacttctgtgctgatctggatctcattcccctaaaatagcttactttttctctctggaagcttttataattttctcattatctttagaattctgaattttttgctgggtggggtggctcacacctataattccagcactttgggaggccgaggcaggcggatcacgatgtcaggagtttaagatcaggctaaccaacatggtgaaaacccgtctctactaaaaatacaaaaattatctgggcgcgttgtctcgtgcctgtaatcccagctactcaggaggctaaggcaggagaatcgtttgaacctaggaggcagcggttgcagtgagcggagatcacaccattgcactccagcctgggcgacagagcgagactgtcattaaaaaaaaacaaaaagtatccacattcattcatcatgcttggcactatgggccctttccatctgaagccccctggttttcattagttttggaattttttttttctgttcttttttattattttctctcctccatttcctctggtctttcttatggtaatgaataaatattgaactgaggtacctgaaaataccaaagtaaggaactacataacctaccagtacaatactttgttgtattttcctcctaggaagaactgcctttcctatttctttttctttaggtctgttacagaagtctcggtttacttcaatttctgttctgcttctctctttggcaccatcaggaaaccctagccccgtgtctgtaagtgtacacaaaatttgaaggtgggcgcgggcttgtatctgtacagtttatgcactgcacaacagcatggggcttcagcctaaactctgcataccaagcttagggttgctgtgtccggacggcatctttttataatccattagtaaagaggaaggtgcttttttttcgtttttctttgagacagtgtctcattctgtcacccagactggaatgcagtagtgcagtcacggctccctgcagcctcaacttcccaggctcaagcaatcctccctcctcagcctcccaagtagctgggactacagaggtgcattttttttattctcataggctggcatggccttagatgggggactggtccaggtgtttcatgttcttaaaatgttgctcacaaagtgtagtacccagaccagcagcatcagtatcacctggaaacatatcagaaatacaaattcttggaccctacactggaaactttgtgactgggcccagcaatctgtaatatgtgttttaacaagccctcctggtaattttgatgcatgctcaagtttgaggaccattgccaaacagcactttagaaaaccttcctgattattgccccactctctgtatctgctactttgagcttgggggctctctaagactcccacttccaccagtcccctttcctgggggtgttgtgtgctgtggttttctctactttattgtatccacaatacactcatcatttattttttatactaaaaaaatgaatcaactcctccacttccctccacagtttttctgcttcacagtctgagtactgctgggtttcactcccctgtgatatgtgtcttttttgtcacttctgtagggtttgcggggagaaaggaggtagaagtgtgtgttcagtctgctcttccgatacactgagttccattatctcattataaatgagaaatagtttcatttttaaaagcaattgcacaatccaagttacacaaaaagtcatactacttaagccctttgactgctgctaaaaaatagtgtttttacatcaaaacacaggagatctttaaattactaacaacataaccttcaatttaattttcttttaaaactgataattttccaactaattttaccaattattgttagctcatattttaataggacataaaacctatgaatcataggttttatatataaaaaaggtaaaaaggttttatatatagtactttacgaacagaagcaatttatttaaataaaaatgaatactacttaagacttagcactaaaaaattataccatttgatttatatgtcatataggtaatttttgctaatggccaaaattattggacaaaaattactatactttatgttgtggtctcataagacttcctgagatgacaaagactgaaacacacatgattcaatataatcttagctacctaaaacgaggggaaaaaatggacctgcatttaaagaaaaataaagcaaaggacacatataaatagtttctgtaggccaagagtggcagctcatgactaatcccagcactttgggaagccaaagcaataggatcacttgagtctaggagtttgagaccagcctgggcaacagcaagaccccgtctctacaaagaataaaaaaaattagctgggtgtgttggctcacacctgtagtcacatctactaaggaggctgaggtgggaggatcacttgagcccaagagttcaaggcttcagtgagctatgattgtgtcattgcactccagcctgggaaaacagagtgagactcatctgtttaaaaaaaaaaaaaggttttctacaagggatttctttaccactctccatcccttccccaggccatttgttcttcattggaactgaaatgtgcaaacgtttattttcagaagaccccgttaaaatatgtgggttcaactaaatcagatgccaatctaaaagtgtacactattaaaggtgtctgatattcctatgaaaaagataatgcaaaaaaattatattttcaagaacagatagtaagttcagtattggattagtgtatcctatgttcatttttgtttatgactcatgtaaaagacaagtaatttcacttctccacctttttcatcttaatgtttaaaagaaaaaaactaaatgataaaacctaatataaaaactatcattacttaatatgtaaatttaaaaacttttagacaattaaattatcttaaaataagaaaagggcataatgataaaatgaccagacttaaaagatagcaagacagatttatgttagtctttgaagaattcttaaggaatataatcaaaatcttaaagataaatttgttgttatatttagtggagataagaaccactgaaacttagcaaagtaagaaaaggcttttttgaaaaggctaagaaacaaatccagctgtttcctattctacgtttccttatcatgttctaaatctagcacttacaggaagacaccaaaaatacctttgatatttggccatttctgagaaaagctgaaaatatgaagacccaattaagtaaattagtaacaacaccaaggaccacaaatgtgtatgttgaaacagactgggtcgtgacagttcagagtttttaaaacatgctataaatagttggaaaaatgaaatgccaaaaagttgttctattttataattaaaggtaagtaagcttagatgattgaagcataattgccttagagtagttctaaaattttagtaaactcaataattaataacagccttttattttgctgcagaaattcagaagccacactaattaggatcgatttctcctatttctcttctttgtttcttgcatatccagaattctagagcccttcctcacaattccagttaagatttgactgtaagtttacaaactgaaaattctaaaactaaattcaagtaattatctaacatcatgactctttataaaattctctgaataagagtatatgtgcttccatcccacaggttaggtacagagagtatgtcctagctattcttctaccattgctacttcccttcttgtttgtacttgaatagtgaactaacaccaccctcagggtaattactgacatgattcataactaaagcaacataacaaattccaactgtaatataacagtgaacactgcccatacttaacaatgctggagtcccatgatgccttttccccctgaactttttccattttgagaaggtgatgggggaggaggggtgcctcaagagaagagaaaaattctctgtacttatagtaagccaagataaacaggttaatactgtgtaactgaatcctcggttctctgttcttatgaaatcactgtatagcagaggaaaaggaatgaagggtactaacaattaattgttatgtttctaattactattctcataaatgctcatttattcctcacaacaactgaaagttatccctattttacatacaaggaaacctgagatacagagacataatttgttcagaaccacaccaaagcaagttacatgacatctctggacctcaggtctctttatctataaaatagggatagcagtgtttacacttccaggcttctgtgaatattaagtaagatccgctaattcaaagtctaggccctttttgccatagcatagtaacactcacaaacacaaaaatacaaacacagataaaacatgagcaaataaacgaatcatgacaatgcacataccaaacagtaaactaatatacactaaaaggcaacatagaggctaaaagtatagtctctggaaccagatagcctgagttaaaattctggctctgtcaccaaccagttttgtggacacaggaaagtttctccatctgtgaaacagtgatgacagaatctatttcatagagttgtgagaagttatgagttaatacactgaagcacttttaacagtacctataataggacatatgcaaaaacattacctattattacttctacactgaaatgtcacacacataaatgagagttattttgatgctggtctgtataattatcagacaaacttccaaagaagtaagcaagtgatgagcactacttcctaaactaagtttctatgagctacctacaggacattcctgagttgttagatttttgtttgttttttatttttggacatccttgaatttcttagtcccttttgccaattaatgaacaaagagaatgggtaatgtgtataatatggatggtgtggtggggaggagtgacatgaatagacaagttatgaatatttctctacagtaaactctggcattttttcatatgtcagagtgttttaaaattaaagaagggtatagatacatagagaaaagaatagacttagggatcagacataggactcaggtactacaagttacttgagcaaaggtttagaaatgaaaatgattttatgtttaaaatcataaacagatctggatgaagaactcaggcttacataagcatttaacacagaatacctgcattgatttataagttatctcagtttctttagattttcttattgttgtcctttttaacatatgaggacccacatgaaaacccatttaatgccttattaatccttaacaatgatgaagaaagttattttattacattgagcttatattcctagatctttaagcaatcatctaattacatttcatatgtagcatatccttgctacatttcagtggatgattattcatatgagttaaattactatctttttttgtttgtattctttctgcttatctatcttaaaatttttgtagattattagttcactagcagaaaaataatgtcactataaaatatttattcctaagatattgccttcttttattttcccttctttgtcgttacatttttgcattcgtatagaagatgactttaggcatacctggaatcttttactaaaaacagagaaagagtaaaacaacaacaaaaacctcaggtccaatgtttcagtctacgaaaacaatctagatgtctatttcacctcattgtcaccccttcccttgaaagttgatccaaatacctaatttcaacctaaattattgtggattctgaaaacacttatagtaaattctcatttctaggagttgcatgaatgaaacatatatgcatactagcatttacttttataatatagtttgctcatttttgtaaagtcttcttttaatccttcttcctgaggaataagccagaccaatagtcacagtgcactgcacaaaggagctagtcaacaaatgttacttttccctttcttgttacttattagctcctaggcaaaacacttcccttgttactcaggataaaaaatacacatacatattatgctttcacttagaataaaattaacttactatttgtattgctccctttatactgtcccatatgcctgactatatattatagaggtagtaaaaacagcatgaatgatttcacagaaataatgtagtacagtgacagagacctttactagaaaccagtatggaatttggaatcaaaccaatatgagttcaaatgccaactgggtgacctcagacaaattacttaaagagagctgatgatctgttctagggaagtgtaatgaagtatattaaaataataatataataaatatgagagacagctttaaaaaaaaattacaggactctatcaaactattgagaaagaaaaggagaaagtgctcagtatttaagcccagatgatttgaaaagtaatggaaaaatagacatagtgggaagcaaagttgcatttagaacaagctaaataatttcagttttgaataatgaagtcaagtctcctaaatcacttgagaaactagtatttagctgtggaagtcaagggcaaagctatattaggaatatattgggtcagagtgagaaaggttaaagctttagctatgttttcagaattgaattttttaaaattaaaataaaatgtttcctctttctggcaaagaaaagtaaatacatggttattttaggtaattcatgagaagcttttaaaaatatagcataattgctttatcattatattagcatggctgttgtgtaaaagtatatatggcatcatactgcttcattgtcctggcccatgcttttaaaaagtgttaaatgtggcttaatcgttatcttacaattcacttgccttcctgagttgtagctctcagcaaaatataacttaaaacaaataatgtccaatggtaaatacttaaaatacttctgcaaagtacaccaaaggttaatgacccaccatacaaacatacaacagatatcctttttggttttttcagagccacagactgttctcccttttgtgtttgcttcccatcaattttgacatttcaaaagaataccaaaaaagcttaaaattttgtttataagtttgtcaatgaatcaggactctaaaactatgggctattcattacaaattatactcatacataaaatgaccctcgatttaaatttgaaaagataatttgaaagatatattttaaatattttctgtttttttattatactttaagttctaggatacatgtgcagaatgtgcaggtttgttacataggtatacgcgtgccatggtggtttgctgcacctatcaacccatcatctacattaggtatttttcctaatgctatccctcccttagacccgcaccccctgacaggccccggtgtgtgatgttcccctccatgtgtccatgtgttctcactgttcagttttaacttataagtgaaaacatgtgttgtttggttttctcttcctggttagtttgctgagaatgatggtttccagcttcatccatgtccctgcaaaggacacgaactcatccttttttatggctgcatagtgttccatggtgtatatgtgccacattttctttatccagtctaccactgatgggcatttgggttggtttcaagtctttgctattgtgaatagtgctgcaataaacatatgtgtgcatgttctttttagtagaatgatttataatcctttgggtatatgctcagtaatgggattactgggtcaaatattatttctggctctagatccttgaggaatcgccacactgtcttccacaatggttgaactaatttacactgccaccaacagtataaaaccattcctattactccacagcctctccagcatctgttgtttcctgactttttaatgatcaccattctaactggcatgagatggtatctcactgtggttttgatttgcatttctctaatgaccagtggtgatgagctttttttcatatgtttgttggccacataaatatcttcttttgagaagtgtctgttcatatccttcacccactttttgatagggttgtttgttttcctgtaaatttgtttaagttccttgtagattctggactttagccctttgtcagatggatacattgcaaaaattttctcccattctgtaggttgcctgttcactctgaagatagtttcttttgctgtgcagaagctctttagtttaattagatcccattcgtcaattttggcttttgttgccattgcttttggtgttttggtcatgaagtctttgcccatgcctatgtcctgaatggtattgcctaggttttcttctagggtttttatggttttaggtgttatgtttaagtctttaatccattttgagttaatttttgtataaggtgtaaggaaggggtccagtttcagttttctgcatatggctagtcagttttcccaatatcatttattaaatagggaatcctttccccattggttgtttttgtcaagtttgtcaaaaatcagatggttgtagatgtgtggcattatttctgaggtctctgttctgttccgttggtttatttatcttttttggtaccagtaccatgctgttttgattattgtggccttgtagtatagtttgaagtcaagtagcgtgatgcctccagctttgttctttttgcttaagattgtctcggctatatgggctctttttaggttctatataaaatttaaagtagttttttctaattctgtgaagaaagccaaaggtagcttgatggggatagcattgaatctataaattactgtgggcagtatggccattttcacgctataatttttcccatccatgagcatggaatgttttgccatttgtttgtgccctctcttatttccttgagcagtggctgctcttaatattttttccttcatttcaaccttggtgaatctgacgattatatgtcctggggttcctcttcttgaggagtatctttgtggtgttccctgtatttcctgaatttgaatgttggcctgttttgttgggttggggatgttctcttggataatatcctgtagagtgttttctaacttggttccactctccctgtcactttcaggtacaccaatcaaacataggtttggtcttttcacatagtcccctatttcttggaggctttgttcattccttttcattcttttttctctaatcttgtcatcacgctttatttcattaagctgatcttcaatctctgatatcctttttttctgcttgatcgattcagctattggtacttgtgtatgcttcacaaagtcctcgtgttgtgttttttcagttccgtcaggtcatttatgttcttctctaaactggttattctagttagcaattcctctaaccttttttcaaagttcttagcttccttgcattgggttagaacatggtcctttagctcggaggagtttgttattacccaccttctgaagcctacttctgtcaattcgtcaaactccccttgctggggaggagttgtcattctttggaagagaaaaggcgctctggtttttggaattttcagcctttttgtgctggtttttcctcatcttcatggatttatctacctttggtctttgatgttgatgaccttcaaatggggtttctgtgtggacgtcctttttgttgatgttgatgctattcatttctgtttgttagttctccttctaacagtcaggcccctctgctgcaggtgtgctggagtttgctggaggtccactccagaccctgtttgcctggtatcaccagtggaggttgcagaagagcaaagattgctgcctgttccttcctctggaagcttcgtcccagaggggtacccaccagatggcagctggaactctcctgtatgaggtgtctgttgattcctgccaggaggtgtttcccagtcaggaggcacaggggtcagggacccacttgaggagacagtctgtcccttagcagagcttgagcactgtgctgggagatctgctgctctcttcagagccagcaggcaggaatgtttaagtctgctgaagatgtgtccacagctgcgccttcccccacgtgctctgtcccaggtagatgggagttttatctataggcccctgactggggctgctgcctttctttcagagatgccctgcccagagaggaggaatctagaaaggcagtctggctacagcggatttagggagctgtggtaggctctgcccagtttgaacttcctggtggctttgtttacactgtgaggggaaaactcaagcctcagtaatggggaatgcccctccccctacctagctctaccatcccaggtcgacctcagactgctgtgatggcagcgagaatttcaagccagtggatcttagcttgcttggctccatgggggtgggatccgctgaggtagaccacttggctccctggcttcagccccctttccgggggagtgaatggttctaactcgctgtcattccaggcaccactggagtacgaaagaaaactcctacagctagctcggtatctgcccaaacagctgcccagttttgtgcttgaaacccagggccctggtggtgtaggcacccgagggaatctcctggtctgtgggttgcgaagactgtgggaaaagcatagtatctgggctggaatgcaatgttcctcatgacacagtctgtcacagcttcccttggctaggggagggagttccccaaccccttgtgcttcccgggtgaggtgatgccccatcctgcttcagcttgccctccgtgggctgcatccactgtctaaccagtcccaatgagatgagccaggtacctcagttggaaatggagaaatcacctgccttctgggttgatctcgctggcagctgcagaccagagctgttcctatttggctatcttgccagcccatcctaagtattttcttatgtaaaagtatgttggccaagtacttgtgtaactgaatgaagaaatttgctaatatttggtgaccacagaaaaagagtatgacagaatccaattagtaagtcagctacatttgacacatttaaaggagactcaatgtttatgtgacgtaccaaaatttaatacaaaaaaatagttaataactagtacttctatgttctccatatagtaagcacccctctgaaacagtataatgcatcagtcagaagacctgatgcatttaacacaaggaagcggaaatgataccctaaatattctgtaagtgtacatatttcatatttgtaaatacttcatcaatcactaagccttacgtttagtaaccctgccagctctgatgaagaaacagggaccagattcgtttaaacaaccacaaaattgaacaacataaataaaagaattctttttacacaataaacaacaggcagtacagaacagcaatccctgggagaaggaaaacaaatggtgagcctcattattgccacagcttactgcctggggacagtttatggtccacagtccagagatgagaaactggaatgcagcccagtggtcccccagttgaagaaacagagttaagaaatgggagatgccaaggcaaactaaaattagcaggacagaatactagagagaagaaagctacaaaaagagaactccagaggtctgcagagggttaagcttgagtcttcagctgagtactgatcagtgcatggatgtgatgatactactcaaaaccagggaagaaccatgggaaggagtagaatccttccaggagctgacacagggtcaggaagagttctgctttcaactagccagagtggaaaaaccttgtcatatatgggatattcagtagagtactcagaagagcaatgcctggatagtgaaggaaaatcggctattgattaaagactgctctgtgtccaaaaacaaaaaccagataaataaataaatgaagccttaaaaaagtcaaattatttccagataatttaattgtgttccaaaacacaggtcaaaatagtgaaaggaatacaaaaatatccaggacccactaaagcaaaattcatgatatctggcacctaacaaaaaaatcaccaagcagtcaaaaaagcagaaacatacgactcttaaaaaaaagagagagagagagagaactatcagtcaagagaaacagacctaaaaagacataggtactagacttagtaacagggacatttaaaaagttataatacctatatcccatatgttcaagaaggtaaagaaaagcataaacataataaaaatagatatggaagatataaaaaggacccaaatcaaatttctagaaatgaaaactatagtaagactaaaaatacaataaatgagattaatagcagattagatacctcagaagaaaaaaattaataaacttgaagacatagctttagaaggtattcaacatgaaatacagaaagaaaaacctgcaggaaaaagatacagcaaaaaaagaacaaggccaggcgtggtggctcatgcttgtaatcccagcactttgggaagccaaggtgggtgggtcacctgagatcaggagttcgagaccagcctggccagcatggtgaaaccccatctttactaaaaatacaaaaattagccgggcatggtggcatgtgcctttagtcccagtcactcaggaggctgaggcagaagaatcgcttgaacctgggaggcagaggttgcagtgagctgggatcatgccactgcactccagcctgggcaaaagagcgaggcttcatctcaaaaaaaagaaaaaaagaaacaaggcaaaccagaagacagtggagcaatatttttaaagcactcaaagaaaaaacaaaaagactgtcaacctagaattcaatacccagcaaaagaccttttaaaaataaaggtaaaatgtttttttccagacataaaagctggaagaattcatcactagtagacatgcacacaagaaatgttttttgttggctgggtgcggtggctcatgccagtaatcccagccctttgggaggaggccgaggcaggcaaatcacgaggtcaggagttcgagaccagcctgatcaacatggtgaaaccctttctctactaaaaatataaaaattagctaggcatggtggcgtgtgcctgtaatcccagctactcaggaggctgaggcaggagaatcgcttgaacccaggaggtggaggttgcagtgagccaagatcgcgccactgcactccagcctgggtgacagagagagactccatctcaaaaagaaaaaaaaaatagaaatgctttttgtttgttttataagaatagagacagagttttgctttgttgcctaggctggttttgaactcctggcttcaagagatcctcccgcctcagccccactaagtgttgggattacgggtatgagccactgcccctggccaaaaaaagttttacagtcagaaggaaaacaaaaggaatctggatctacacaaggaatgaagagtactggaaaggtaaatatgtaatcaaataaaaacatcttttttctcttgttttgaattctctttaagagataattggtttaaaacaaaagttatgagtgtattgtagagcttataacttctgtcgaagcaaaatgtatgacaacaacagcccaaaggttggaaaagggaaaatggaaatatactattctaagattcttatactgtatgtgaagtagtgtaatactatttaaagaaagactattaaagattaaagattcatattataaatcaaaaaacaattacaaaataaagaagtatagacagtaagcctacaaagaagataaaacagaattttaaaaattcaatccaaaagaaggcagaaaaagaggaaagggaggaaaagggagatgagacaaatagaaaatgaataataagatggagaatttaaacccaaccatatcaatagtcacattaaatttaaatctaaacatcccaattaaaaggcagatactgttaggcaagatttaagaaagcaacacccaacaatatgctgcctataagaaaatcacttctttaagaataaagacacgtataagttaaataaagaatggggaaaatatgccatgttgatattaatgggaagaaagctggaatggcttcactagtatcaggcacaagtagttttcagagcaaacaatattacgagggataaagagagggtcattttataatgattaaagaggtaaattcatcaaaggacattacaaatctaatgctttatgcacctaaattctatatgttagacattagattaggtattgagagagagattagtttttttttaagtgagccaggagttttgctttcaggacctctctagccctctgccccatttagtcccacttgtctcctggttactcccctcaagcactgaagacattagtctttatttcagtcacattcctccttgctacatgtcctggactcttgctcactgtactttctggctccttggccaggatcctcatgcactcccaagatcatttcttaaaatacagtaaactacccagaaatgttctgtctccagaaattctaaggtgaaacaactctttgactacaacctcctacactttcattctcattgttactcccactacacctattaaacttcattaaattcattacgttcaacttcattatttaatgaatgaattatttaatgaaatatcctgttactttttgtttgtttgttttggggttgtttgcttgttttgtttgtttttgaggcaggatctcattctaccacccaggctggtgtgctgtggtgcaatcacagctcactgcagccttaacatcccaggctcaggcaattctcccagttcagcctcccaagaaccacaggtgtgtgccaccacacctggctaattttaaaaattatctgtagagacagggtctccctatgttgccaaggctggtcttgaactcgggctcaagcaatcctctcaccttggcttcccaaagtgctgggattacaggtgtgagacactgcaccctgccaaatatcctgtttcttaaaacctctactttcactatgaatctcctatcttctctctgcaggtgaaaactccaaagcttaacattctaaccactctagggagggaggatgggaggaagagagctgagtgtgcaccaaggagcggtaagatgccagacctgtgagtgaagaagcatcttggaagtggaccctatagctccaggcacctgctgacacatagtcggagacaaaccacccagtcaagttcaacccaaattcctgacccaaaaaatcataagcaaaataaaatatttgtttaaagccactaatttgttatccagcaatagagaacacttctaatggctcttttccatcaatatttaaaccctacctttctgatttaaaaaatatgtttatattccctctacttcacatacatcaagctgtatctttacttctgttatatctttatttctcttcacaggcaaaacttttgataaaagccatctatttgactgtgtccactttatctctcattcagatctcatcctatccccaccccttcatttaacagtccttgtcactgtcaccagtgacttcattgttgctaaaacttttcagctcctatctgaaaagtctgagtgagcaagcactcactcagactttgtaatgttctctctctccttttcctttttttcagtttttaatttaatttaattttattttattttatttttgagacagagtcttgctctgtcactgaggctggagtgcagtggcacaatcttggctcactcaacctccgcctcccgggctcaagcgattctcatgcctcagcctcccgagtagctagaattacaggcattcaccaccaggcccagctaatttttgtatttttagtagagacagggttttgtcatgttggtcaggctagtctcgaactcctggcctcaagtgatccacctgcctcagcctcccaaagtgctgggattacaggcgggagccattgcacctggtcggtctctctatgataccacttctcctgattttcttcttatcttcctggctgttctatttcaatctcttttgtaggcacaggcttctcttttctgtccatcctttaaatgttagagctccttagaattctatctttagcctccttctcttctcatactatattctccccttaagtgatcttatcccttctccaaacttcagttactcagcaaagcataaggattaatagctttggagccagaaagacctgggttcaaatcacagatcttgccattttgcttgtgtggtctagggcaagttattaaacttttctaagcattcatttcctgatctagggtaaactacctcatggattatgatgaaaattaaatttaagaagtgctcaccaaagtgcctggcacaagataaactgtcaaaaaagggtggcattttttatggtccataatcttagcctagatttctttcctaagttccagacacacatatccaactgctacttgacacctctattgaaatgacctataattacttaaaactcatcaaatgaaattcatcttcccaagcaaacctcattcaatcctaggtatcttattttaatgaatgacactactatccacttaagttatacaagccagaaacctgcatgtcatcataagttgactcctctctgttctttacccttatgtaattaactgctacattttataatacaatgtcagatattgttttaagtactttacatgaatttaacatgagatatgcacatatagtaaaacaaagtttataaatgactagttaagtatatagataataaacaatttaagactaaatgagggaagaatgactatagactaggatgatcaggaaaggcaaaatggaccttaaaatctggtcaagaaaaaggcagaggaaagcatttcaagactcagggacaggcaaaaacaaacatggttgtgtgagtgaaagacaagtctgagtggggaagagaatacaggcaagggttctcaaactttttggactcaaaacccttttatattcttaaaattactaaggaccccaaaagcttttgtttgtgtgggttaaatctattaatatttactttgttagtaattaaaacttaatttagttaaaatttaattaaaacagaaatttaaaaaattacatcctatacaattcacccatttaatgtgtacaattcaatagtttttagtatattcacagagatgataaaagtgttataaaattgactacaataatgagtcaattttacaacattttcattatctcaaaaagaaaaaccatactctctagccatcatcctcaaaacacctagtcctccccaccagccttagaaaaccaataatctacttcctatctctactgaattgcctcttgtggacatttcatataaatgaatttatacaatatgtggttttctgtgactggcttctttcaacatcatgttttcaaggtggttatatattcttccattaggaagcataaagtagctaatagcttttttacattaaaggatgttgagggctcaaaagaacttgagaaaatttaaaaatatttatcttaataaacccattatgttaacataaataatttttaatgaaaaataaccatattctacaaaacaaaaaagatagaacaatagcactgttttatgatcttctgaatgtcttcactatctggcataacagcaaagagctgaattttcctatccgcttctacatttactttgttgcaatatgctgtttaggttgaagtatacaaagaaaaatctggcctcatatggaaagaggaggagtactttaataaccttttcagataattatggttactgttttctgacactacgccaaaactcgacaagtcatagtttcttaaaggttagttgcagggcggaactggaaacaatctcaatgaaccgaaataaatttttcgtattttaagactttaaaatccattggtttatcttgaacttttaatgaatatcttacccgtgaatgattttataacgatgtatttggtcatttggaaatactggttcactgaattatgtacttcttgtaaatgtttacaaatctctcacattcattgatatcaccaccgatttcatcagaaaagtattttatatattaggactctgtcaagctttcagtggtggatacaagtttctaaaattctaatttttacttgaaaacacaaaatttatcattggcaacctttactgtcagttgttttctttgaaatgacaggctcactttgttcactttcaagaatctaccacatacccaagcataaataaacacaattgcttatcagtcttacaagtaacacatgtgtttcacgaaaagagtgacgggttcagttcacaactcaaccaataaaataagtatttttcctcaagacagctatcatactttggtatgcaactttctacatacttcagtttcatcacattgaatattaaaaagacatactcaagagtggagattaaaaaaaaaataccatacaggtctgtagtctagaagcaacaggctattcctaccctgatgtgtagcaggctataccacctaggtttgtgtaagcacactctatgatgttcacacaatgacaaagttgcctaaatgaagtatttcctagaatgtatccccatcatttagcaatgcctaaccaaagttaacttaaagctcccattctagtttttttgtttttattttttatttttttgagacagagtctcgctgtgttgcctcagcctcccaagtacctaggaccacaggaacatgccaccatgccatcacacctagctttttttttttttttttaagagatggggtcttgctttgttgcccaggctggtcttgaacttctgggctcaaatgatcctcccacctcagcctcccaaaatgctgggattaggtgtgcaccacacacctggcctaaagctcctattctataaaccagcatttggtttctttgaccttctttctatgctggataattttagaactgtatcctgaacatcataaatgttacattgtgaagatcctaaattctgttatttttctaaaatgagaatggttttgttgtaagaagcaattatctttgcttaacttgaactgttctgtttattgggcagcaactccagtttcagttcagatcttttgcccttcatttggctgctctgagtctgtgacacacaggaattattcagatttcagacagaatctgggtaccctttcttggctctttcccttgcaggattcttccactctcttcagtggccaaggtttccctagcttcaattttccagttttcctggtgaagagacccatagttttcccactgacatccctgccctaccttactgtccttccctatacctactgcacttagccctagactaaaagccttctcctcaggctcccagctcccctcttctctttctcaactagcatctgttcttcctgtccagtaatttcagtcagttactttttgtattccaaacaggtagtatagtggtcttttttgcagaaagccatatggtagggtcttcttccaacattaccagatgaatatgtcctccacaggaggttttttacctgaggaattagcatgatgagatttacattatgagcagatttctctggctgctgtgagagaaatggtctcaaggtagcaaatgagagatcaataggaagagtccagaatagtccaggaaagacagatcatatagggaataaagcatctgacatactttgatttataaacatttattgaaaaaatatgataaattctgaaaatactgaaactaaggcatccaaatttcatttcatcacctgctggcattataaacctcttaacagatttaatagggccaaactcttggaagtcatttcatctaacccttaggtatgatgcattcgatagcacctgtaatcccccaacttttcagagaatgagatttcactaggtttctcaacagacttttccagtatcttacactcatatattgcccattaatctctctgggatgaaaagaaacagaagtgggctttttccttatggatttattttatctcaaggctgtcaagcaaaaatgctgaacccagttccccacacaaccattaaaaataagatgatgttctttctttcattaaattattggcaggagagaagtaagcagcacctcatttgaaatttccctcagtcaacaactctgtgtgaatatgttcctatcaatctacagttttaacgagaattttttattatgacacagaatcaaaagactatgaaagcttgctctgggcctttatctgggtgttgtttacacggatgtgttcaatttgtgacaaattcaccaaactgtcacttgagatatatacttttcttaatatgtgttatatttcaaattttaaaaaaaagtctgtgaaaacgcaaatgtatctatgccatatcccttctctataatgtcaattattctcacaggaaaaatacacagtatcctgtttgtgtggcataacttatcttcacaaagttatccactaccactcaaggtttttatgattaaaaatgtaatataagactcaaacactaaaaatatatgactaaataaaagtcctctatagtttcatctgccagagatactacatttaatatttaaattcagaggcttatgacttccacgtctcctattgtaaatcaatcatactcttttccagatttggggcttgtcactttttctccaaaaattctcaaaaataaaggaatattgtttagaagccctaaataactgagctaaacaggcttgagtacaaacaatttttaaacagtaaatttctattacatcctccacaattttccaagcctttatcttttttgtatcttcacagtatctctctcaattcaaggcatatggcgtatgttcaataaatatgtgttgatagaaataaaattaattctctaaaagaaataacaatagtcactttcagatgatacaggaatatctcaatatcaatttctgggaggagaggacacataagcctttaaaaagtactctatgtgcttattttatttacttatctatttatttttactttcacttaattacccagattcagaaagttttcttctaagtactccttatcaagtgtaaattcattccataagtagttatgaaattcaataataggagtgtaacattcttctatcaatttcccatgtttctctcctctattcactctgtctatatggcaatacaagaaaacactaagaaataaattatcgcttagtcattaaaaattcaaaacgtaaggaaattaaaactaaggttacatgtgcaaattaggattatggcatacctaaagtcttaattttttaattaccacttctatatactgatacaaattaaaagatatatacttagcatgcaacacagtttcaaaagaaaccattaatttacaaaactgatgattcacaaagtattatccaactatgttgatttgaagagcataacctcaagttgccacttttattaaaacaaaagccttatcaatagttataatgctataaagagaatcctagacaatataatttgtgcccctatattgattgaaccaatacctataattgaacaatagtatacatttttatactttaataatgggaaaaaatgaatcctactatatttaacaagaaaaaaatgcactttttaataatctaaatagcataatctcacaatttaagagcagacatttgcattttcaaatatataacaactgtactttaaataaattatctaaatactttaaagaattctgttttggtttagaacagggccctcagaaataataccacacatctacaaccatctgatctttgacaaacctgacaaaaacaagaaatggagaaaggattccctatttaataaatggtgctgggaaaactggccagccatatgtagaaagctgaaactggatcccttccttacaccttgtacaaaaattaattcaagatggattaaagacttaaatgttagacctaaaaccataaaaaccctagaagaaaacctaggcaataccattcaggacatcggcatgggcaaggacttcatgactaaaacaccaaaagcaatagcaacaaaagccaaaattgacaaatgggatctaattaaactaaagagcttctgcacagcaaaagaaactacgatcagagtgaacaggcaacctacagaatgggagaaaacttttacaatctacccatctgacaaagggctaatatccagaatctacaaagaactcaaacaaatttacaagaaaaaatcaaccccatcaaaaagtgggtgaaagatatgaacagacacttctcaaaagaagacatttatgcagccaaaagacacatgaaaaaatgctcatcatcactggccatcagagaaatgcaaatcaaaaccacaatgaaataccatctcacaccagttagaatggcgatcattaaaaagtcaggaaacaacagatgctggagaggatgtgaagaaataggaacacttttacactgttggtgggactgtaaactagttcaacagtgtggcgattcctcaaggatctaaaaccaaaaatagcatttgacccagccatctcattactgggtatatacccaaaggattataaatcatgctgctataaagacacatgcacacgtatgtttattgtggcactattcacaatagcaaagacttggaagcaacccaaatgtccaacaataatagactggagtaagaaaatgtggcacatatataccatggaatatgtggcacatatatactatgcagccataaaaaaggatgagttcatgtcctttgtagggacatggatgaagctggaaaccatcattctgagcaaactattgccaagacagaaaaccaaacactgcatgttctcactcataggtgggaaatgaacaatgagaacacgtggacacagggtggggaacatcacacactggggcctgtcatggggtagggagaggagggagggatagcattaggagatatatctaatgtaaatgacaagttaatgggtgcagcacaccaatatggcacatgtatacatatgtaacaaacctgcacgttgtgcacatgtaccctagaacttaaagtataaaaaaaaaatccgttttgttttaaagtggcatgttttaagaaaagctattcttaaataaatcactgtgctgtattagatggtttagggtgctcgattaaagctccattctaatattccacttgatccttgggctatagactgaaataacattattcattaaattccctatatgttcttgaggtagatgttaagaaacacctctcactaacaataatttgttagccatatgcacatgaatgaatttcttcaattatttagctacttactgagagccatgcaagggattccatgattcgatgttcacatcgttctaaatgttttatcatttctcttgtcaagttgccttctgctttgataaaactttcgatcactttgtaaaaatcaaaggcttttaaattaagcacattcagaatccatgggaaagacaaatctgttccagaatcaagattctgagatgtacttcctaaaaatgaaaaaaaaaagtaactatttatgaaatattaacccttgagctaggtatttttttggaagttattatcagacaaagaaaacagtagaaaggttaaaccatttttatttagagcagaattttttattttggagtctacggactcataggaaatagccttccaattttgagtgtaagcaaatctgtgtttttcctagagaaaggacttatagctgatctcaaattttcaaagatttaaataccctaaacttatatcaggaacaggtttagtatcttatcagccattggcatatctattttaattctcattaatccttggtaagaggatagacagattcttcaagattctgctaatttcattagttacaaaatggtatctcattaaaatatgcatttcttggttataaatgaggattcacagttttccttatctgtttactaataaggaaactaaaagttcctctttttctgtgttttgcatccttatacaaatgttccttttgtttctgcaagcaaaactttcttttaacatttgcaacataatttgcaaagtgatatacatttatgtttttaaaaacattgtaattggcctttgttctgtttatccagtggattctagcttcaatctttagtttcataaccatggaggttacagcagtgcttccatatcagtagaggccactcttgaatactcctttggcactctacaatctcaaaggtcttcggagggatttcaaaaagtaccttttttggattcagtataccagtatactcagaagagaagcctagtgaaatattatccccaagatggcctcaaataactcaaataagcctcttaaatggcttataatgaccaattacattcttcagtatatagtgatctaaaataagcattccttctccttaacctcacactatccctctcccccgaccaaagaaacacaccacattttaactttaaattgaacaaaagtgtttatttatgaaaatttaacttactgctatatgtggccattacaacctcaagagcgcacgccaataaagacatatgaaaaatgttgtcattcagaagtttgctaaaggaaaaaaaaaaagattataaaatacttacttctataaaaagaaaaaaattttttactaaaagtaaaaaatttacctaaaattttgaatggataatcgttcttcttcctgaaacagataatttaaaaaaaaaaaaagaagttgtttaattgaaaccttatttgtgtcagcattgaattttttttttttttttttttttttttagatggtgtcttgctctgttgccaggctggggtgaaatggcacaatcttggctcactgcaacctccacctccctggttcaagggattctcctgcctcagcctgccaagtagctgggactacaggtctacaccaccacgcccagctaatttttgtacttttagtagagacagggtttcaccattttggccaggatgatcttgatgccttgacctcctgatctgcccacctcggcctcccaaagtgctgggattgcaggcgtgagccaccgcgcccggctgaaatttttttatattgtttttaacttactgatttaagcatggattccattactcggtaatacaagcgaactccaagtttgtatcgctacaaacaaacaaaaagaaaaataagagcctgctattttagaaaatcacaattatgaaattttttttttttttgagatggagtctcactgttttgcccaggctggccttcacactcctgggctcaagagatcctcctgctttggcctcccaagaggctgggattataggcatgtaccactatacccagctgacaattactaaaattttttaaaaagccttttcttaaaacatacttctcacccttcttacaaatatggccgccaagacaacacaaaagctagcttgtctaaaactcacaacttaagtattaagtggtgattaacattcccaagtaaattaacaagagggtaggtccagtacctggatttccttaactccatttcagtttatatcattcatactaaagataggttatgtgcccagtactattttaagcactttatgtaccttatataacatttctcatgacctaggacatgtattttcaagatagctgtccaggattaagaggacagtctttgtccataaatttagtaaaactgacacaggcaaaaatcagatcaaactgaccttatgagcaagaagttttagccaaataactagttcccattatttgaaagaataaccaaattttagaaatataaacacacaccatattatttccttccaaactaagagcaaaaatctcatatataatcatgcaccgcataacaacgtttttggtcaataactgactgcatatctaacagtagtcccataagattataatggagctgaaaaattcctattgtttagtgtaatgtagtgcaatgcattacattactcacatctttgtgatgatgctgatgtaaataaacctattgcactgccagtcatataaaagtatagtacatacaattatgtacagtacataatacttaataatgaacatgttactggtttatgtatttattatactatactttttattagtttagagcatcctccttctacttgtaaaaaaaaaaaaaagttaaatgtaaaacaccctcaggcagctccttcaggagatattccagaagatagcatcatcatcataggagttgacagctctatgcattttattgtccctgaagacttgggacagaatttggaggcagaagacagtggtattgttaatcctgatcctgtgtaggcctaggctaatgtgtgtgtttgcctttgtttttggcaaaaatctttatgaaattgaaaaaatttttaaatagaaaaaagtgtacagaataaggattataaagaaagaaaatatttttgtacagctgtataaggtgtttgtgttttaagctaagtgttataagagtcaaaagtttcttacaaactgaagatttataaagtaaaaaagttacagtgagctatggttaatttactactgaagaaagaaaaaatgtttatgaaattagtttagcctaagtgtagtatttataaagtctacgatagtgtacagtcatgtcataggtaatattgtaggccttcacattcacttgccactcgactcactgactcattcagagcaactttcaatcctgtaagctcctttcatagtaagtgctctgtgcaaatgttccattttttatcttttgtactatatctttaccttttctatgtttggatatatttagatacacaaatggtaacacattatgttaccattacctacagtattcagtacacatgctgtagaggcctgtagcctaggaatgaataggctatatcatacagcttagatgtacaatcggctataccatctaggtttgtacagacacactctaccaggttcacacaacaaaattgcctaatgatgcatttgtcagaacatatccctgttaagtggtgcatggctgtagaatcaaaaagaaccattaaatatcaatgtttaaaacactgatggcatcaaaatataacctcactacactgaaataaatgtgtacagtggactccagttttccaatatatttttgtatattatcctcattaatgccacacaacaaagcagagcaaatatagaacctgaatctcagagaagttaaatgacatgtccaagatcaacaatggtagaaccaaatataaacccagggctgtcactccatggcccatactcttacctattatattagctttagatttcctgaaataatatcactcaataatatcactgacaaatggcatgtatagtcccattcacattaggatatgcatacatgaacagtcatacatgtagaagtcaaagcaaaatcaaaaatttaatatcaaagatttcaatttttttcttagttgtattttccaaaatttctacaatggctatgtgttcctttattacatagtttttataatggggtgggaggtagttttccataaagttacccataaatagcagcatacacaggcagcagggatatagtatctgacagtattttatactactagacaaatactgttagagtatttatacgaactggaaagatgctgcttttaatattattactctatagtaccacgaattacaatgaattcaagttacctgtgatccaatttcgacacaaccctgtcccacagctttagcaaatttctctttaaagatgtatcctatatccttcactcttttcagtatactttcttttggattcactgtgcagttctttaggaggtaaaaacagaaatcaatgtcgaggatactgtgtaatcagaattaatattttctgctccataatatatgactttttaaattgttcataaaaatgtggaaacacttccataataactaggtaaccacaactactgaacataagcagacaatatcatttcactggatgttaatgagcaaaaaatactacagtacaactaaaaaaccctattatctaaattttctgccactaggctagagaagagcaaatttgttaagctttccatccatcagaaagagcctcatacattctcataaaataccttcaattaagagttatattgggatgtatgttgcttccgaaaaagcaaatgaaataaaaccaaggcttgagcttggtatcatttactaatttttttttttttttttttttgagatgaagtgtcactctgtcgcccaggctggagtgcagtggcgcaatctcggcttactgcaacctccgcctcccaagttcaagtgattctcctgcctcagcatcccaagtagctgggattataggcaagcgcaccacgcctcactaatttttgtctctttagtagagatggggttttgccatgttgaccagcctggtctcgaactcctgatttcaggtgatccaaccaccttggcctcccaaagtgctgggattacaggtgtgagccaccatgcccggaccatttcctaattttaaaacgtgctttgaaagagttatgaattagctaaatcatttgattacattttcagaaatacaagatagggaaattgttgcaaaagaagttccaatacatgtatcatttggagtggggctattcaactttaataattaaaacacatcacaagatgatgtattaaaatgcatattatataatattatataattcatattatgatatataaaaagtaatcacagcatgattctcatcagctacaaagatttattctattttttatcctttatacataaaacacattcaatatatacattcaaaaataaagtttctaaaattaagattatggccaggcacagtggctcatgactgtaatcccggcactttggaaaactgaagtgagcagatcacctgaggtctggagtttgagaccagcctgggaaacattgtgaaacaccatctccacaaaaattacaataattagctggacatggtagcaggcttctgcaatcccagctacttgggaggctgagtcacaagaatcgcttgaacccaggagatggaggttgtagtgagccaattatcatgccatttcactccagcctaggcaacagagtgaaactctgtctcaaaaatatatatatatataaataaaaataagattataattttcattgtaatgtgcattgtctggcgacattttcacattctagaatatcagcaattctatattcctaaaaaaaaaaaacagcacacaaacttagaaacatataacaaacaagcatttcctgtcataaaagaattgttgccaaaatgtccattaaaatgttcatagcttctaagattttacatggagggaaggtggcattaattttaaaaatgaagaaatttgaactaataaggaagtaaaatgaaggaaaaacataatgaccttcaagacatgttcactttgacatatgcaacttatcatctacataattaagcttttaagcttcattaaaagttaagctttaaattgagctctagaaaatgtctttcacatgcactcatatgttcactggtatgctattcacaatagcaaagacatggaatcaacctaggtgcccttcagtggtggattggataaagaaaatgtggtacttatacactatggagtactatacagtcataaaaaaagaatgaaattatgccctttgcagccacatggatgtagctggaggtcattatcctaaacaaattaatacagaaaaagaaaaccaaatactgcatgttctcactaatgagtgggagctaaatatcaggtactcatggacataaagatggcagcaatagacactggagactactagagggaggagggaaggaagagagcgagggttgaaaaactgtataaaaacataaaaaaagatcatatagtttccaagtttaaaaaaaagtctttgaggcagaattttttaaataaaaaagaactcctacatactccaaatattggaggaagtattcaaaatgatatgagaagaaagggcttatcattcttttaaattctttcattagcccttgctaaaaggtttaggtaattggggtacatatgttttggcatatattcttgtgctatagataactcataaacaaaagcgactttatgcatattggacaaacaaaatcaattctgagccaaaacaattacgaacatgatgacagaaattactttgctaattcctgggggaacatagcaagagatgacaacagattatgacaaaatcacaggcaggttatggcaatgaatgaattgttaacaagtacaaaaagcacagttgctgaaataagccaaattttaataagtctcctgaccctatgtccaattttagtggatgagcatttcagtgggtcccaatcctcatctgagtttaagtaaggagtgaaggagcaagcaagcaatatagatgatagtttcattctctctctttctttctccttgtctttaggggagagagggtatcagatgccttcagatattaaacttattgtctatcaggagttgcaaactataatgctaacagggccaggtaagaattgtaaataaaaatgggttaaatattggatgaaaaagattgtaggggtatggggaatgttaagtcctatctaatactacattcaaagaaaagatcttaaaagtagccagagagaaaaagacagattaactacaaaggaacaacagttagattgagtggcataagacttcttaattagcaaaaatgggatccaggtaatgtattatcttcaaacttataagagtctaaaaagtaaatgtcaacctggaattgaagatcgagcaaagctatctcacaaaaaaataagggtaaagaaaatttcagatcaaaaaacaaaataaaacctcaaaaagttcatcccaaattaataccactaaagtaattatcaaaggatatatctgaagaagaaaaaaattatctcagaagtgaggcataagttgcaaggaagaatggtgagcaaggcaaataggtaaacataaaaatgttttaaataacactgtataaataaaacaatactactaataatatataatttgtaagattaaaaaagcaagaaaagattatggataactacatgttagataggagattagtattttaaaaagaactcagtactttaacttttaatttcaagtttctttgccaagatattacaataaataatgtttcatatatggcttacgttaaaataggaaatcagattttctgaaggttgatcacttgctgaatttaaaatcatcattaattgttggatagtgttcataacagtcctagaggggataaaaataggaaaatgtgttaagcaatgaagggagaaaaaaagaaaaaatgaaatgttttccatctcccaagttaaatgtatcttcaaatacactgcctcccacttgtctctacattccctcaaataagactgtggtttataagaaattacattttacttaaatctttaagaaaatatgtattcacaatcaataagtttatagttatagaacagatatacttatttactaataaaactacatatcaataaaatagtggcattatttttaggagaaactatataaactggcaacaaaatggtattgttttaagaaaacattattacaaccaaatattaaacattttcaaattaaagacaataagatacttagcaactcaagtaaagaatcagatgatttttctttacagagaccttcaagaagaaaggatactaagatcctggatacatttaaaaatcaccactttcacagcataaaattaggtcaatctcttaagatcttgttaattctataattttatgtgtgtgtattatgaagggggcagtatatggtaaatatcaatgttacaattttggagtagctgaacatttgggacactttaattatgcaaagaactgtagaatgtttagggctgaaaagatcctcaactattatttagtaaaatatgctcagtgttctcagctaagcatgtctaaaccagtatttacacttcctcatctttcttttctttttcttttttttttttgagaaggagccttgctctgtcgcccaggctggagtgcagtggcgcaatcttggctcactgcaacctccacttcccgggttcaagtgattctcctgcctcagcctcctgattatctgggattacaggtgcccagctgggctaatttttgtatttttagtagagacggggttttgccatgttgcccaggctggtttcgaactcctgtcctcaggtgatccgcccaccttggcctcccaaagtgggattacaggcgtgagccaccacacccagcctcgtctttcaaatatattgcaacacagcttctatatgcttctgtgtccactaatcatatttaagctacagtgattaaagccacaaatgaccaactgataaaaacaaaagacttttctcatttgttctaatacttgaccttccttgaagcatttgacactgttagagaaatacttgctcttaatgaaactccctccctccctcagctttcttcgcttcaatctctgcactccccaatcatactttcccattctctagaacagcagtccccaacctttttggcaacagggactggtttcatggaagacaatttttccatggaccatggagagtagggggaatggttttgaactgttctacctcaaatcatcagccattaaattctcataaggagcatacaatctagatccctcacatgcgcagttcacaataaggttcatgcacctatgagaatctaattccactgctgatctgacaggaggtagatctcaggcagtaatgctcacttgcctgtctaccactcacctcctgctgtatcacccagttcgtaatgggacacagaccagtctctggcccgggaattggggacccctgctctagaacctaacaatttctgtctagtccttaatgctagcatcctttaggcttcagcccttagccacccactcttgccattatgcaccctcccttcaagcaatctcatttttttttatgggtttaactcccctgatgattcccaaatctatagaaggctatcctactgcttactagatatcttcttcagaaatgcctcaagaacaacattctaagtatgaattcatcaaatatttatcaaatctgttattgttccttcattcccaccactatcgttggttcagatctttaaaaactctcaagtaaactgctacaacagacaagcccagagatttttatacactatgtctgtggtagtaaggcctaggcatattcctcagtggaatgggacacaaaatttttaaaaagaaaaaacaaaacaaaattcctcaggttattctaatttgcacacatggttaagaaccactgagacagactgacaggtctatttctcactttttcttattctcctcagtctatccccccactgactattaccatgtgaacttgcaaaaattatgtctgattttatccttacccctgcttaacatccatttatagcacaggctatatcatgcacatgctacactccaaatttgtgagtatggcatataaggcccttcatatctagtacccactctcctctcctgtgacttcctactctcattttatagtcaatcaatacagagctgctaatagttccccagacacattgtgttgtgtgatattgtgaaatagatgtttggtctttgaccccatatcctgacatacaactcgtaaaatacttagaaactccagtgatgtccttttgtgtgctaatgaattgacatggctggcagcccctaggaagcatctggatgggggctggtcactagaaagcccgaggcagagttagagggttggaaccttcagccccagcccccaacctctaggaaggggagggaagctgaaggttaggttgataatcaatagccaatgatctaatctgtcatgcctatgcaatgaggcctccataaaaacccaaaagggcagggttcagagaacttccggatagctgaacatgtggaggctcctggacagctgtctggccagggagggcatagaagcttcccatcccatcccccatacctcatcctatgcatctttacatctgcatcctttgtaatatcatctataataaaccagtaaacagaagtgtttccttgagttttgtgaactactctagcaaattaatcgaacctaagaggtgtcatgggaaccccaacttgaagccctttggtcagaagatccaaaaacccagacttgcaactggcatctgaagttggggccagttttggggactgagccctcaacctgtgggatctgacactatctccaggtaagcagtgtcagaagtaaattagaggacacccagctggtgactgctgcagaactgattgcttgtttcttggtgaggaaaactttcccacatttggtcacaaaagtcttctgtgttgattgttgtcggtggtgtgacagcagggttttctccacttacatgtttcacaattccagccctttgaacatgctgttcccactccctaaaatctttatcctgtgacacaggcctttgcatgtttcaaaattcagttcagacattgctttatagtcccttctgtgtcatctcattatcttgtccaaagtatatactatacttatatgaaaatgtatccatttacatatctatacagtcatttgaaatatattactgattgcctactatgtaccaagttttataacaggccctaattattagacagtgaacaaaaaggttatggtctctgtgatatggaattttaaggctattttgggtattagtaaaagcaagcaaacacaaatgaatctatcaatataaattgggatacatgctataaaggaatggaacaggatgatatgagaaataataaaatacttcagagagaaatatcttttcaaaagcaatatttgtgctgaatgaagagtagcagttggtaatccatggaaagaaaaggaggaaatttcaagaagagggaatatcaagtacgagggttttcaaaaaacttggaaagcccaagaaacagagaaggccaaagtgtggctaacacagagtgagaaagaaaacaagatgaggttggagaggcaacagaaaccagaccatataagatcttttaggcattgttaaggaatttgcactgtataccaattgcaatgggaagcagtcagtgggtttaacagcaaggtgaatgtaactgatttacatttctaggagaaattctgggggctctatggagaatatctttgatggtgaggagacaggaacaatgatgagaccagaaggagcaagatcaggtagtaggctactgcaaaaaatccaagagaaagagaacaatgtcttggacaagagttgtgagagcagaaatggagaaaagtagatgcactcaggaaatattttggaggtagattattcaacaagccttgataacagattttgatgtgggaaatgagtgaggaaaaagacataaaaaatagttctaatcctttaaggttgcatgcagatcaaatagtgatactttaattttttcttttttatttactgaaatggaacacattcctattttaggttatgttctttaagaacagacaaaactaggtccaataaccatatcttcagcaaccagtaaaatgcccagcacacaaagattatatatacacattttttttttgagacggagtttcgctcttgtcacccaggctgaagtgcaatggcacgatctcagctctctgcaacctccgcctcccgggttcaagcaattctcctgcctcagcctcccgagcagctgggattacaggcacacaccaccacccccagctaatttttgtatttctagtagagacggggtttcaccatgttggccaggccggtctcaaactcctaacctcaggtgatctgcccgccttggcctcccaaagtgctgggattacaggtgtgatccaccacacctggccttcaatatatatttcttacatgtatgtatgaatacataaagaaacgtgaacaaatctgaaacactataaagccatgaataacaaaattataatataattaaaagtaggaaaattcatacctaactggagtgtgtggaggaattacattcacctcttcatcaaggttactttttcgtggtgttctctgtgtttcaaaactaaataacaataagtgaagtcattcacatactgaaaatttacaatttgtgctttatgcatcaaaaaagcagtataatgcttctgttgtctcataaaatcatataaaatgataactcaataatagataggatagaaaatagatgacccagctgctgcttaaataaaatatttttcactactctttttaattgtgggtctctttccattatgtttatgacaaagaggtataccaatcattaagtctttttttaaaagtgaaagtcagatgctttctccctggtggtattgataaccaagttgttcagtattaaaaagcattaaaactcaagtttttcaatgcattattccttctaaaaactttatttccacttaaataaaatttaaaacattttactgtgtttaacttctaaattacgcatattttcagtttcatattaaaagagttcatgctaaagacacaaaattaactttacttatgatcagtcaaaaattttaacaatcactctcaaccattccaattttaggtttctacatgataataacagagactacacttttgtataaacttttttaaataaaccaggcaggcaatagtatatgaaaggatagaaataaggtagagaccactatttgaagaaactaattactttagccattatcttttggtgcacattttaaaaaattatattcagttaactgcaaaaaggtaactgttataggacacacaattcacattaaatctatatttgtagataagttatatgcttaaaatactgttaaacttttctttgtataaagacatttgaaagtaatttgttataaatgatatctaaaggtcactaagctaaagactatataatctacctatatcagtatcaacctatatctaaagcaaatcaatcaaatataccatgtgcaatacctgtctatagaatcagtctgaagagttttatcatgatccaaaaataatcttgcatctagatctttatttttaagataaatttcttcgtatcgtttagaaagattttcaaccttgaaagaaaaaagtcactgacaattatcctttacatgtcattacatctctcagcacacagaggcacagatttcattaaagaatttttgtataatatacatttaattttgtaatatacactgagttcgcatgcaatataaataaggtctatctaaaagtgaggtacagaaaattgcaacatttgttcaactttgattttaggtctatttcgtgcatagaaaatatttattagaattttatgtagacaaagatagccaatgctacaaaacagtacctaagataaaaataggtattataataactgtttaactgccaagattttccaaacatcccatatatgctttacttttaatcttttttttttttttttttttgagatggagtttcgctctttcgcccaggctggagtgcagtggcacaatctcggctcactgccacctctgcccccggggttcaagcaactttcctgcctcagcctcccgagtagctgggattataggtacctgctaccatgcccggctaatttttgtatttttagtagagacggggtttcgccatgttggccaagctggtcttgaactcctgacctcaggtgatccacctgcctcggcctcccaaagtactagaattacaggcgtgagccaccgcgcccagcctgcttttaatcttttatgcttatcaatataaaatattttttcaaacattgttgcaaatcctcttgattacatattctaccaatgttttctaaaccctttggttcactccagtacccttcagttaagtatcttgggcaagacaattagctcaatttatcagttcaattaacacacttgcacaatttattcccaatcttagatactttttcaattgctagaatttgtaaatctttcatcagttctgatccataattttttaattatactttaaaaaccaatgcccaagagaaaactattggcatgccttctactgtgacttttaacgccaaagtgattccaacctcagagaagtaaaattgcattttaaaaggagtgataggaagaaatccaattaaatgcaaacttttcattaatcttcataaatgtattagatagaacagtaatccatgcttatgtttaatcattgttcctgtcctaccttagttgaggcactaattaccagtcatctattgattggctatattatgtgaaatattggagaaaaagtaaaattactcttaagatttatattaaaactataatccttttaaaggagaaaaaaagattgctacaacagattttaaagttatgaacagcctagtttttggtaccaaaagtggtaacaagactcattaatataacatttggtcccttcttgcctcttcagtaccatattttaattgttctgccctgtatcccaaccttaatgaattacttagagttcactgatcagaccatactatcatacatcactgcacctttgaatctacaatgtccaacccttggaaatgctatatctgtaatgcttactcagatttgaaatcacatcacctctaaactattttccacaaaacctatcagccctagtttggattaggtagctctcctttgagatatcacagaaccctgtgaatacttttttcacactcttgtagactcctgtaatgctctatttctttgtcagcctctcccactagcactttaaggatagtgactgagagtgaaatctctgtatccatagtatctagcacgtgcctgacatatattaagcattcaaaaaatatttgttgaattaataaattaattcaaaaactagctatcaattcaggttacagaactagcagtctagctattttatttcatgccttttggtcatagtgactaatactatgtcttctaaaacactggttttgttcttcatcatctatcacagcatccttttctccacatatttcgtcttaccatgcaaagctctcagttattctgttctcattggaaagacatttgtagcaaaatgcgaaacaaaacaggtagatggatggaatatcactaaggtaaaacacttctgcaatagtcacagtcatttcaacaaatacatttgtattttcaattaagcagttcttaaaaatcctcaaaagagatgttccacaatgtagtaatgccaataatgttgatggcattaatcatggttcctacgcttaatgaggcttaccaaagcaaatttaatggtttatatttagctattaaaatttagctatttaatggtatttagaagtttaaaagtctatactttgattttggaaaaaattcaataaagattgatttctagtataaatcacaaaatgatgctaatacatttgattatatactcaaaagctttttgttactatacaaaagttagtttcaccacaattctacttggctagattcttcttgggcaaaaaaaaaatgtgatacacagtaaattgatctaagaaagttagacaattatcctccctccacagtctcaaaacattaatattttattaaatttcctttcagattacctctggaagtccattagatgttacaagtccaagagaattcataaaaggtataaaatttttgaaataaacatttttcacctgaaaaagatgaagttacaacatgatcattaaaatttaaaacaaaatctaatctcttgactcttgaacaatgcagggtaagttagaggtgtcaatcccccatgcagtaaaaaatctgtgtataacttttttattttttattattttcttagagaaggggtctctctatattgcctaggctgaagtgtagtggctattcacaggtgcaatcacatgcattacagcttcaaatgcttgggctcaagccatccttccacctcagcctcccaagtagctgagactacagacctatcgattacttttgagtacccaaaatttaactaacagcctactgttgactggaagccaaccaataacataaagattgaattcacatatattttgtatatgtactatatatacatactaaatatatcatcttcttatgataaagatagagaaaagaaaatattaggaaaattgtaagaagacaaaatacatttacagtaagtttatgtcatctgttaacaaaaatcgtccgcctgaaacagcaggcatctgcagctacagttttgtatgtattttatggtatagtaaatgataaaatagactagtatctacatatattttgtacattcaagacatgcctttttcttaattttttctgtatttgtaggctacacggtttgctacaaattttttcaaattattgcaaatctccaaaattttttctaatatatgtaattaaatatatctgtgtataaacggacccatgcaattcaaacctgttgttcaagagtcaactgtatatttgttgaaattagtaagccatagtgcaaaaactatgatatatcttgataaatcattctaatacttcttaaactagattttaggaccacactctcactccttcccaaagttaacagagaaatttcaaagatgtaacattttttactgctatctggtgttagtgattgtggacaataaaacaaactatgagaaaaactgtatggtaaaaaggaaagaagcaatagtaccagatatcccaaagtctaatgtagacgctgtaaataataagctatcagtccctggaagcttgtttactcattataaaaaggagattgaatacattatttgtaagattccttctaacatccacattctatgaacaagacaagtaattcctgggaattcatatgtattctccagcagtcattatgtgctgtaatatttagaaagagagtaattatagaaggccaaacagaaatttaatgttggtatcacttatcactaaactaaaacactagagcactagagttttctaagcagggcttttttggtttgtttgttcgtttttggagacatagtctcactctggcgcccgggctggagtgcagtggtgcaatcatgtctcactgtaacctcaaacttctgggctcaagcaatccttttgcctcagtcttccaagtagctgggactacaggcacatgccaccatgcccagttcatttttttaaatatgtattttgtagagacagagtctcgctatgttgttcaggctggtctagacctcctggcctcaagaaatcctcccacttcggcctcccaaagagctgggattacaggtgtgagccaccatgcccagccttggcagggtattttaaaacattaggggtatcagtaacctcagaggaataaaaaaaaaaaaaaactacatttgaaaactattgtcttgattatatacttttcagtgattccagagtgagggagctactctctttaaaatcaaagtaactaaatataacgaattaattttttctaaatattttgctactgcaaaagagttagcactaattacaaaaaaaacatgctcataacaaaagaagtaaatattgttagggagaacttacatctaaatctactttaactgttttaaagaaatcatgaagttaaattacctcatctatattacattcatgttctttacagagaacttcaataattcttgtatcattttctagttgttttgctatccgtgcactcctgttctgacctcgcctgggtgttcgaggtgaaccattaatgggtataacagctgtttctgtaaaagtggtaaattagataagaacaattgtacatccatcatataaaataatgaagtattctaactataacttaggtcaaaaataatcttggtaacattctactacttttacttattaggtttcattagaaggataacaatttcatccatatctactacaaattatgtactaatattagtttttgccatccctcttctactctgctcccaaaaagaactgtaaactacagtctcataaacaaatacaaagagaaggcatggaaatagccaactttcaaactaaatctaagcgtattttagtctgcaagaggaaaaaaaagttttctgtcctagagtcttaaaaataattagcaaatatttctgaattcaatttctagacatagcataaaaacaatattttaagttttagtaaattatgatgtctttaaaagataggtataaaatatattatagtaaatataataatatgataataaactgtgatttaaaaaaaaaatctcctggattattttcagcattcccaatccaaactaaatacaggttcagctattaaaaatattacagatggctgggtgtggtggctcacgcctgtaatcctagcactttgggaggccaaggcaggtggatcatgaggtcaggagttcaagaccagcctggccaacacggtgaaaccccgtctctactaaaaatacaaaaattagccaggtgtggtggtgcatgcccatagtcccagctactcgggaggctgaagcaggagaattgcttgaacccgggaggcagagtttgcagtgagctgagatcgcgccactgaactccaggcctgggcgacagagtgagtgagactctgcctcaaaaaaaaaaaaaaaaaattacagatgattaagtataaaaagtatgtattgcctctagatccaatcaacaacttacaagaaattgagaggacagaagaacatgttaaactataccacagaatatgatcagcaaaaaccacactgtggaaaactcaagacaatctgattatttaaaaaataaattacaaggaaaaaaagaaaggatggaagagaaacttttaaaagagtttttaaaacatgtcaaccaaacacaaagtataaatcttatttagattctcattcaaactgtaaaaaaattttttaattatttttacaagaaaatctgagcactttctagatattcagtaatattaaggagtcactatttattgatttgtaggtgtgataacaaagagcactgtaattatgctttttaaaaagtattttttagagatatatactgagatgtataaggatgaaatggtatgcaaagatgtgcttcaaaataatacagctgggggaactgagcaggcaatggggctacagattaactgtaaattatctgttgaagttacatgataagtacatggaggcttattatactactatttttgtattcatttgaaattctctacaacaaaaattaactaagagttaccatattcagtcagttcaataataccccatgctgattgctctttaacagagcacttagagaattcacatgtacatttgaattatccaaaagaacaaagattgtcaacctaaagtaacttgcaacatcaacttattaaagttataacattgaaaaaagtggggaaagggtatataaaggaaatttataaaatttgggagaaaatttgaagtatatttgttttctatatagaattttttttatttctttctttgcatgtggtttctgctaaatgaaggtttctgccttctctgccaaaccatgttcaacacatcttcaaaattctgctccatacttaatttttccactaaattcttgttcacaaagtttaatgagccttcatccttccatccatttcaacaacactttgaaacttccatgttatctattatttttagcattaatactttcatcatttcagaagcaaggaattagtctgaccttaagtaagtttacatttttctgtatataataatataataagtgactttgaaatcctactcttgaagccatgaaaggaagcaattctaggctaaaaggaatataccttactcatacttccttaatgctatctaattatattagcaagttatttttatttaaatatacttcccatctcatcactcatcacccactgaaatagtatgagttatagcttatatacaaaaaaatacatagttattacaacatccaatagtaataaaaacttagttaagctgttcccttagaataggccactcttccccatgcaatttcattcatatctttttcttgtttcttgcttttcttcactgggaatgccctcccccaacactttactgagaatgcctttccccaatcctaaccactcttccatgttaatttcaaatactacttcttttatatggtattctttggtcttccacagctggaaaaactttcttgtctcccaaacctccatttgttgtattttgacccaaaccactttctaccatatactctaatcatttgtttccatgtcttatctttccttctataacttacactacttatgggcaaagtccatgtctgatttattttttatcatcctgtcagccttagaaccatgtttggtacccactagacattcaataagcaactgctgaatgagaaagtaaaaggggcataaattaaatacttactatatggttctttgagcaacatgggaggtgagagtttaataaaatagtcaaggacacatagcattaactgaaatgaaatcaccagatcatcttccatttgtaatacttcccctgaaaaaaaaatgtacatttttaaagaaagttagagattcagatctttgtatgagagaaaatcgcagggtagagtatatccataaatttattcattcaacaatcactatcagcatggtaaagattttctttcttttttttgtaaaaaaaaaaaaaatctgttttaaaaggtataaaatatgtaaaatagaaatatgtaaagttatggaattataaatcaagtgttaagtctactctgagaattttacatttaagtatttctgttataattaattctttatgtctaaaatcactataaattttgctttttaaatttatttctaattttaagaactatagaatgtattactccagagaaagattttgaagtatgataaatgctaatctttaattctaattttataaatattttatttatatttgtataatattttattataataattagaattcaaatttttaattccacttttataagtatatttattatataaaattactaagtttattagaatttattctaattccaatgattcaattaattctcattatctaaaaatttaaaataattattttatttataaaattatgattttattccaattatttatatctaaaccttatatatttttaatttcaacccctctaaaatcttacaataaccaaaaccattaagagataacaaaattagtatataaatttaaagtcatctataaaataattgttcaccataaaatctttaaagttattagaatatatatacaactagatggctgtgagaaaataaatgcatataacagatacctaagaaaacaaatagtgtagctacataaaatatacaaatcatgataaaacacagctattacaaatttgcttatggctccatgtcatacattatttttaaaagagaagttcaatttgattcactttctattttctgagtatctgactgctaaaccagtaataatctcagcaaacactggatgtgcagaaactttgtgagaaaacagataacgttgcatctttataggttttctagatacaatggtatggtgcaaaaaatatgtctgcaatatattcacaaataagttattttaaaataccatagtggtaaagaacgatatcaaggatttctaggtaaaaacggtgaagtcagatgaaagaatctctctcaagtacattcttttgctttcattttattaggtattaaagtgctggtaccaatatcaaatgagagactgactgagcgagactaactcaaacggtatcctcatcttttgcctctctgacttggagggagaaactgctgataagagaagagtaaaatggaggaagtaaacaactatagcttatttttctgacaacacagagactctgcatactgtgttgaactggggacaatttgaatcccaaaacaatcctgctatagaaaaaagataaaactgccactagaagtgttctgttataaagttcattctaacaaaaactcagaacaacggcttgtatcattacagttgaattatctactttctcccttacctcctgactaaaagcagatataataaaaatgcctgctcccataccatagctctttggggaacataaacaagtcacagattaagtgcagagtgaagggatattcactcacattaaatcagagaaaacagaacatcaaatcagggttacacatatacagtcccagcaatacgagggggaaaagcacagtgattatgtaaacatagaaaatcaaaaaagaatcacaacataagaaggggaaaaaaatcagacagagaacccaatctgaaagataatctaaaagaagaaaatgccctatgagtgcttgcactaagaacttaaccagctgaggctgatttgagtgataactccagttctcccacatgggtcagcctagtggtcaattaaactatctctactgcaatgccacaatcttggtggattgattttgtctgtgcagccagcaggaagaacccattgggggattacactttccctttacattccttatcgcaaatgtagttaagtatttctgtgattgttcatttaatgtctatctcccttacttgactgtaagttctagctgagcagggaacatatacatcttccaccactttaacctagcacgtaatatcatgcttgagacattgtaaattctaataaataactaactgttgaatcaataaataaatggtaatattgaagcttctcctgatcatcatcttaccctctctgatgcacaaccatgacctttagtcacctgtaatgtactatatgaaatgtaaacgtgcctctgagataagagggtagcatcaccatcaccacctcatagcttttacttggcagccatcacatcactaagtgtacccctccctgtagagacctgatgctaatctagagtccttcttaacacaatgggccgggaagccactagcaattgatctgggttagcaggagggttaaaatccatttgctattctcaatatatttgtttagtgatccaaatacatattattgaataattcgtctattataaatccaattcaataaaaatgtatcataaaaaggaaattaatgaacaaattatataaaaggaaggaactagacaagctaagaaaaaagatgaggaccaaataacaccattacaaaaatagtttagctcaaaatggaaaaaatgcttgagataaaaacagccaatatgtaagaaaaagatttaaaaattcagaataatatgagagaagacaataaatagggagaataaaagcaatccaacataagaaaatgttcccaaaatacaatggtatagaacaacctagctgaatagaatatttttaaatagagtatgttaagattttctaaaatgaacagcagaaccttcagtttaaaaagggatacggtgttcaaaaaaaaaaagctaatacagaataacaaaatcaagaaatgttatcctgtttaaggtattaaacctcaaattaaaaaaaaaattcttcaggaagtaaatgaggagcggaattacgctagtctcagctttctcaacagcaatgttcaatgccagaaaatattgtcctgagggaaacaaaatatgactcaagaatagaatacatgacaaagctgtccttcaagtataaaagctatagacatgattcctaaacatgtcaaacataaagaacatggaaccaaaaagcatatttttaaaaacttgttgattgtaaaatacagccagctaagagatgaataaaaataaagaactgagaaatggagaaactatgatataggagttatgataaccttagaatccatttaaatacagaactgagactaaccaaatgcaataattatagtgacaaaatagaatttaaatgttataatacttgataatgtcataacaataaaatggactaatctgaaaatggagagggggaggcaccaggaagagtgaagatagtaaccttcttcaaaccagattaaagtatattgctttaaataaaaacacaaacttaaataaagattgtaacctcttaattttttcacattttttcataatcttagagaaataattttagaaataatatcacttaaagtgacaaaatacttatctaaatttaagcaattccttccatttctctcttctataaaatttcagtgaaattaatttttatattttaaaggtagcactgtaatatgaacctagttttagaaaattatattcgtgaatgcactcaactacccatctttttaatcaaaatgtatatatgaagatatctggaatgacaattacataattttttaaattttaatttttgtgggtacatagtacatatatttacggggtatgtgagatgttttgatacaggcatgcactgtgaaataagcacattatgcagaatggggtatccatctcctcaagcatttatcctttgagttacaaacaatccaattacactctttaagttattttaaaatgtacaattaaggtattattgactaaagtcaccctgttgtgctataaagtcttattcattttttctatgtttgtggacccattaaccatcctcacctctcccaaacctccaccacccttcccagcctctggtaaccatccttctactctctaggtccatgagttcagatttgatttttagatctcacaaataaatgagagtatgtgatgtttgtctttctgtacctggcttatttcatttaacataatgatctccaggtccatctatgttgtcgcaaatgactagaccttgttcttttttatggctgaatagtactccattgtgtatatgtaccatattttctttatccattcatctgttgatggacacttaggttgctttcaaatcttagctattgtaaacagtgctgcaacaaacataggagtgcagatacctctttgatatactgacttcctttcgttgggtatatacctggcagtgggattgttggataatatggtagctcaatttttaatttttttgagaaacctccaaactgttctccatagtagttgtactaatttacattcccaccaacagtgtacgggggttctcttttctccacatcctagccagcatttgttattgcctgtcttttgaatatcagccattttaactgcagtgagataaatacctcattgtagttttgatttgcatttctctgatgatcactgatgttgagcaccttttcatatgcctgtttgtcatttgtatgtcttcttttgagaaatgtgtattcaactcttttgccaattttttggtcagattattagattttttcccatagagttgtttgggttccttatatattctggttattaattgcttgtcagaggggtagtttgcaaatattttttccattctgtgggttgtctcttcacttcattcattgtatcctttgctgtgtagaagctttttaacttgatatgatctcgtttatccatttttgctttggttgactgtgtttgtgaggtattgctcaagaaatttttgcccagactgatgtcctggagattttccccaatgttttcttatagcagtttcatagtttaaggtcttagatttaagtccttaatcattttgatttgatttttgtatatggtgacagataggggtctagtttcattcttctgcatatggatatccagttttcccagcaccatttattgaagagactgtcttttccccagcatatgttcttggccactgtcaaaaatgagttcactgtaggcatgtggatttgtttctgggctctctgttctgttccactggtctatgtatctgcttttatgccagtaccatgctgttttggttactatagctctgtagtataatttgaagtcaagcaacgtcgtctttctgcttaggatagttttcgctattctgggtcttttgtagttccatataaatttgaggactgttttttctatttctgtgaagaatgtcattggtattttgataggaattgcattgaatctatagattgctttgggtagtatggacattttaacaatattaattcttccaatccatgaacaacataaaatttttttccatttttttggtgtgctcttcaatttctttcatcagtattctatggttttcatcatagagatctttcacttctgtggttaattcctaggcattttattttatgtgtggctattgtaaacaggactactttttaaatttctttttcacattattcactgttggcatacagaaacattactgatttttgtatgttgattttctatccttcaactttactgaacatgtttattagttctaatagttttcttgtggagtctttaggttcttccaaatataagattgtatcagctgcaaacaaggataacttgacttctttctttccaatctggattccctttatatcttttgtctgactactctatctaggacttccagtactatgctgaataacagtgatgacaatggacatcctcatcatgttctagatcttagaggaaaggctttcaatttttccccattaagtattatactagctgtgggtctgttatatatggcttttattacgttaaggtatgttccttctatcctcaggttttttagggttttgggcatgaaggatgctgaattttatcaaatgctttttcagcatcaatttaaatgatcatatgatttttgtccttcattctgttgatatgacataccacattgatttgtttatgttgaaccatccttgcattgcagggataaatcccactgcgacataatgaatgatctatctaatgtattattgaattcagtttgctagtgttttgttgaagatttctgtatcaatattcctcagaaatactggcctatagttttctttttttaatgggtctttatctggttttggtatcagggtaatacaggccttgtagaatgagtttagaagtatttcttcctagtctattttccagaatactgtaagtaggattggtattagttcttctttaaatgtttggtacaattcagcagtgaagccatcaggtcccaggcttttctttactaggagactttattatggcttcaatctcattacttgttattggtctgttcaggttttggatttcttcctggttcaatcttggtaagttgtacatgtctaggaatttgcccatttcttctatattttccagtttattggcatatagttgcttatagaagccactaatgatacttttagtttctgcagtatcagctgtaatgtctcctttttcatttctgatcttatttgtatcttctctcttttttccttagttaatctagctaaaggcttgtcaattttgtttaactttttaaaaaaacactttgtttcattgatcttttgcaattttttcattgcaatttcatttatttctgctcgatctttcttttcttctactaattttgggtttgatttgctcttatttttgtacttctttaagatacaatgttagattgtttatttgagtttttcctctttttttcacctataactaacccacagccaacatcatactgaatgtgcagaagcttgaagcattccctttgaaaactggcacaagacaaggatgccctttttcaccactcctattcaacaaagtattggaagtcctaatcagaggaatcaggtgagagaaagaaatgaagggcatccaaataggaagagagggagtcaaactatctctgtggcagatgacatgatgctatatctagaaaaccctgtagtcttagagccaaaaagctccttcagctgatcaacaacttcagcaaagtttcaggatacaaaatcaatgtataaaaatcactagtagttctacacaccaacaagagccaagctgagagccaaatcagaaaggcaatcccattaaaaattgccacaaaaagaatacataggaatacaactaaccagggaggtgaaagctctctacaacaagaatttcaaaacactgctcaaagcaatcagagatgacacaaacacatggaaaaacatcccatgctcatggataggaagaataaatatcattaaaatggccatactgccccaaaaaaattacagattcaaggctattcctatcaaactaccaatgacattcttcacagaaataaaaaaaaaaaaactattttaaaattcaactggaaccaaaaaagagcctgaatagccaaggcaatcctaagcaaaaagaacaaagctggaggcatcacattatccaacttcagactatactacagggctacagtaaccaaaacagcatgttactggtacaaaaacaggcacatttttttcagaataatgtaaaccaatggaacagaatagagcacccagaaataaggttgcacacctaggaccagctgatctttttgacaaagctgacaaaagcaagcaatggggaaaagactcccatttcattaactggtgctaggataagtggctagccatatgcagaagattgaagctggacccattccttacaccatatacaaaaatcaactcaagatggattgaagatggccaggccaggtgtggtggctcattcctgtaatcccagcactttgggaggctgaggtgcatggatcacctgaggtagggagttcaagaccagcctggccaacatagtaaaaccccatctctagtaaaaatacaaaaattagccgggcatggtggtgcacacctgtagtcccagttactcaggaggctgaggcaagataatcacttaaacccgggaggcagaggttgcagtgagccgagattgtgccactgcactccagcctgggtgacagagtgagactctgtctcaaaaaaaaaaaatagatcctagacataggaacaggcaaagtcttcatgataaagacaccaaaagcaatcacaacaaaatcaaaaattgacaagtgggattgaattaaactcaagagcttctgcacagcaaaagaaacaatcaacagagtaaatgaacaacctacagaatggggaaaaattttgcaaactatgcatctgacaaaggtttaatatccagcatttataaggaatttagacaaatttgcaagagaaaaaaaaccaaccccactaaaaagtgggcaaggcacatgaacagacacttttcaaaagaagacatacatgcagccaataagcatatgaaaaaaaagctccatatcactgatcattagagaaatgcaaatcaaaaccacaatgagatatcatctcacaccagtcagaatagctgttactataaagtcaaaaaataacagatactggtgaggttgcaaaagaaaagagaacacttatacactcttggttgggagtgtaaattagttcaaacattgtagaaagcagtctgacaattccgcaaagagctaaaagcagaactacccttggacccagcaatcccattactgagtacatactcaaaggaatagaaatcattctaccataaagacaaaagcacgtgaatgttcactgcagcactatccacaaaagcaaagacatggcatcaacctaaatgctcatcaatgacagaatggataaagaaaatgtggtacatatataccatggaattctatgcagcccataaaaaagaatgagatcatgtccttcacaggaacatggatggagctggaggctattatccttagcaaactaatgcaggaataaaaaactaaatactgcatggcctcacttataagtgggagctaaatgatgaaaactgaagaacacaaagatggaaacaacaggcactggggtctacttgaaggtggaaagtgggaagagggagaggaacagaaaaaatagctattggatactgggcttaattcctgggtgatgaagtaagctgtacaacaaacccctgtgacacaagtttacctatgtaacaaaccatcacatgtacccctgaacctaaaagtttttttaaaaaaagatgttttcctcttttgggatgtaggcacttacagctataaacttccctctgtactgcttttactgtatcccataggttttggtttgttatgtttccattatttgtttcaaaaatttttttaatttccctcttaatttcttcattgacccatggccattcaggagcatattgtttaatttccatgtatctgtacagtttccaaaataccttgttattaatttctagttttattctattgtgatcagagaatatgcttgatattatttcatgcttttttaatgttttaagcctaacacatggtctatccttgagaatgatcaatatgcagacaagaagaatgtatattcttggatgaaatgttctgtaaatatctattagattcatatggtctatatagtgcagattaagtctgatgtttctttgttgattttctgtctggaagatctgtccaatgctgaaagtggggtgttgaagtctccagctatttctattgtattggggcctatgtctctctttagctctaataatatttgctttatatatctgggtgctccagtattagttgcataaatatttaacactgttatatcctcttgctgaattgacccctttatcattatataatgaccttctttgtccttacagttttgttcttgaaatctattttgtctgatataagtatagtgacccctgctcttattttggtttctgtgggcatggaatatatttttccatccctttattttcagtcggtatgtgtctttataggcaaagtgtgtttcttgtaggaaacagatcaaatgagtcttgtttttccatcattcaaccagtctgtgtcttttaattagagactttagtccatttatgttcaacgttattattggtaagtaaggacttactcatgtcattttgttatttgttttctggttgttttgtggtcttctcttccttctttctttcctttctgtcttcctttagtgaaagtagttttctctgatgatatgctttagtttcttgctttttatttttcatgtctacattgtatgttttttggtttgaggttactatgaggcttgcaaatactatcttataacccattatttcaactgataacaagttaacactgtttgcataaacaaacaaaaataataaaaattctataccttaactgcatcccaattatgtaattttaatgccgattatccctgggtggattttagataatttttctttgtgcttttgtgaccaaaattattttatttgaattatttatcatgagcaaatatcatttttatgaaaacagtaacatcattattcttcaaaaaaaagaaagggagggaagatggaatattagaaacaaaaattaaataaagcatttccaaggttgtttctagtaccagaattataggaacttgctaacagttaataagccaagcagagaatgagggaggagtacattactcaataaaaattggggaatttagtccaaaggaatgccaatttaattattacatttgaaatattagcatttaataaatataatgaacttacctttagctaataaaaatgtgatccaagaaacttttagcaccaatgcagaatttatttcagtagatatcctattaaacaaatagaaagcagaaaaaaaacaggaaaaatgtatcactgaaagaaagttttccagatatatcttttgggtgtttctttttgtgcattaaaaaaaaaatgaccttagttaaatgcataatagaatgcagtccattttaattgcataatttacacctgagtttatctctattcatttaatgtttctatgtcttataattctaagatatgatatttagcccacagaatagtatacattcttgaccatgagaagctgcaaaaaaaaaaattaagaaaaaaaagtatacattttgaaagaaaaattttgtaaaagaaatactgaatatttcaattctaatataaaaatatataaaaaacatagtatgttataacatactttgtttcaaattaccttaatattttttgctcttttttctgattaattatcaacactgtgagcagaaaaatgaaggtttggatgactttagtttgccaatttaacactttgccttgataatctttccagagacattcacttgttggaattaatagattgatatcaattaatcagtaaatatacaatttccctttatattaattatcttcaatactactccaatgaggcagaaaatctcatgtactactcattctgtttccaagaaaaaactctggagctctacatgggcatactgttagagcatgcattatacatttaaaataatcatttggaaattttaatacagatttttacatttattctcacacagaaattatgctgattattagttaataaagtgcctgtaacagaccctcaataaagatttagtcaatgaatttgcatttgttgcatttttctcagagttggtgatatgctgtcctgaatcaattccaccttattagttcttctttgtagtacaaggcatgtattttatactattttctttgtgagaagataaataatctacacaggacttaaatctatgggcttaatttatgaagtagcctgctataatcgatcaaactaaccctaactatcaagatgtttgagattattccataaaaatctttttttttaagtgaaaaataacattctgtgaactacttacgaactgctgggttgtgtcaaatatataagttcacatgtcctgaaaagaaaaacattatgactttttaacattttttcgtaatttagaagtcatagtagttttctcatgctttatttatcttcttttaagaagtatatattttaaaaacaaaaaatatatagcattataaaacaaagttcaagtagattttcccaatttatgacatctcacatcactttaatatataattacagttaatcctctcaattagtcttcaaaaaaaaggtataaataagatagaaaacacccagctgatccacctaaggttagtaaagtttactctttaaattatctcatatgatttgtcaataaaaattttaaatcccttttacaaagtcctgagtggtcttttgaggccaaatccaactgttactccctagtttaaaatcattcaaggagtttccactgcctgcagggcaaagcccaagattactaccaatctgatcccttcttacctttcagccattagcaatatcaaagtacatcctgatatcactgctttggctttgtacacatgctaatctctaagatgctcgctcccagttcccactcattttgcttggtgaatttctatttttcctgtaaaccctattcggacattgccttctatggttttttctctgaccaaaatcaccactatagttacccttcacccttaaacatatacaatgtaatgctttgtccactatgtaattcctgcttcttacaacagaaacaaatatccaagcagattccttatctcagacagcagagcaaacaacttggaagcatccagtcgaaattactatagcaggaaaaaaaatcagaactgtaccccaaatcactcctaccaatgagtccccaaattctatatctagaaaaaaaaaaaccctgatgattatagatcttaaagtacttatatgtatagaatactcattaaagttggcttaaagaagtttttgcttgctttgtttactagaaaggtaatacatcctccttacaaatgtaagttactcatataaaacttgggttaacattgtggtaaacttctctccagtcatttcattctatgcgttagtggtctaggtttcttccttacacacagtcataatcagagtatatcctgcttcatttgtttaacattagaagcacttgccaatattgccattattctttatcacattttattttatatttataacattttatgtttagatatgtttaatatgtattgtttaacttcagctgtgaatatcagttgtttccagtttttcaggggcctaaataatattgtaccaaaaaaactctaaagcaacattgtatttaggatcatattaaaataagctaccagatatgaattaaaaaggttgtaaacaagtttaaagaatagaaaaaaatttagaaagtcacaattaggtaaattttaaaagccacacacacacacacacacacacacacacacacacacacacacatatatataatattctactcaatgtgaaacaatacccaaaggaaagaaacattctaaaatatgaaaagtgattctctccactgttgacattttggtcgattcatattttatttatgcctttctgtgttttccaagtattctataattagttcatgtttgttatgcaaattatttagataatttatctccattaataattaaaaatttccctttttcttgtgcaaaaagcttctattctcatcaagaaaagaccaaaaaaaaaaaaaaaaaaagatggccaatgctaccatattacaattaaaaccaggggcaagaaaagacagtccttcaaaagccctaggcctttgagttttttctctaatttttctcatcctccaccacagttgtgaagttttagtggtcaaaaaagaaaaagggggagaaaatagagccatcctcctaaggagatgcttctttccacctctatctccatcctcattctctccagaatagggccatgcctcttttacccttctccctttaccatgctattacacaattgcttatttagctaacactgtaactttcatattctcttaaccgcaaatgaaatgagcctcaaaacaaacatgataacagacatatgccaaattaagggctgaaacatttggggtagggaagtacagttttgatgaaaagtatagaaaaaacttaacctaagcatattaattatgctcctactcgaactgtaatggaaaaagtcctctaagccaccattgggagtacaaatcattactttatagtataggtcacatacaccatccattgcaagtgttttctcgttccaaactaaataacactattaggaagaagtttaaatttatgtcaccattctattcagaactagaagttttctggcaaagaaggctaaaatgggagataagcttaaagtttttgaaaacaaatggaagacatgaaaggataataaaacggttaattttccaggaagcattcagaatgcatattactggataaataagaaagctaagaattaatgagctaacattaaaagggacaagtctaagaattaatacttactaactttactaaatgtgttaaataattcccagaatctaattgtgaacaatgacataaaaaatcagagtgtaaacctaataaaatgtttactttacctttccaatttgctgaagagtgcaaacaatacatcatacttcttcaacagtcttgacatagcattatcaactttggtactggtatcaatttcttttagtaagttaaagaatttatggacactacaaaggaaagaatagaaaaaagtaaatcagtaaccttaaaaatttgtgttatttcgttttcaaatcatagatatttcaattcaaaagattatcagctctacatcaaatcactactatatcctttggaaggaattactttttgcaaaaataattagccttcaacttacacctctattatctatatacctatgcttatatctattcatcattgagaatataagaaaacgaagggtcaagaagagatatgcgtatatttattctgtatctgtctatgtgttttaaaaaacatgagttcacatccattcatccaattccaatataaaaccatatgcttcattttagtgtttccctttctatatttgtaactcttcattgacagtgggaaacctggaacccattcatcctcagtttacttactcatttaatcaatccccctgtaagtaaccattttctatctccaaagccaccccctcccccgtgtggacacttttctgttcttctcagaactgactcccagttctggacttaccccaccccttagcatagacacttcctcactgtggaagggttctgactccccacagcaggctgccctcctcacctcacttgtgcaccggctgcctgcacaccctgcttagtctctgacactgcacacaaagcagccccatcaggttgcccccacacaaaggatgccctcctcaccctactttgactctaacatcctgctctgggccctgtggcaccctcctgtcagagatacacaccaaaatgcatactttatttgccccaccaatgattttagaattgaattatttttggaaaaggaaagttgatttaaataatttaagcagtttaaataataactttaaatcactcttcgttactcttttccataaaaattaacgtatttgaaacatcaatatatacattttccaataggatattaaagatagcaatcatcaactacatctcacatgctaatttctaatcatgaattttgtataaggaattataccaaagcagctaactgaaacaaaagatagtcacctgacccatccataggctgtccagcaaccaatgagttatagccctcactcaaaaaaatgggctggaccaatcaaacactggggaaataaaagcttcagctaatcagcaggggaaccaaaaggttattaaagttcctatgatacagaaaggaatgggggagccatgacaagctatgtgaaaaagcaaataaagaaagagtagaaatgacaaagaatagaagatcagaatgttgattagaagagaaaagagaaaggaacaaaagtgcagatatatccaaagaaaaagaaatcagcctcagaatagcatttattaaagaactactctcagttccagtttttttgaggtatatggcaatacctgtcctgagattaccatgaaaactgaattgttacaacaaagccttttttctaggggaaacttaagggaagaaaacaaggaagggagagaagcagtgagtgcctgtggtgttgcaggtattgactctatgaactatttatgtcatttctattattttgtatatttacaaatatacaaggcctttgtttccacattttatttagatatagcaaaaaaagtatttcaaaaatgcaacaatttaatctatctcgtttaaataaaatatcaattatgtttaattctagatgtctttgttcaaggagaaacataattacctatttggtaaaaatacatactgttgcatttttgtaaatatgttgcaaagaaaatgactggaagtcctggatactttctgaagataaagttcatacattattgaaaacacattaataaactcttcttatgaggcttataaactcaacaacaaacacctattaagtaattaactggttcaagtattgtagcatgttcaaatcaatatataatctgaaaaaaagcatttagttataatatcctctagttaaaacaatcttaggctttaataaatcttacctaaatacctttaagataaactcaaactacttatataaaggttttaatataaaacaagcctatttacaaatccttgcttttctgttcactttattaacagccacaattaagaaagcttacacatgaatagtgagagacacaatgaaaatttttccaggacacaaactgctacctcttaaagaaatacagcataaatacactttcataacggctccatgagagaatggcagttcactatttggtccaagttctttttgttttactttattttagcatttctcactaattcacaaaagtctattgagaggaaaatccagaattcgtttccttttatggcagaggcttatatttatacaagaaactttacctgatttctatgtttttctgtagctcagtaaaagtgaacgacatctcatctaggtcaactgctgcaataaagatacagattccccacagttcctttttcttttgaatataacctccctgggaacaaaaaataaagatcaaatatttcattaaataattcacacactggatactatgttaaaactgtattataactgattttttcttattcagcatacaaaataaatgtttgtaatactgtatatttgtaacacatccttctgatggcatatatttgaaaggatttcatttcacactaataacaaacattcaaattttatattataaggcaaaaaagtattagaaagataaaaaattaaataagttattgtggaaactttaggggtcagtcaattcctcaaaatagtttcatttttcaataatccaatgtcactgaagctaagttaagagatctagagtccataacatataatttgtttgaaaaaaacaagcccacgttcttattcgcttattctttccttgctctattcattcattccttttatcaatttatttattcaattatttttaaccttgtatttcatgtttcagttccttaactgtctttgtaaaatcaaaataagaatatgtaccccattttgtaacaattaaatgaaattatatttataaagcctttggcgtagtatatagtatacagtcagttcttaatgattgatggctatcattatcactagagtactttttcattatctttagaacacatttttccccacaatatataccacccctaaatattacattttatgggtaattttggattacattaagttggaaacaaaagaaatgtcaaattaatgttcattaaatagttggaactatttacttactcttaactggagattacaatagagctaaaaagcatgtaataccatcttacattattttgaaatatcaattatataaaagctttaggataagtgagttgttccagattaccaaattttacaggtaattaaaggtttaccaccatccaactctaaactttttcttaattttagctacttgggatgtaaatattttacaacttaaattacaattatacacccactagaatagctaaaatgtaaaagactgacaatatcaagggtcagtgaggatgtagtgcaatggaacacttaaacatcactggtgaaaatgtaaaatggcacaatcattttggaaaacaagtttggaagttcttataaagttaaatatgcacttttcataacacatagcaattctactcccagatattcatacccaagagaaatgaaaacattatatgtgaatgttcatagcagcttcagtcataatggccaaaaactacaaacaacccaaatataaaaaaaaaagaagtgcatggaaaaataaattggggtatatccctacaatggaatgttatttgaaaatcaaaaggaaatgtcctaatatatataacaatatagataaatctcaaaattattacactgagaaaaagccagactcaaaaggatgcattgaataattcctttcatatgaaattctagaaaaggcaaaaccaatctttaaagtcaaaaagtagatctgtagttgcctgcggaacagaggggaggtgttgggaaatgactgcaaaggggaatgaaagaactttctggagtgatcaaaaagttctatatcttaatggtggtgattatatgagtgaatatgtctgttaaaacgtattgaactgtgcacttaaaattggcatattttgtgtatgtaaattatacctcaataaatctgattttgaaactatgttacatacttactgtttctgaaattgaagatacaaagtatacactgcttcactgttttcaagactaattaaaaatatatattttaataaaatgaacaaaaatcaacttctgtatttgtgtttatgttaatatggtcaatttcttgggaactaataagatgtcaaaggttgtttgtctctttaataaataaccccaactaccatagtctttaaatttttatgcttatttcttaccattttggtttgtttctttgcactcaggcaataactgctctcaatatatgtcctttcatcaattccagcctttttttttctctctctctcttttaaagattaaaaaatgaagcgaaagttgctaaaatttagtatgttgtttattcatttttttaaaacagcgaattttattagaacatttagtagtcaaaacaatgaaacacaggatcatctgatatgataaaatgcataagtgaaatgttctacaagtaggttctgatttttaaggacctgaagaactttcctatgagcaaaatgtaacctttatttcagatgcagcttgtgttttgacttccataagaagtatatttcaaggaatagaagtttttaattttgattaagctcaatttattcattttttttcttttatgggttatgttttcagtggtaggtatctatgaaatctttgcctaacccaagctcattaagactttctcctatgtcatcttctagaagtttaggtctatgcttcatttctggttagtttttataaatggtgtgaggtaaggattgaagttcattttctgcatttggatacccaattgctccagcattatttgttgagaagaatatccttcctccattaccttcgcacctctgtagaaaatgaacttataataatatatatatgtgggtctacttctggattatctgttctgttccattgatttacttgtcttttttcaccaatatcataacgtcttcattattgtagtttcatatattttgttcattttagttgagtttgattcaaaatttttcaatctaaaaaagtcattggattcacttctcatcatacagatgaaaaattaaagactagaagatggccgaataggaaaagctccagtctacagctcccagtgtgagcgatgcagaagacaggtgatttttgcatttccaactgaggtaccaggttcatctcactggggcttgtcagacagtgggtgcaggaaagtgagtgcagccaaccaagtgtgagccaaagcagggcgaggcatcacctcacctgggaagcacagggggtcacggaattccctttcctagccaagggaagctgtgacagatggcacctggaaaatcgggtcactcccaccctaatactgcgcttttccaatggtctcagcaaacagcacaccaggagattatatcctgtgcctggctcggagggtcccacacccacggagcctcgctcattgctagcacagcagtctgagatcaaactgcaaggcagtagcgaggctaggagaggggcgcccgccattgctgaagcttgagtaggtaaacaaagcggccaggaagcttgaactgggtggagcccaccgcaggtcaaggaggcctgcctgcctctgtagattccacctctgggggcagggcatagccgaacaaaaggcagcagaaacctctgcagacttaaatgtccctgtctgacagctttgaagagcgtagtggttctcccagcatgaagtttgagatctgagaatggacagactgcctcctcaagtgggtccctgacccctgagtagcctaactgggaggcacaccccactaggggcagactaacaccacacgcagctgagtacccctctgagacgaagcttccagaggaacgatcaggtagcaacatctgctgttcagcaatattcactgttctgcagcctccactgctgatacccaggcaaacagggtctggagtcaacctccagcaaactccaacagacctgcagctgagggtcctgttagaaggaaaactaacaaacagaaacgacatccacaccatacccccatctgtacgtcaccatcatcaaagaccaaaggtagataaaaccacaaagatggggaaaaaacagcagaaaagctgaaaattctaaaaatcagagtgcctctccccctccaaaggaacgcagctcctcgctagcaacggaacaaagctggatggagaatgactttgacgatttgaaagaagaaggcttcagatgatcaaacttctccgagctaaagaaggaagttctaacccaacataaagaagctaaaaaccttgaaaaaagattagacaactggccaactagaataaccagtgtagagaaatccttaaataacctgatggagctgaaaaccatggcacgagaactacgtgatgaatgcacaagcttcagcagctgattcgatcaactggaagaaagggtatcagtgatggaagatcaaatgaatgaaatgaagcaagaagagaagtttagagaaaaaagagtaaaaagaaacaaataaagcctacaagaaataccggactctgtgaaaagaccaaatctacatctgattggtgtacctgaaagtgacagggagaatggaaccaagttggaaaacactctgcaggatattatacaggagaacttccccaacctagcaaggcaggccaacattcaaattcaggaaatacagagaatgccacaaagatactcctcgagaagagcaactccaggacacataattgtcagattcaccaaagttgaaatgaaggaaaaaatgttaaggcagccagagagaaaggtagggttacccacaaagcgaagcccatcagactaacagtggatctctcagcagaaactctacaagccagaagagagtgggggccaatattcaacattcttaaagaaaagaattttcaacccagaatttcatatccagccaaactaggcttcataagtgaaggagaaataaaatccttcacaggcaaacaaatgctgagacattttgtcaccaccaggcctgccttacaagagctcctgaaggaagcactaaacatggaaaggaacagctggtaccagccactgcaaaaacatgccaaattgtaaagaccatcgaggctaggaagaaactgcatcaactaacgagcaaaatcaccagctaacatcataatgacaggatcaaattcacacataacaatattaaccttaaatgtaaatgggctaaatgctccaattaaaagacacagactggcaaattggataaagagtcaagacccatcagtgtgctgtattcaggagatccatctcacgtgcagagacacacataggctcaaaataaaggaatggaggaagatctaccaagcaaatggaaaacaaaaaaaggcaggggttgcaatcctagtctctgataaaacagacgttaaaccaacaaagatcaaaagagacaaagaaggccattacataatggtaaagggatcaattcaacaagaagaactaactatcctaaatatatatgcacccaatacaggagcacccaaattcataaagcaagtccttagagacctacaaagagacttagactctcacacaataataatgggagactttaacaccccactgtcaacattagacagttcaatgagtcagaacgttaacaaggatatccaggaattgaactcagctctgcaccaagcggacctaatagacatctacagaactctccatccaaaatcaacagaatatacattcttctcagcatatcacacttattccaaaattgaccacatagttggaagtaaagctctcctcagcaaatgtaaaagaaaagaaattataacaaactgtctctcagatcacagtgcaatcaaactagaactcaggattaagaaactcactcaaaaccgcataactacatggaaactgaacaacctgctcctgaatgactactgggtacataacgaaatgaaggcagaaataaagatgttctttgaaaccaatcagaacaaagacacaacataccagaatctctgggacacatgtaaagcagtgtgtagagggaaatttatagcactaaatgcccacaagagaaagcaggaaacatccaaaattgacaccctaacatcacaattaaaagaactagagaagagcaaacacattcaaaagctagcagaaggcaagaaataactaagatcagagcagaactgaaggaaatagagacacaaaaaacccttcaaaaaattaatgaatccaggagctggctttttgaaaagatcaacaaaattgatagaccactagcaagactaataaagaagaaaagagagaagaatcaaatagatgcaataaaaaatgataaaggggatatcaccacagatcccacagaaatacaaactaccatcagagaatactataaacacctctacgcaaataaactagaaaatctagaagaaatggataaattcctggacacatacaccctcccaagactaaatcaggaagaagttgaatccctgaatagaccaataacacgttctgaaattgagggagtaattaatatcctaccaaccaaaagaagtccaggagcagatgaattcacagccgaattctaccagaggtacaaagaggagctggtaccattccttctgaaactattccaatcaatagaaaaagagggaatcctccctaattcattttatgaggccaaaatcatcctgataccaaagcctggcagagacacaacaaaaaaagagaattttagactgatgtccctgatgaacatggatgcaaaatccagaaagacctctatgcagcatctgacactgttgcaatttttctccttcagtatacctccatgcaacttttttcagtagcttttttaaatgccctcacatcctcattctcttctcttttcctctcacaactttttcatggggtttctcaactccatgggcttttttcccaccattctcttttttcctcagcactctcatccactcctacagccctcatcatctcatatacagatgattctcatatctcattctgctttccagcctgattcctcttttaaggtccaggtctccttttccaacaacaatttgcaacctaaaatctgtaactgatgtgttttcttgaaaattatgaaaaggactcaggatagcactttaaaaattgttgaaacagaagaaaagtaattcttacctagccaaaacaattcccccacacacaccaaaaaaagaacaaaaaatggggggaaaatgggcaaagaacaagcactttgcaaaaaaaaaaaggtactttcaacaaacatattttcaacaaacatatttgagaataatgtcaattgaaggacattttgttaaggtacataaaaatccttaaaatacctcagttttatagctaagaatttaacaagtaaaaatagagttgagtcaagatttagagtaacagaactgcatgcttgcatcagggcatttcatatgtcccataaatgtgtacacttgatatgtacccacaaaacttaaaaattaaaaaaagatttagtgtaatagatgtttgaaaagttatttataatagcaaaaatagtaggaagagcctaaaaatcttaaaacagaatggttaaacatattgtgatagagctatatcatagaataatataaaaacccaaaacagtttcaaggaatattaaagggatatgtaaaaatacccaacatataacgttaagaaaaaaacagaataaaaagttctgcacatattttgattccaattttgtgaaaaaacaaaaaagaagagaaaatgaaaatatatattaaaatgttcacgattatctctacatggtaggattacgaacagttttcattttccttattaatcctgcatacattttttaaattatctacaattgtaaaataggagaaaagtcaataagtgctacatttacataaagcaggagagagaaaaattagaaatactcgagaaaaatctttatcaaaattttaatcacatacattacagtttaaaacaaaatctacactcagtacttgaagagattaccaattataccatcatttagttgagttcatttgaaccaatctaatgataacccctaattagtgacaacttatactcgcttttttaaacaatgcacttacttataaaagagctccaccaagtggtgacataaatcatcctggaactatcagaaaagtactactatgtatgctgtcacaactgacataaatttaagttgcaatttcaaaagttaaaaataatgttctatctagcttgcactttgtgaaatatgaaagatgaaaataagtcataagaaacatgtgcttttgtgctctacctcagggtcaaaagatatatccttacgcatagttcatgagactgtaataagtaattagcagtagggttacattaaatgaaatatgaaggtattacagagaaatagggggaagaactgcctttatcttttgctcctagatttcctccttacctaggtgatacgtaggaacagaaggaataacaggctaagacgctagaaaatttcacctgtataatatgagcttacagcagtctagtgttaaggacattcttggatgtgcacagaagtaaaaggcaagagtggcaaagccaagaagaggaatgtaaaaactgaccttacttgtactcaatcacatttttgaaacaacatgcaggggtgaacaccatgtgaatcagtcacccagttacacaatgcctttgtgggtaagaaagttgattctatttccagaaaaacatgtacctggcaaattcagatttacctggccatctgcccaaaagttgagcacctgggactccctcccttaagaactcttacagatcatgcagcatatgatcagaaaaattaaaataaatttgaaaaactcctatggaactcagttcataaacctgtcagctcttaactgaactgtgacttgcttgcttgctcatttgtccctatctcaactatgaatatgtaagcatcctgaaggcagaaatattgtatctaattcactactttaccccaagagccttgtagtgtccagcactaacactagcgtagttctaaaaaggaaaaaaaaaaaaagttgtggcagtagctacagagtggctttttctctctttgtttttttttcttttttttctccatatgctcagagaaacaagcagcaactgaaccaccaaagtgtaagttaagactgttggttccactatagtttcttcagctcccattcacacattaatagcaaactggtaagtatcaataagggtaacacacacacatacacacacacaaagaacgacattacagacctcattttctgaacagatgatacataacctacctagaactaagtttctggtcaagctctctgcttagattattgagctcaaagcccaaaaatgatccatccaaaaaggtataaccatataggaaagaaaactgccaccatactcaaagggctactaattagcttttctgaaaaatagctacaaaactgatatctactactcttggaaacaaggttgaaaaccattgagtaaggagattaattcctacaactcagatccaattatatggattaacaatatcaactccttttaccaaatatgacatgtgctgtttcaaaaaaggaaatcaccaacaaacaaatgaggtcacatttttttccagctttatggaggtacaattgacaaacgaaaaagtttatatttaaggtgttcaatgtgatattttgatacatctatacaataagaagtgattacatcagtcattccatatccacggtttcactttccacagtttcagtttcccatggtcaaccatggtttgaaaacaggtgagcggagtacctattttgagagaaacagactacattcacatactttttattacagcatcttgtcataattgttctattttcttagtcattgttactaatctcttactgtggctaatttacaaattaaactttaatgcaggtatatatgtacaggataggaaaaaacatagtatatatagggttaagtactatctgtggattcaagcatctactgagggtcttggaacatatcctctgaggataagggggcactactgcactacaattaagctaattaacatatctatcacttcacatagtcaccattttgtctgtgtgtatgtcgtaaggatacttaagatttctcttagtgaatttcaagaatacaaaacattattattaactataatcaaccatgctgtaaattaagtgtccagaactactactttttttgtttttgtttttgagacaggtctcatgacagggtctcactctgtcacccagactggattgctgtggcacaataatagctcactgcagcctcaacctcctgggtgcacaagcactcctcctacctcagagtcccaagtagctgggactacaagtacatgtcaccgcctgtaaaattttttttaatttttcgtagagatgggggtctccccatgttgcccaagttggtctctaactctggcctaaagcaatcctcctatcttggtctccaaacgtgctgggattataggcgtgagctgccacatctaacccttattcattttataactgaaagtttgtaccctttgacaaacatctccacattctccccaggctccccacccctgctaaccacctttttactgtttgtatgtatttgactttttaaagattttacatataaatgagatcatgcagtatttgtctttctgtgtctgactaatacaacataatgtccttcgggttcatccgtgttcttgcaaatggcaggatttcctaccttttttaaggctgaataaaattccaatatatataacagatagtccttgacttacaatggttcaatttgcgatttttcaactgggtttgtcatgatcttaatgcaattttaacttaagatatttttgacttacaatgggtttatcaggatataaccaatcattagtttaaaacaatctgtaccacattttatctatacatctaatgacagacacttaggttgtttccatatctttgcgactgtgaataatgctgcaatgaacatgggagtgtatgtatctcttcaacatactgacttcatttcctgtggatatctaccaaaaggtaggattgctgaatcatgtggtagttttagttttaattttttgaggagcttccatactgttttccataaaagacataccaatttacattcccactaacattgaacaatagttcccttttctccacatcctctctaacatctgttatcttctgactttttgaataatagctgtgagtcctcagagtcctgaggtggtgcagggtatcgcatggtgagagaactgagcatgctaagatgttagcttgggataaagccactgatgccactctcaggaaaaccaattaatccatgaatagattgatccattcataaaggcagaggcctcaggactcaatcacctcttaaaggccccatctttaatactaccatattgggaattaagtttcaacatgagttttagagggggaaaacattcaaactgtagcaaatgtcttttatttctttttcttgcctaatatctctggctagatttccagtactatgttgaatgcaagtgacaaatgatccttgtcttgatcctgatcttaaaggaaaagattttaggtttccccactgagtataatgctagctgtgggcttatcacgtataacctttgttgtgttgaggtacattccttttatacctaacttgttgagagttttcatcatgaaagaatgttaagttttgtcaaacactttttctggatctattaagatgatcacataatttgtccttcattctgttgaagtggtatatttatagatttgcatatgttgaaccatccttgaatcccagagataaatccaatttcatcatgatgtatgatccctttaatgtgctgttgctaatattttgttgacaatttttgcacatatgttcatcagggatattgacctataatcttcttttcttgtgatacccttgcctgactttggtatcaaggtaatgctagccttgttaaatgagtttggaagtgtttcctcctattcaaatttttgaaaacgtttgagaaggattggtattcttcaaatgtctggtagaattcaccagtgaagccatcaggtcctgaggcttttctctattggtagatttttgattactgattcagtcccttatttgttattggtcattcagattttctatttcttctgctattcagtcttagcaggtagtatgtggcaaacaatctgtctctttcaggtcatccaatttgttagtatataatttgttcaaagtattctcaggattctttgtatttctgtgatatcagtcataatgtctcctctttcattcctgattttatttatttgaatcttctttttttcttattctagctaaaagtttatcaattttgtttatcttttcaaaaaaactcttcattttgttgctcttttctattgttttttgagtctttcatttatttctgctgtgatctttcttatccccctccttctattactttgggcttatttgttctttttctacctagttctgagagatgtaaagttaggttacttatctggggtcctactgtttccttcatgttggtgtttatcactatgaaatctcctattggaactgttttgctgcattccacaaatcttgatgtgctgtttccatgttcatttgtatcacattttttttttttaatttccattttgatttcttatttgactattggttgttcaggaacatgtttaattttcacatatttgagtatttcccagttttcctgttatttttgcttgctagttttatgccattatggtgagaaaagatgcttgatattatctcaatcttcttaaatatattaatacttgttttatggcctgacatatgattgatcctggagaatgttccatgtatgctcaaatataaaggcattctttctatggtagttgtcaaaattggtgtttctgaaggacagcgctactattccaccatcttgctgacatcagctgtctaaccattcttattctacacaatgctgaaaattatcttaaactgacatttccactttggggaatatgtcctgaggaggtaccaagacaatagaggaaagaatgggtctttccaaaagagcaatgagttggcattggaataagagaattccaagttgaaagagaactgaaagagatcattaaccattaagtctcgtggtctgggagtttctagggttccaagtcatataatgataatctggcgagttttccaatactttaaaaaacctatatgtttgctttcaataaagctacaataactaaaatagcaaatactttacctttgctaaaattcaacgcagtatagtaacacaatttacctgatgctgatgaaaagcactagttggcagctttgtatatcttgaataaaactagggaaaataattacttaataaacaaagtttggtagacagtttctgaaacacagattcaatgtgggtgaaaactaataataggtacctgatgattttcaagtacactgtaattctgaatcaacctgtctttaaaaatagtttttagaatatgaaaatgcaatatcaagatgcatataaatgaggtaaattaaaacaggaacataagtagaaatgtttattttatattctttgtttaataaaataatttactccaaaactctgctaaatatctaggtctcataaacttgattaaatgtttatagttgaatacataagagacagaaataactaccaatctgaacatcaataattatgactatcaggcctttaaaattataatgtacataaataaggaaagttataatgtatataaataaggaaaaaaatacttcactgacattatagccatctatttcaagactacatctgttagatctatattatatttatatagaatggagagatatttaaagcacaggaaaacaattagttttattaaattgagacttaaagatatcctaactcatctggagcctataataatctccacactgatttgaatcctatgagagaggtgttatagcagtgtttgctgtatccttcttgtatctatttctgacagaaaggacaagacttagggcttgactcttgactgctgggagctgggggtggagaaagttaaaagaaataccttgtagctattttctatatctaattatttatatcccaacttgtattagaaagatttctgaaatcttaaaaaaacaatgcggcgggggaaatggctgatgggaaggcgggagaggagaagccggaaaagtcgcaatgagctggagctgctggagtaatggagaggaaagttccagccgcagcgctgagaagcgatcagctgaagaagaagctgcagacctccaacaaagcctgcaaagatctccaactttggatttgccataggtagtcagacgacaaagaaagcatcacccatatccatcaaacttggatcaagtaagcctaaagaaactgttccaactcttgctccaaaaactctttcagtagcagcagcttttaatgaagatgaagatagtgaatcagaggaaaggcctccagaagcaaagatgaggatgaagaatattgcaagggatacaccaacatcagctggaccaaactccttcaataaaggaaagcatgggttttctgataaccagaagctatgggagtggaatataaaatctcatcttcgaaatgtctatgaccaagacaattaaatgatgttttgaaattggggtgtgggtgggtataaagttaaaaagaacagtttcctttttttaagaatggtataagactacctttggagccactttttttttctttttcatctttttaaaagattgagtggtacaccaataaatgagagtttgaaattagaggtaatttatgttttgtatacagatttcaagacatttgctaatttggtagttttgtgtgattagtttccaaagtttacagataataaagaaatcagaaatggtacctttttaagaattgcctatttttttagacacaactattagcacattaagagggaagcaaaaagttaattgtctatttaaaactgcaagcagttactctcttaactcccttattacctaaacttgtctggctcccaggaatagccttatagagagagggagtattgtattgggaggaaaatgttactgaactattgactgaaagtacatttagataaaattaaaatacagcttttttcttcatgggcatttgttttctttcaagtcatcataaactaggtgttgcattgctatcagtggatacagacgcttagctcttaaaataacttttttatatgtaaactgttgaatatttgaaatagcccacttcaccttaatgggtcttgtctatcttcattaatcttcaaagaaaaaccatttgctaccaaagtaaatcagtattttgaatgtgcttctcttgttttttgtttattagctagttcctgtaagcatttccaccagaacttgaagcgaatcataagaaaactgtttcttttaaaatacaaaccaccaccaaaaatttaaatgtacatattgcttaagtatttggctgcttttattttttaaaaggtataaacaccaaaaaaaaaaaatttaacattgtatgaagatggaaaacaagaagatgcactttctgtaactttgtccaaggatttaaattactaacttgtgaaatccaatttgaattgaacttaactactggctttcttactagtaaaattatatggtttattttaaatgtatacatattgaccaatggcctctcaaaaagcacattttagatactgaaatagaaggaaagaaaatgcatcttcaaacattttttggaatctcaccacacatactttgtgaatttgtgtattgtagggtgttttctttttgtatttttgtattgtatacgaactttttttttaatgtgacagttaaacacatctttaaaagcacagtcacagacaaaaaaaaatacagtataaaaatttccttgaaaactcctactacaatattgtatttggaggcagcttcagaccgttttattggtggtaactgctcgctgagctcttttagtcggtaataactcagagaagcaacctgtgtatattcctaactctttgttaactagtatttaagtttagaataagccccaggtaaaacaatggaaatgtatatagaactcttagttcttatatgatttaattatatcaagatacttgaatttaactcactttaatgtaggcaaactatccatttttgtccattttcctgtttgttaaaataacatacctcttctgatattcttttcttgacccaaatgaaatattaacctaaggtcaagctgggagagagaaacaactgagatgaatgtctttaataaaataccaataaatttgtcaaactcaaaaacaaacaaacaaacaaaaaacaagaccaaaaaaatccaaaataagtgggtaaagaaagacagtatttttttttattcattgagatacagaggaaaaaaaagaaattaggcatttttacggaggataattttggatactgtttgcttatgtattcgatttattcaataaatatttactaaatgcctactaagcatcaaacactattctaactgctagaaatatatattagtgaacaaaacaaacattcctgtttcttggagcagagggaaaaagacagtaaccaaaaagcagtataaataggtaaaccatatactatgctagaaaaggaatagagtgcaatggatagagaagttcagggagaagtaggggcaggttacagtattaagcagagtggtcacgataggcctctttggtaaagtgagatttgagcaaagactattctatgagcaaagacttcattctatgagcaaatttaaaatttttaaatgtgaataccttctgacctagcagttctacttctaggaatctacactataaaagtactctcatttgtgcatgaaaatgtatatataaggataattcaccgcaacggtttgtagtattacacattcaaaaacaaactaaatgtctctcaacaatgaaattcataaataaattatgatatacccaaaaaataaaaaaaaaatccactaaaaggattaagctaaatacagagggagatgtgctcttcaagatatattgctaaatgaaaaaagcaaggtgtagaataatgcaaaactagaaacttttattagttgcctctgaagagaagtgggtggcttagggaaaggaatgaggagactttttactgtttatacttttctttcgtttgaatcttgaaccatgtgaatctaatgcctattccaaaattactgatgatgacttgttaaaaggtgtagataagtaagacttcaattgggtaaaattaaaatccttgtgtatatgctggaggaaggaaaaactggagggacagagtaagcaaaaactatcaatggtcatttctatggatataactaggaatagaaaaagagcaatgtttttcagggacatggatagagctggaggccattatccttagcaaactaacgcaggaacagaaaaccaaatgctgcatgttctcacttataagtaggagctagataatgagaacacatggacacacacaggggaacaagacacactgggacctatcagagggtggagggtgggagaggaagcggattaggacaaacaactagtaggtattggacttcattcctgggcaatgaaataatctgtacaacaaacccccatgacataagtttacctatgtaacaaaactgcacatgtacccctgaacttaaaaaaaaaaacaaatcccatgcagtgagatactactcagtaatgagaataaataaattgttgatgcatatgccatcatgaatgaagctccaaataattatgttaaaacagtaaaaaaaaacaaaaacaaaaacaaacaaacaaaaaaaaaacaaaagcacaactgcttgtggcaatgtaaattagtagagccactataaaagaatagtttagaggttcctcaaaaaaataaaaataaaactaccatatgatacagcaatcccaccactgggtatatatccaaaagaaataaaaacagtatatcaaagagatatctgcattcccatgttgaatgctgcatttttcccaacagccaagacatggaattaacctgaatgcccattaatggatgcatggataaagaaaatgtggtacatataaacaatggaatgttattcagccataaaacagaatgaaatcctgtcatttggaaccagagaacatcatgttaagtgaaataagccaggcacagaaggacaagtacatgttctcacttacaagcaagagcttaaaaaaaaaaaaaaatattgaactcatggagacagagtagaatgatgattaccagaagctgtgaagggtagtggggatgggaggataaaagaggagttggttaatgggtacaaaaagacagttagatagaaggaacaagatctagtgttctatggaaacactatatagtcacaatacagtgactatagttaacaataatttattgtatatttcaaaataactaaaagattagaattggaatgctcctaacacaaataaatgataaaagcttaagatgatggatactccaactaccatgatttggtcattacacattatatgcttgtatcaaaacatcacatgtatcccataaatatgtacacctattatgtctccataataattaaaaataaaaaattttaaagtaaaaaaggagagcaacagagatccgctctttattactataaagtgtgatttatgttaaaacaagtctttatttacttataattgtgaaagtaaaatatagaaaggtgaaaaaaatgacaagaaaaatgttagtatcccccaaaatgcatgctatcatgaaagctggcagttaaaacagtaacaaacaattataagattcatagtatctataaggttaaattaaattaattagttagcttctccaggaaagcttaatgggtcttggaccaaagatttcttccatggttcctcatgaagaagaaaacacgctgtagtaaataatattggccaagagtgaaaacttttatgaagtcaaagccttaaagaacaagcaattctaaaagtaggcagtacaattatatataagatatatctgactattacatgatgaaagtacatgatgatgaactttaatagagttatccaatacacacattaagtataaacattgggtagtgaaaaaacagggaaaaatcgtttgatcaaaattttttagagaatagagaaataaagaaaaatcaatgaaaccagaaaaaaaaactttaaatcaccaacattgagaaacttctagttagactgaccaagataaaagagagaaggctcaaattaaccaaaatcgggaatgaaataaaaaaaaattactactaaccttacagaaataaaaaggattataatggcaatgccatgaacaattatttgccaatgaactaggtaacttagatgaggtagacaaattcctagaaaaatataaagtataaaaactgattcagaaagaaactgacaaactgaataaacctataacaagtaaaatgactgaattagtaattttgaaactttccacagagaaaagtccaggcccagatggcatcactgatgaattctaccaaatatttaaagaagaattaatatctattcttcacaaactgccccatcaaaacagaagaggagggaacacttcccagtccattctgtgaaaggccagtattatcttgatactaaaatcagacaaagacagcacaaggaaaaaaactaaagaccaaaatctcttataaatacacgtatagaaatcctcaaaaaaaaaaattagcaaaccaaatctagcaacatatcaaaaggattatacattgtgaccaagtgggacttattccagagatgcaatgttggtttaacacctgaaaatcaactaatatactacaccatttcaataaagaacaagaactacattattatatcaatagaagcagaaaaatcatttgacaaaatccaacaccctttcataacaaaacactcaacaccctagaaataaaaaattcttcaactgatgaaaggcatctacaaaaaccccacagctaacatctacttaatggtgaaaaactggatggtctcccactaagatccaggaagagacaacaatgtccttctcatcattctattcaacattctattggagattttagacaaagcaattaggcaagaaaaagaaataaaaggtatccagattttaaaggaagaagtaaaactatctctatttgcaaatgacattattttacatctagaaaatcctaaggaattcactaagaaactattgaagctaataaattagttcaccaagttttcagagtacaaaatcaacatacaaaaaccacctgtatttctatatacagctaagtaatatggaaacaacctatgtgtctgtcaacagagaagtggataaacaaaatgtagtatatataaacaatggaatattattcagccataaaaagaaaggtgatcctgtcacttgccacaacacaggtggacatggaggccattatgctaagtgaaataagcagacacagaaagaaaattattgcatgatctcatttatatgtggaatctaaaaaatagggggtgtcaccaaaaacaaatgcaacaaaaacaaaactaagtaaatgggacttaaactaaaaagtttctgcatagcaaaataaataatcaacagagaaaagagacaaccctcagaatgggagaaaatatttacaaactatacatccaacaaaggatccagaatctacaagaaactcaagaaaatcagcaagaagaaaacaaataatcctgttaaaaagtggacaaactagatgaatggattttttttgttgctgtttttgcaatgcagtttcactcctgtcgtccaggctggagtgcaatggcgcaaccttggctcactgcaacctccgcctcctgggttcatgtcattctcctgcctcagtctcgagagtagctgggattacaggcgcatgccaccacgcccagctaatttttgtatttttagtagacacggagtttcaccatgttagccaggctggtctcgaactcctgacctcaggtgatccacccgccttggcttccgaaagtgctaggattacagacgtgagccaccgcgcccagccaaacggacatttttcaaaagaagatacacaaatggccaagaaacatgaaaaatactcaacatcaccaatcacaagggaaataccaattaaaaccataatgagataccaccttatcacagtcagaatgagcattattaaaaagtcaaaaaaaggtgcggggcggtggcagcggcgcgcggggaggcggggcccgggcggagggcccttgcccctcctccccgcgcgggagccgaggtggacagggagaccattatgctaagtgaaataagcagacatagaaagaaaattattgcctcatttatatgtggaatatcaaaaagggagtgtcaccaaaagcaaatgcaacaaaaacaaaactaagtaaatgggccagccccagagacccgggcccgccgcctccccccggatgcgggacgcgggacgcaagcgcaggcagggtcagcgcggtgggtggcagggggcctggccgagtcaaaagtctatttaaaaagcagagagaggatgcgtcggagtgataaaggccttatccttggggcgtttggggacactggctgcagtttcacagtcgacctagttgcaaagagaatttcaagagctcgttggtcaggtcaagaataaatctatgcgtaacgtcgtcctgatcctgggtttatagtcgtcgtcctttttaaactgcaaagaagcatttgcagactttatctcatgggcaccacttgccactcttttttttttttttcttttttgagacggagtctcgctctgtcacccaggctggagagcagtggggcgatctcagctcactgcaacctccaccttccggcttcaagcgattccctggcctctgcctcacgagtagctgggactacaggctcacaccaccacgcccggctaatttttgtattattagtagagacggggtttcagtatgttggccaggcgggtctcaaactcctgacctcgcgatccgcccgcctcggcctctcaaagtgctgtgattacgggcttgagccactgcaccccgctgccaaccttttgagtatatgaagctggcagagaaataaagcgtcgtccctctgcgcgtccctccccttctgctagaatgtttctcaggaacgctactccaggggttgctccccagtccaaatgggaggcctttggcccaccagggagctttaggttccccgggtgcttctcggaggctgacgagggggtggagagcgtgtcggtgagcgcccgggtgcagatgctcatcagcacgctgcagcgcagcggggttgctcggggcaccaccgatgagcgcgctgcacagaggggccacagggcagacgccaagccagctgccaagcccaccgtgcacaaggagcagcccgcattgcctgcctgtggtcttgttgctgactttgaccccatgagggaggaggaaactgcagactttggcccgttggtgctagattcaatgatgattccgtggaccgggacattgcggaagccatccgggagtacctaaaggcaaagagtggagccgcacagcccggggctggcaggggccagccaggcgcagcccagccttccagggctgcaggcagtggcagtagatgtaagccagaactatctcacggcagtgccccgacttccgtgtgtccccccaaaacttgtacctggctcaggtggtggccctggcagccaggtgagatccagtgaggactagggttctgccttcccggtcagagcgagcagcaacgactccttcgagcagagcattaaggcggaaatagaacagcttctgaatgagaagagatagcatgcgacccaaaaatgtgatggggtcaatagataaaaaaccagacccaaacgaaaattcgaccaagtcactcttgaaatcccacgaagagctagccgcaaaggtggcgcatcggcagggtctgaagggcgcccataaagagttcgcctttcgcaaacctccccggttagcaaagacgaacgtgcagcccagaagcctcaagtccagggtcacgaccaagcaggagaacaagggcagcccgaagccagcagccccctgcagcccttcagaagcaccacagaataaaagcggggtcaagaggagcgctggcgccctgagaaggggaaagcaagtcacaagtgcggcgcaggcgcccgaggcgtcagactccagcagcaacgacggcactgaggaggccatccaggtgtactagctgcggcaaacacgcaaggaggccaacggggacctgccccagagggcccagcgccgggaggagagaggacgcctgaccccgcacacagcacaagcagcgccacaaaaaagtgccttgcgcgagacccacaggaaaacacccagctagaggaagccagtggccaccaaggccacagacccttgcccggggtgcctagacgctgaccattccccacaagctcccgaaggaaaccaaagctccgcctccagcgagcccggcttccaggaacgagtttgtagaacggtcctcgtgccaggcagacacgtccgctgaactgacgcgcgcggaagcaatcttgggcatttccaagactaccctgccggcccccatgtaaggcagcaacaggtccctttctgcaagcccacgcttctactccctgaacgtgccttcccgctctgacggcgacagtagctccgtggacagcgacgacagcatcgatcaggaaatccagacgttttgaccctcaaggcatagtcggggagtttgctggccagaggtgagagctgctcgcaggctgcccagggcccactttcaccgcctggccccaacagccagaccagtggccccaaggcccccctctctaaaacaccggacccgctgctgagctgcaaaaggaaacgtagaggcggcggccatgccatgaggccgtccacgcccaagaaaacgcgggaggtggtgaaagatggtggccaggatgccgaccacagccaggcgtgagccgtgcccggccatgaggggcgggacctgcccgtccagggcaaagccagcgaggtcccgggaggggagggcgcagccaaggggcccggcgacactcgcatgacgcagggccagggtaagacagacgaggtgaggcacctggacgagaaggagagctccgaagacaagagcagctccctggacagtgacgaggacctggacacggccatcaaggacttaaggtccaagcgaaagctcaagaagaggtgcagggaacccagggctgcgtgcaggaaggtcaggttcagcactgcccagatgcacttcctggagcagctgggcgggctcccgagagactggaaagacagaagcccgccggtgcttaatagctgactctccaagtccaagagagacagcggcgagggtccagggaacaaacctcccagtgtctgtggcagtatggcagagaagacgaagcaggagggcgtcaggagccaggacacggccccggccttccgagtgaggggatgcgcctctgcctccgcctctgaagggaatccatttccccagggaatgccagggcccagctcccagccccggctccctgtctgacgacaggagttcagtggacagtgacgagagcatcgaactgtagattagtaagtttttggcggaaaaggccaaggagtctgagcagttcagaagttcaggcagagggccctgctgctctcgggaaatggggctcattcaggccagagttgctgtgcaggaaggagcgggccccaccgcctggcgtgtgcacgcggagtcagtgggccaggggggtcccacagccggcagaagggccatgaggtgcagagagcgctggagcacagggcacagccgacctgttcagccagggcaggaaggggctccccgctgctcccgcccaaggggatccggcaccgcccaggagcaccagtggcagtgtctccgccaaggggctctcagcgagcaggagaaatgtttacattcagaaagaccagcgctcacgaggggccgagcatgctgccagaagtgcttttattcagctgcccagcagtgccacagcgggcaccgaggccggaggtgctggggggagctttcacatgggctgcgggagccggggcttcctgacccctagccaggaagctgaaagggactctggagcccaggctgaccacaccctgccctcgagcgacttcacccaccggaacccgtgcgcgctgcgctcggaaagtagagatgcggagtggaggcggggcgtcgggagcgggaaagacaaggggtccgagggccccgcctggggcctgcccagcctaccccttgtgggcttctccccgcgctgtccacccagctcttccattttggaaagggtgtctcccaggggggcaggcaggccagcctcttcagcccgacatggggctgcctccacagggcccgtccttctctgccttcagggaggcccaggccgggcccagccctgtctttggaagcccacacttgctggcgaagaaggacggcgggccctggccaagcagcaaggcacagacagggcggagtttgcccgacaggaggaactcgggctcggaggaaagcattttagacctgaggtattgacgaagggtcatcgatagggacgaccaggaccagggcaccttgggcgggcacgccttggttagtgacgccagtgacttcagcgacactccgcgcacggaggacagtggcggcagctcagcagtgaaggtctaagccctcgagttgtgggtttgcgtcccggtttgcgtgcatttgtggaaaggagcgtatctgtgcgtgtatccgtgtgtgtgtgtgtgtgtgtgtgtgtgtgtgtgtgtgtgtgtgtgtgtgtgtgtgtgtgtgtgtgatggttctgtggttgcagggaggagaaacaggagtcggttatacatagccctgtatagacgtacaccaacatgaaacaatgcttttatttaacagatgtgtcctggtaaatatgatttctgtagctttctgtaaattatttaaagtgatgtaaaaaatatttttagaaaatactgttgttcaattttgtagggtgttcctaattgcaatttcctgtgttctgcatacaagtcttagattagaaaacatttggttcttatcatcgcagccaagttcacagagactctgatgttttttggttgattgctggtgagaatgtccgtcggtggctgcagtggtagcctgaggaaggcagagctgccctccccgggaatcgctcagatgccccaaagtgtccgtcgggaagctcgcaggacagcactttttatacagaggacacccccgccccccaccgcccccctggtccttggaggccagagcacatttgaaaactgcagtcacagctgtccgctggaaaaaacgatttaaagcacaatggccagcaagcacgtgagagctccctgttgcatgtgaaatccccgcggatgtcagcggctgctctgcagctcagccctgggcctgggtggattcatgtccaatctttctgaatcactagatgattctaacatctaaataaacccctttttatatggaaaataaagtaaaaaaacaatagatgttggcgaggatgcagtgaaaagggaatgcttatacactgttggtggaaatgtaaattagcacaacctctatggaaaacagtgtgaggatttctcaaagaactagaagcagatcaaccattcgatccagcaatcccactactgggtatctacccaaaataaaagaagtcataatatcaaaaagaaacctgcacttgtttattgcagcacaattcacaactgcaaaagtatggaatcaactgaagtgcccatcagccgattagtggataaagaaagtgtggtatatagctcaacaaactaggcattgaaggaacatacttcaaaataataagagccatctatgacaaatccacagccaacatcatacttaagaggcaaaagttgaaagcattccccttgaaaggcagaacaaaataaggatgctctctctcaccactcctattcaacatggtattggaagtcctagccacagcaatcagacaagagaaggaaataaagagcatcggaataagaaaaaaggaagtcaaactattcctgtttgcagatgatgattttacacctagaaaatcccatagtctctgatcaaaagttccttcagctgataagcaaagtttcaggatataaaatcaatgtacaaaaatcactagcattcctgtgtaccaatacccaagctgagagccaaatcaagaatgcaacccactcacaatagccacaataaagaataaaatatctaggaatacagctaactagggaggtgaaagctctctacaagaattacaaaacacagctcaaataaatcagagatgacacgaacaaatggaaaaacattccatgctcatggataagaagaatcaatatcattaaaatggccacactgcccaaagcaatttacaggttcaatgctgtttctatcagactaccaatgacattattcacagagttaggaaaaagaaaaaaaaaatctattttaaaattcatatggaactgaaaaagagcccgaatagtcaaggcaaccctacacaaaaagaccaaagctagaggcatcacattacccaatttcatcctttgaaaagatgtagttcaaaggatacgaagtagcaaatacataggatgaacaagtccagagatctaatatacaacatgaggactataataaataaaatggtactgtattagagatttttgttaaatacatagattttagctgctttttctttttttttttgcccaggctggagtgcagtggcacgacttcggctcactgcaacctccgcctcccgggttcaagcgattctcctgcctcagcctccagagtagctgggactacaggcgcatgccaccacacccagctaattttttgtatttttagtagagacagggtttcaccatgttggccaggctggtctcaaattcctgacctcaagtgatccacccacctcggcctcccaaagtgctaagattacaggcgtgagcctccgtgcccaactgattttagctgctcttatccaaaaaaaatagattttatttctatccacctacaatgaataagccaaaaaggaaagaaaacaattccatttataataatatcaccaagaataaatatttagtaagatttatactctgaaaactgaaaacactggtgaaagaaagacttaaacgaaaagacattccatatgcatgcatctgaagacttcatgttgttaagaatgcaatattccgcaaattgatctagatccaacataatccctatcaaaatcccagctgcctttttttaaaacagaaattgacaaattgatcctaaaaattcacatggaaattcaagtaccaagagtaacaaaagtaatcttgaaaaagaaaaccaaagttgtcgaactcacacttccctatttcaaaacatactacaaagctataaaacatactacaaaacagtatggtactatcataagaataaacatacggccaggcgcggtggctcacgcctgtaatcccagcactttgggaggccgaggtgggcgatcacgaggtcaggagatcgagaccatcctggctaacacagtgaaaccccgtctctactaaaaatacagaaaaattagccgggcgtggtggcaggcacctgtagtcccagctctttgggaggctgaggcaggagaatggcatgaacccgggaggcggagcttgcaggaagccgagattgtgccaccgcactccagcctgggcgacagagcgagactccgtctcaaaaaaaaaaaaaaaaaaaaagaataaacatacagagcaatggaatagaactgagactccagaaataaaccctggtttttatagtcaactgattttcatcaagggcaccaaaacaattcaatgaagaaagaatagtcttttccataagtggtgcagagacaactggatatccacattcaaaagactggagttagacctcttcctcacatcatacacaaaaattaactcaaaaaaaaaaaacaaaaaaaaacccaagactgacaagaactaaaaaccatatgacttttagaagaaagcacagaataagtcttcatgaccttgggttagtcaaggccttcttagatacaacatcaaaagcccaagcaaccaaaaaaaaaaccaccaccaaaaaaaaaatagaaaactggacttcatcaaaattaaaatcctacgctgcaaatgacatcatcaagaaagtgaaaaggcaactcacagaatggggggaaaagtctgcaaataatatatcttataagagatatgcataaaggagaagctttaactgcatcttaaaaacagaatttaggctaaaagaaaaaagaagggtattccaaaaaaaggggagatcgcatgaatatgaatactatcatattcatatggaagatattcatatggaagattcatatggaagggaagagaacacaggcattgggggccaacaatggaaataaaaaataagactggaaggaaggttaaagcacagaccatgaagaactacaaatactgagaaagtttggactttacttcttcataatggtggtgggagcatgggagggtgttacaatggaggctactgagagtgggttgtaacaatgaaaaataaattttaaagcaaaaggggcaaactgtacaccagtcttttctaaaaatcaggcacaggatggattggatggagaaaagaagagactagtcagaaagaggcactaaaacatgcataaaaaatgctcaagtcaatgacataagcttccaccttctgaaattaaaaaaataaaaaggaaattaaaaccaaagcaaacagtaaaaaccaagcactgctggtaaaagaaatgaagggacagacgtgagaggcaatgcaaaaagataacttgagactgaacggataggtttaaaatagaaggagtctggtatagttttaattagtcctatggacagacactgaataccaaggtaaacctgtaaagaaagcaaatggtagtgtaaaattccacttcttcctagaatgcagaaagctgcaaagagtattgctcccaccctcacaacaagaacaagccagataaggaacaaaaacaacctttcttgaaatcaacatatcctttccttatatttcagattatttaatttcccctaaaaaaaggaacctccaatgagagaaaagatataaataatggctcatctgtggcacaacatgaaaggaagagacacagggaaccctaacaaaagtaaaaagtattcagctaaaaatttttaatgaatgctgattacaaaacaacaaaaatccatttaaatataaaaaagaaataggttaaaatcaaaatgaaggtaaacgatacacattgtaaagagtgatcacaagaaaagtggaatcgatatgtggacactgcagaacaaaagatataaatttggataaaaaagcacattacataatgataaaggtaccaatttacctaaaaggcataaaaattctaaacttgtatgtacccaaggataaagctttaaaatacactaataaaggccaggcacagtggctcacgcctgtaatgccagcactttgggaggccgagggcagatcatgaggtcaggagttcgagaccagcctgactaacacggtgaaaccccgtctctactaaaaatacaaaaattagccgggtgtggtggcgcatgcctataatcccagctactcgggaggctgagacaggagaatcgcttggacccgggaggcagaggttgcagtgagccgagatcgtgccacgcactccagcctgggtgacagagcaagactccatctcaaaataaaataaaataaaaaatacattaataaaaaacagaatttaaaaggaccattctaattatagttggaggcttcatatttctccctcaataattagtaaaacacatagaaagaaaatcagtaaggatatggatgatctactgtaccttttctatgtatagatatacaaatacttaccattgtgttacaattgcctacaatgttcagtacagtaacatgctgtacacatttgcagactaggagcaacatgctatataccacacagcataggtgtgtcataggctataccatccaggtttgtgtaagtacatgctatgatgttcacacaacgatgaaatcacctaatgatgcatttctcagatgtgttcccattgttaagcaacacatgactgtatttatttaaaatataaccaccatatcacaaaaataagtaagtggttctatcaagagcaatatatcccaaagctctttgagatatgtatatcatacatttcatatacatatatatgtatgtataacaaaaagcctatgaggttcacattcaggcattatttctgccttacaggtgagcaaactgagactcacagaattaaccaatttgcctaaaatcatatagctacaatataattacaaccaaagtttcctgccttgaggtccaaggcattttccattctaccatactaccaatcaagatgcagaaagtaaaccaaaattctaacagctgattcaccttaagtcacaatatgaacatcaccttagccaatttcttaatggaaagtcctattcatatgctataatcagcataaatacaatctaaccttatgaacaaagctaatctttattattacactttactaaatatttattttaaaaaaagaaaacacttttctagacaaaataccacaaacttttcctttaaagggattaatatatgctttcatgtatgcataaacaacttttctgatgctaaagtacttaaaaataagaattttaacaaacattactacatcaaaatcactacaatgcatttaaaattgtaaccattttaactgatatcctaagttctcctaaaaaaaaatacatcaatgataaaattttctggggtatttcttaagtaaaattattctgtttgcaagacctaatatacatactcattgactctaataagagctttatatgcattaatttatttaatctgcacataactccaagatccagaaattactgtcagtcccttttacaggtaagaaaactaaggcttgaaaattgtagataacatgttcaagataatggagttcggacatggtatatctgtttgactcttaatccttgctcttaacccatcctctatcccaataaacatcacctactttctattgttaaaaagggtttcctttttgacaatattcctcctcttgtttcaaagaagagagacaactgccactagaatagctgcactggaaacacatttattctgtcattacatttgcttcttagaacacactgtatcacattctcccttagatattattatataaatgaaggttaaattctcaggccaaacctcaaaaacgtaactctaacttaaaatcatatttcaaggaaaagtctgttgatttacaacaggacaacaggacatcatcttccatcatacccttcaaaagcacacctcaaatcccaaaaataacatgaaattcctttcttaccttcctccagtacctagccataaataatttcacacatcctagtccccattatgagctccattaggaaataagattcaaactgggccagttcccagggaaggtagagacaaagccaggatgaaaaagggtaataaagcagtaacatttgcttatatatgtattcaattctgaagctcaaaagagcctctactgttaaaactattattgttatagtttagtacaaaaaaaaataagttatgtgaaccaggctggaaacctaactactatatcaaacttgcaaacagatttggaacacaatgcacttataaattgaaaactacagtatgtatattcactaatgctctttataatcagctatcccttccaaaatttctgaacactaaaaatctagtattttaggaagagaaaagtgaaggagctctgatcccatttaattgtatatgcacaaaaacagctttgtacatgaggtacccaagtcagttaaaatatacattagatgcctggggattataatacccaagtcatacattcaagatacttcagtattcctctctttttacataagaaatgtgagactatgttcaattctttggaaatcatgacacttgttttctcctttttactgccagagattttatttaatggttttaaacaattttcttatgggacatacataaacacattccgctgtgttaatcagatcagtaaaaacagatatatactcttatactactatgttgagaaagtaaattcattaaaagtatctgtctgaagtgtaatctagcaataatcatcaagagtcataaaaatgttcatagcttttgatttagtaattcaacttataagaatttattctaataaaataatcagagattcattcattaatttatttaacaagttatcaaggactcactttgtgccaggcattattcttacgaatacaaatgtttattacattattttatagcatcaaaaagttggaaaaaacccaaatatccagtaagagttaacaaattaaaatacatccactagctaaaatattatactatcactagaaactatattacaaaaaaactttaataagaaaatgctcatatgagaaaaaaacaggaaaatacaaaactatgtgtaactacaggtaactatacataactacatgtataatctcaaatttatatttgagatcttatttcctagggaccttggtcaagttactcaacctcactctactcagtgtcttcatctgttaaatgaacatttcacattttacacataaaaaaagattttatatttcatatctcaatgatttttaaatgagttattcgtagatttgtaaagttctggggttttttttgttttttttttgagatggagtcttctctgttgcctagtctggagtgcagtggcatgatcacggctcactgcaaactctgcctcccaggttcaagcaattctcctgcctcaccctcccaagtagctgagattacaggcatctgctaccatgcctggctaatttttgtatttttagtagagatggggtttcaccatgttggccaggctggtctagaactcctgacctcaagtgatcacctgcctgggcctcccaaagtgctgggattacaggtttgagccaccacgcccagccttatttttatttatttttttttgcaacagggtcttcctgtgttgcccaggctggagtgcagtggtgcgatcttggcttactgtaacctccacctcccaggttcaagtgatcgtcccacctcagcctcccaagtagctgggactataggcacacaccaccatgcccggctatgtaaaattcttatactattgccccagtacatataaaactctagtaattatttgctccttttattaaacatatacatctatacttacgcaaagaaaaaatgaaaggaatatatcaatatattttcaagatcctgaattctaacaaaactaattctgagtcagtcaggaaatctgaacactgattgcatattagaaggtataaaaattattttataaggtatggcggtgtttttttaaaagtccttgtatcatagtgaataaaatataactaagacctgctttaaaatagtttggtgggaggcatttatggaggaatttttttcaaactttttttttttttgagacagactctcgctctgttgccaggctggagtgcagtggcacgatctcggctcactgtaacctccacctcctgggttcaagcaattctcctgcctcagcttcccaaatagctgggactacaggcgcacgccacaccctgctaatttttttttttttttttgtattttagtagagacagggtttcaccatgttgcccaggctggtctcgaactcctgagctcaggcaatccacctgcctcagcctcccaaagtggtaggattacaggcatgaaccaccgtgcccggcctcaaacatttttaatgttagcagaggtaaatttcctctgggtaatggaattattattagcttttattgtctttatatttttctatctttcaatttttgtatagtgatttgaagttgtttttaaaatgagaaaaaaaaatttcaaaacgttttaagaaaatccttaccaatactccatccacagatgaaactttctcccaagttaaccaagctctctctctgacatgatctggtatctttaatttctgacataatgcagtaaaatcaggttcttctgtttcttcaaactcaagcctaccaaatgaaaataatcatataattggcatatacttataaatcaaattgattcagtacatacttgtttcaatagtttgcacataacactactgtgaaaaagaacattattaaatactttaagatcttattttatcttagaaaaacattacacttcaaatttaaacatatgattatctttttcatggtcattccaaaataaggataccacacagtgaaaaatatttgcttgcatggtaagtcaaatatacttcaaagcagcaaaacacttctgtgaaggaaagtaaatgtaatagctaaagctgtttgggaaaataggataaagataacaacaaaaagataaaaacccatagataatattatacaattcaacgccagtgactttgttaaactgtagtcttctcttatcaatgtttcatatatctctctacctactagcacatcttacatgatgcgactgcttatttttgtcctttccccttaacaaagacaagcatttaataaattcttgttggctaattcattttcattcatctaatttctatgtgttatctactaataagaatagtatgaagaataattaataatttttgagtatttactatgatcctgtagaaagtaccttaaacatatggtttcactgaatcccgacatcagcccttttagataagtattctcatctgtaaaagtagacatttacagatgtctgtcaaattggagaagttaaagaacttacctgaggtctcagccggtaagaggtaaaccactatgtgagcccaacagtctaactctataatccatgcccttgaccactattctagactgccaattcctccttcaaaacataattagtttttgtttttttttcttgttttgaaatagggtttcactctgtcatccaggctggggtgcagtggtgaaatcatggctcactgcagtctcaaactcctgggctcaagggatcctcccacctcagcctcctgagtagatgagcctacaggtgtgccacagccactggctaattttttaaaatttgttttagagacagggtcttgttttgttgcccaggctcctctcaaactcctggcctcaagcaatcttcccatcttggcctcccaaagtgctggcattacaggcgtgagccaacatgcctggtcagcttttttgtttttttaaagactggggtcttgctttgttgcccaggctggcctccaactcccaagctcatgtgatcctcctgcctcagcctcctgagtagcatggactacaggtacgcgccatcacacccagctcgaaacatgattaacctttgattatttcaacaatgaatgtggtatgctgttcctagtgacagtttcccttccagctacattacttaggccagagataaggcaacagaaataagatctaaactctcaaatcaggaatggaatctgtcactggaggtgcagttggactgagccttgattccatctccaggcaagatgctcagtatcagactgcacggcagcggttctacccttgctggttaatttatagagttcaactgtctatgttaatgaaaccctttgtgggtatggataatcaagaacagactgtatcttgtatggttttgacttataagagaattttttatagttccattacttaaaatatataaaatgagttaaaaaatgaaagaaacagtcctcttttttccaagcagtggccacaacgtcaatattcctggttaccctacattagagtatgcttccaaagctgtgtgcataacatggaattctttagagtagccattactgcattttcccaagggaaatttgcaagaattggatacatcagaatttaatcagaaactaaagccatgtcttttcccagaacatgccccagacgtggtttttaattttttgttgttgttattttggttttttaacgaatatggtttttaactgacctataagacagtccatttaaatatataaatttttaatagccttccaggggccatttcctaaatcccacttcaatcttttctgccgtgaattgttagtgtataccgagtggaaagaaatgggtgagggtgaaaggatttggtgatagacaagaatgggagagaaaatagtgaaaaacagaaacaagtcccattccctctgcaatgaacttgtctcaaagtagaaccagtgctgacaataatgacaattacactctttcaatcatagctatttaaccataaagtagaaaaatcaagaaaagtaagatgttgtaatacaataaatacttcccttcaagatctagtgcattcgtatggacttgcttaaatttagattccacttaataagggaaaacgaaaatttccatttgcgcacagaaccactaattttgtgccaaaaacaaaggcaaaaagaggggacaccaagatccttgctggttcaaagtcaaaaggcaaaatggaagaaataatgagacaagccgaagccgactaacacgcaagaagagttcatcaaacaggaaaaaaaaaagtttagaaactttcaagcacttctggtaaatgtctcatgaaagttttgcccatgtttcagttcctctaaagagttacgctccatcaatcactacagatggctttgagtccccaaggcctcgatgcattattgttctaaggaaacgccgcaaagctcctgagccgagtatcctgtgggcaatggacactcaggaccctgcgcttcttgtccaaggctttctggtcggcctctcccacaaatggacttcagatgcagtgcacgcccggaagaaaatacttcccaactgttgcatcgcgtgaaccaaaacagaaagtcagacgaccaccggagtactccaattctccggtgaaaaactctcccacagacaccatttttgtatttttatttttcattttttgcgtctgatggacgctcgcaacgaccctctgcctccgagcctcacaagagggaactgcacctgtcacttcgctcaggaccctagccccacccgcccgacacctgtcaagttgaagccgagacccctcgcccaagaacccagaatcctgtcaccattctgcagacgctccgccgtggcggggggcagggagggcgcctcctcccgccgggacccggcccctggcgaggacggatccccgccgagccgccttggcgcccgccctacgcacacccggggcgcccttcccgcgtgaggcgacggcggctctgctcgctcacctgacgagaggcaggtcctccgggccgctgtcctgctctgggtcctcctcaggagggggcggcggcggcggtgccgggggttccgcggcggcagcggcggcggtggcggccgtttttcggggggttttgggcggcatgacgcctttccgcggcgggagccagcgagctgtggaggagcgccggggaggacgacgcgcgcgcacgtcggggcacgccccgtcctctcccgactcccgttacaaaaataatttcaacgtcccctgagaaaaaccggacgcgccctcccccgcccggcaactgagcgccgcgtccaaccgcgggaaaacgtcacttccgcccgcggcgtcacgtccgcgaggctcccgggcccgccggcgtctgtggggaactggggcgctggtcggtgcgcgggctgggacgctaagtcatgaggaattaaactgggaaacctggcgtgggtccaggcgccttccaggaggcatccggcgcggcccggacgtgcttctacccagaaccaccccctccaggccggggtgcacttaacggggctatacaaagagtctggtgggtgactgtgggcctcatccctatcccggggtctgatagggaagactctcgggccccgcagggaatatctggctagtgcaccctcggcgggagcgccactctccctccttgggcggcgccccccacctctcatcccgcccaatccgttttgcaaagtcggccaaaacaaaaacaaacttggagcgctgataggtgcggaactttaccagtcacttagaagatagaaaatgttagacacttgctggccttttgggatcactggttagggaaaggaagggagggagctgtggggaatgaacggatagtagtgtaataaaggattgtagtggtgtaagaacgggaagcaccgtggaaacgtctgaggaagattttcaggggagcagtagctgctgaatagaagtctgtcaggcaggcctgacatttactatgtaccaggaactgtgctggccaccttacataattgtcttatttaatccccagaaacagccttttttttctttttctttctttcttttctttttttttttttttttttactttaagttccgggatacaagtgcagaacgtgtaggtttgttacataggcatacgtatgccatggaggtttgctgcacctatcaacccgtcatctaggttttaagccttgcatgcattagctaagaaacaacgctttccaatgggtagtattagctagtctacgttgcagatgaggaaacaggctcagaggagttaatttgtccaataccagggccgatgggtagcagagaatttgaactcaattctatttgattccacttgtccattatattatgtttgatgaagaaaacagtgacagagaaggagcatgtgcaaaggcacaaagacatcagaaaagagcttgctgggactaccaccatcaaacattggcttaaagctgttatcacttctgtgtctcggtatttgtaccaatagattatctagtttgaatacatttttttttctctttggcagacactgttattgcccatctgaactcgtcaactgagaaggaaagagatggtttatgctgtgaataaaatacagttgtgctgtgatgtaaatcccctcatcctggagcagctgagcaaggtctaaggcaggaagaaccttcaagcaggtcatggctgtaagcctcctgagtttatcccagcaagttgtataagggattatctttttatctgcatattatgacatatgtgaggatgtgtaaaggtttggcaagcactggcctactcaacagccagtcctacctaacttcagaaatctttcttgtgggcaaatgtcaggagatagggcccaggcccaggtccagctacaaagaatgaatacaattaaagtgctacttccattcacctcaccccagattagtttaggcaagagctcaggatgcagttttgacatttgaaagataaggagtagtctgctgggagcctgataaattgaaacagggatggcacagttctaaatattattaaataatagtaataatattaagtattactgaggatgtgacacttctgattgctgcagccattgtaacgtgaggcaagccaacctacagagaaggtagaaatgctgatattggtgcaggaggaatttcaaaagaatctggatcctcagtgttataaatgagcctctgatttggccagccctggagctgacctaagctgagctgaggttttcacttgtttgcaacagaaagcatcatgactgataatgtttctcctgtgcttatcttcaggatagagaccaaatcttgggtatcatcattgccttagtacctagcacagtgttacacacacagtaaatgcttgcttactaaaagtagggatggcaggaaagtgaaggaaagttctaggaactgaagtaaactctcttcatacgtagatatcacttgctttatttaaaaccagtttatcaacatctagattacatttatgtaatctagatttatttattaccatattacaattatgataaagagatttctcaatttacaaaagaatatatgtcttgaccatggattaatttaactatgttcactagtatgtaaaatatattttcctgcagccataaaaaggaatgagatcatgtcctttgcaggaacatggatggagccagaagcctttatcctcagcaaactaacgcaggaacagaaaaccaaacactgcatgttctcacttataagtgggagctaaacaatgagaacacatggacatgaagaggggaacaacacacactgggggattacttgagggtgtagggtgagaggacagaagatcaaaaaactacctatcaggtactacacttgttacctgggtggtgaaaaaatctgtacacaccaaaccccagagacacacagtttacctatataacaaacttgcacatgtatccctaaacctaaaataatagtttgaaaaaagtgtggtgtatatatcataatatatacacataaatagatacacacacacacacacacacacacacacacacacacatacacacatacataccataaaatagacccaggaaggggaacaacacacactggggcctgtagcggggaagggtggggagagggagagcatcaggagagctaatggatgctgggcttaataccatggtgatgggttgatctgtgcagcacaccaccatagcacacatttacctgtgtaacaaacctgcacatcctacacatatacctgggagcttaaaagttgaaggaaaaaataataaaatatattttcatccacacaactcagaagcaattgagttcaccatcaaaatctttagttttctgttgcattaccaaagaagtattagaatttcggcagagtctagaccaggtacggtggctcacgcctgtaatcccagcagtttgggaggccaaggcgggtggatcacctgaggtcaggagtttgagaccaggctggcaaacatggtgaaaccacatctctaccaaaaatacgaaattagctgagtgtggtggcaggtgcctgtaatcccagctactctggaggctgaggcaggagaatcacttgaacccaggaggcagaggttgcagtgagctgagatcatgccactgcactccagcctaggcgacaagagcaagaccccatctcaaaaaatatatatatatatatatatatatatatatatatatatttcagcagagtcttaaaaaaattccccctgaacttcttgaaattcatggatctcttccaacctgcttggtaattttaagaagattgctgtaagactcctacaaaaaatatatgtatttcttagattttctatctagagagggaactctcttcagtttgagactccttcagtgatattaaaatttggggaagggtctaaaaagtcttcatcgttctaaaaagccttccttcaaagtttttatacccccaagctaccacactatttccatttcttaaccatctagcttcttagaagggtagtccccattggttctctctgcttccccaatttctcagcctgctggcccctggctttctttcactaccaccaagagcccccttctgaaatcactctttcaaatgtcactgatgatagttgtcaatcccatggcttcttttggtcctcaacctacttgacctttcttgcagtcaatatagttaaccacttcctcttaaaaattccctagtcttccacaaatctatggtctccttgttctcctcccttgttacttcacaaattccttcattagttctctttctgccggtcccttcaatgcaagtgctccctagagtaatgctactcaaagtgtagttcttggaccagtgacagtctgcgaactgtttgtgtttagtccacaaggaaataagtacagaaattaaaaggataagtgcttagcagtgtttatatcaatttgacatttcaggaatatccgagtgcatgatcattggacattgcttgttaaacagttcaggtattcttcaacctggttcttgagttgcaggtggcatggttgtgtccctgtcatatgcaatagtacgatattacaatgagtaaaatttcaaggtttgtcacctgcaacccaagagtaaaaatctatgaaaatgtaaatatttatttacttatataacttgttatttttacaatcattttcatttttaatcaagcctattttttgtaaattcttagctaaattaggggagtaaaatttgtgtcatttgtttttaaccctaaattatagatggcaaaacaatccttactgtccaattttgccaatacaagacacacatcagtaatgtgttagtaatcacagtagtaaactaaataatgatcagagaagtaattccaaagaattaaacaaataggagtttgtactaattttactcagaagtataatcccttgttattgagtttgtagccataactcatagtgaagtgctaaaatcattacagactaatgaaacaataaagccatcaaacttaaaggacatttatatacaaaatattaaaaaactaattataaatttgataaaatatctgagtattttctatcaaaacaagctccacatgcaagaaattcatggatccaaaatccgtttatttcattgaaagataacttgagtgacagtttttgaaactggctactgatgaaagattgaagatgaattttgaaaataacgcattgtttccatcattaaggataaaagttaaaagtgattatcctgatattgttaaattgctttaagtcttcttctgttcccttcaacatatttttgagagactagtttttctactactagtgttgttaaaataaaatataaaaacaatttagatatacatcatctcctgcaagtagcatgtcaccaatccaacctagattagataatttaacaagcaaagagcccactcatttctcacattaaaacttcaaatattaacattcatgttgtttagtgggaaattactacttcactcccaactttttgttagttgttacggctgtgaggtgataaatattaggaggataatggcaattctctttattaattatctatctggacactttcaataagcaatgtacattttgtaattttttcttttatttatgtttgttctgataatttttattgaaatgtaattctatttctgtttaatctaaaaaatgtgagcttgtacaatatttggtgtgcctctgttttcattataattttttgcaatttgtttctattttacattccaaagtgttaatatcacttcatgacaaacagttaatgaaaaagaatgaaaagttccttcacagatagtgtgggaaacactggtcttcaagcgtcttcaatcctcctctcttcttgctctatttcaatcccatgacttaaataacttcccatatgtgcatgttagattctttcaggtttcaaggaacagagacctgttcagtttatctgaattattcaaggttaataataaggtctgggaggaaaagtaaagaaaacaaaaaagaacccctgctgttccactcatgtatcttttcatcccccagcagcagactccactccttcccgccattgtgaatattatcatcttcatctttttatactgtactacttctgctacactgaccttctctccatgccaccaaaccacactcctaagtgcagagaatatgattgattctcctactataccaatttccatgagcaggaccaattacataatttgcagggtccagaggaaaaaaaatgcagaactcctcattgaaaaattactaagaatttcaagatggtggcaacagagcattaaaccaaccacagggtctttctaacatggagaactaagtgactacacaggctacatgtccacgaagccagacagtctctgaaggtaggtctatatctgttctcctaaccagtggggctgcatgcctaacatgtgcctggcacatagtagacatttgacaaatacttttccaatgaatgactctaacaacctcattttaacttaattacctccgtaaagaccctatctccaaatgcagtttcattctgaggtactgggagttaagacttcaaaatataaatttgagggaaacagttcagcccatgacacctggggcaagaatgttggtgagactttaagctctcttctgataaagaggctagatatttctcaaaacagatggggaaggagattaaatgttcaaacaaatctagccatcacaaaggctctggctcatttctggggtggtggggcgggtaacagaggtataaagataacaggcaggccttttaaaaaaagaaaaagttaaaacattttccataacgtttgtattgatccagtattctcatgtcttcagtgcaggctcaactctgcctggcagtggcaagggccagggccagtgactgaagcaacaaactgccagatgactgcagctcaagccaatgcacaaagccactgcaacaagagaggaaattcttccatttccaagtgtgtcgatttctccccatcaaggaaaacagctaaggcaatgtgttgatattttctttgaccaagtcatcaggagtcacatagacatacagcactcaagaagtggctgtaactaaaggcacatctcgttcatctacaacccttgtaatcccaacctttgtctgatgcacaaacccttccctagttctccccaccaccaccactgcacctccaagtggggacaacgaattgtttcatttgcatgtggtttttctcatgaaaaatatcattaacatgagacagccccaaaccaaggaaaccagaagtggggtttgtgcttggtcttactgagagctttccctacttgaccagaccccagcattgttctagatttgtctcttgtgggctacaggaatgcaaacattttgtagtttcctcttttttgttttcttaatggcttgatgagccacacatgtttctctaaatgcatgattttaaattcacacaatttctgccaactaaacttaatgcattctcctcctcttctaatcaataagggctatcagaatgttttgggtgaagatgagcggaaggtaagaaattacatactgtgggccaggtttggtgactcacatctgtaaccccagcactttgagagaccaaggcatgcagatcgcttgaggccaggagttcaagaccagcctggccaacatggcgaaatcctatctgtactaaaaatacaaaaattacccaggcgtgatggctcatgcctgtagtcccagccactcaggaggctaaggcaagagaatcacctgaacccaggaagtggagtttgcagtgagctgagatcacgccactggactccagcctgggcaacagagtgagactctgtctcaaaaaaaaaaaaaaattacatactgtcgagtatgacctaaaaacatagagagactatatttcaatagtatgacaggattatgttagctgctaataacagaacccaaaataacaatagattaaataaaagattagtatcccaggtaaaagtctagaggtaggaattctaggactaagtgaaggttctgctcagtgaagtcctcagggacacaggcaccttcagctcataactctatcatccctggagggtacttaagggtccaggatggcagccaaaagtcgtacctacgttttaaacagcagggtgctggaaggcataaagaaaaagccagaggcacacgcctgttctcacttaaggaaaattcctggaaactgccacaatacaccttcgcttacatcccattgatcaaaacgtggatgcaaagccacaccttactgtggggtacagggaaaaaaaactttttttgacaatcatgagttcattaacagaattcagggatctcttaatacagaagcaagggagaacagctgttgggggaccaccggaagtctctgctctaaagaacaatgtaaatacctggtggtagactaacactgatggcctacaatgaatcacacctactgacattcatgcctttgtgcagagttccacactgatgctgggcttggccttgtgacttgtttggccaataggatctcagcaagcaccttgataagtgcttgtgcattagggcttgctgtcctgaaatccaggtgccatgtaagaagtgtgggttagtccctatgaagatgacagaccacatggagaaagaggctgagcctatacccacccacctaccagagaagatcagcagaagaaccagtgaatcattattgctttagtcattaatttgggggcaatttgttatacagcgatagataagtggtacagtacatagacaaatttctgcagttcatcgagcattagcaccaaataagtatacaacagtgtttggagcactaaagagagtataaaatattgcttaaaattgtttccttggcctcatgaaacagaaatcggctctgattagcaaccaaaaaatgagaatttattggaagaacactaaatagaattaaagaaatgccgaaaaccaagattcaagaagggcagtgtggtagacatatcaagcagtgtatatgtcacctataagccaaacagcctggcctaactccagggtcattgaccacttgttttccccaactgccaccatagcaaccaactgtatgggccctgcccagagactactgaagcaacagactttacattggcacatcccagtggttcccctccctttccccaagccacacacatctcacctcccaccccaagagggctgagatagtgcctaactgttgggcttctaacaaagtgtagccgtaagtgcagtggagttaatgtccttggggtaaatctaatcaaaacaagatgggtccagcatataaactcctctccttcctccacccagacagattgtcctgaaacacagtagtccatactacctctcaaaatatgaccctcatgatactgaccaatcacccgggcttgataccaagaggtagctagttcggtaatacactattttattattaatagtttctcttccttctttgcccagcccgttcgtcttcactccagtttctctcaaactacactcaggctctgttttctacagaacccaggctaaaagacttggcaccaggagcgtcctgcagacactcaggatggaatgctagagttgggttacttaccgaccgtgtggcaataaagacccatggcacagtgagtgggtagttatgaagcaacacagtgataccatgattacaaaggcttcccacctgtagctaattgagatgcagtgcagatagaaggtggggcattgggataggtagtagccatactgtttgaacagtgtggggacaataactgtaaggactatagaggggcttgattctgttgatggaattgtataccttgtaaaacaaaatgatgcctcagggcagccacctgtcaccttaagtcacaccgtgaaggccagagggcctctactggcaatttttagtaatatttagtgtagtttgctttaggctacaggaagtcacggaagctgattgtaagggcagaagagttgaaaaggcaaccaaatgcatggactttcagggtctcctagcccacatcttgttcttgaaaggaaaaagagtattaccctaagacctaggatagggcatttggatagatgagcctgagaatattgaatcttctatgttacccctgactctgtaatgtactggaaagaaatttaacaaccagttctcaggggagagggtggtggggaaggacattttaatatttgccaatttctgttatgtaaacactcccaccttggtcaatttcaagctaccagcataatgtcaccaaacacagaattaaaaagaaatgcacacaaatggcttctgcaaggtggaatgtgctcactgcagcccactagtgctctgaaccctctggctggcagaagcaccacctcaagcttgagaagtcttctcttgcctataagttatgtaatgactccttttgataggtggctccccaaaatgactcgtggccatttgctaggtgagagcatgcagtggaagaaagaggaatatcaagtattcaagaactgttagatacaaagtctgagctgaccctgataccaatgtaattctccagttagaatagggaccagtggagtttgggctcaattccaactcacagtggatctgattgcccatgaatgcattttatgtttaaatcactgaatgtctaattaaggtagtcaatcttagctggcaaaaccttcacattggctccctgacccatggattaatagtcattatgtaggaggaccaagtagaagcctttgaaactgccactgtcaccccaagtcaggatagtaaatcagaagcaagacagcattctaggaagaattgcaaagatttacatcaccatcaaagatttaaagaatgcaggggttgtagtttcccttatattaccattcaattctcccgtctgacccctgcaaaaaatgggatcatggcagatgacagtagacaactatactcttaaccaggtattagctccaagaggcgctgccatacagcatgtggtatcttcccctgagaaaatcaacattgaccttggtatgcagttactaacttggtaaatgtgcctttcttgattcccatcagcaggaaggatcaaaagcagtttgccctcatatacaaaagataagaatacacgtttactttctggcccagggctattttaattctcctgctctctgtccgggagggagtacaaagtacaaaggggcaaatactctggatcagtgcttctgaaactctccaattctttttttattttttccaaactgtcttggagcaatacttttggaaataactgaacttgaacagtaggtatcttgctgcatgtgcaaatcaccatatgagtttgacaataatcacaatgatctatactttgttcaatgagattagtcttctgatcatgtgcttggaagtcacagcaatggcaaattgctataaaatttctaaatatagattttcaatttatgaatttatctttccacaggctagtaaccaagtgttcaccagccaacatctgtctgtagactacactttgagtagacaggctaagtggccagtaaaatacatgtaacccaaagaatgggagataaactccaagataattgagggcttgccacattgatcaagttgttaagattcagtgctctgggtatgctgggagcatcacctttaatgtaaatgacaatttattgcacttctcaccccctgccactaagaaagtggcttatcacttagtgggcctcctctgattttgaaggcagcatgtactgtctttgggaatacagcttcaacccatttatcaggagacttagaaaatgtccagttgctagtgggtaccgtagtcagagacatctcaggattagctccaggctgtggtgaaagctgctacttgaactatataatccagcagatccagtggtgtcagaggtatttgctgtagataaatgctatctggtgtccctggaaagtcccaataggaggcacacccctgaggttctggagcaaggccataacttctgcaacagagaattattttctatttgaactgcaggcagcctctaggagctgagggtgccctccagctgacatccagaaagaaattgaagccctaggttgtgaaaccacaaggacgtgaattctgccaacacataatgtgagtttgaaagcagattcttccccagttgaactaccatctgaaaa

SEQ ID NO: 71 - DNA, 154290 bp, Mus musculus
tcattcattcattcattttctctccctctctcacacacacaaaatacaagtaaatagaaatttaaaatcagaaagagaagaaacactgctagatttttctgaagccactgtcactttaatacccaaaccagacaaagacacacacacacacacacacacacacacacactcacacacaaacacacacacacacactcacacacaatttccacaatgagcatagatggaaaattcttaataaaatgcttgcaaatcaaattcaagagcacattaagaagtgctaagagaactatgactaagttcattttacggcagggatacaaagttggttcaacatatgcaaatcagtaagcgcacataagtaggcttacagtccttccatttccatcagggctctaacaccatcaaaaagttcaacagttgttcatgatgaaagccttgaagataccaggattagaaagaacataagtcaacacaataaatgctatgttatgacaaattcataaccaccattgtgctgagtggggacagtgagaaagcttcttctaaaatctgaatgagacaagggtacagtctatgctttccattcgtgttcagtatgttattattaaagccctaagtggagcaataaagccaagagagacaaacagaaggtacatacacaaattgggaaggaggagtcaaatggcccatttgcagatgacacgatcctatacataaaagactaaatatgccagtagaaaactcttagaactaatgaatagtttcaacagagaagcaggctgaacttaacatacaaaaaaacaaaaacagtggtaatcctgctgagataactcagtgggtagaagtgcttaccatgcacatatgtaaaagccaaatgtgcacagtgccagtgcctgtaaccaaggactcctgtgaggaactgggaagtggggacaagagcatccacaggaacctgagggccagctagtctgtgtgcacagtgtggagaacaacagagaccctgccacaaacaaggtgggagtcgagggaagaatgggcacctaagattgtctctcacctttgtcagcacaaacacagctctcacctcaaagaggtttaagagatagtttatcctagagccaaaaaggattggccatcccagacaccgtgttccaacatgttcaatgaagtttttatgctaagagaggaaagaaaatcacagtacactagcggtatgactctgctgtctaggcagtgtcccctccctccctcaactttcttggtaattttccttcagggtccgctgctccaggctgttctgtgttttgcgtctctacaactgctttttttgagtggcttgatagagtagcatctcactgatcagctagctggagctcgctcagcagctttttaaaaactcatcctgacacatactggagattactaagaatccatgagagtgctgaggatgtaaggagcaagatctgttacatcaaaggtttggacagggggactggagagatggctcagtggtaagagcatttgctcttctccccgaagaccagagttggagtttcagtgcctacaggtgactcataacctctcatcaactccaagaggatccgatgcctctgacctctgagggtgcctgtgtgtgtatgcacacacgcacgtgcatgtgcaatctagaaataataaaaataaatcttaaaaatagtttgggcacgggcatacttgtatgaccagtacctcaaacacaaagcatgcccaccatcactttctccaaagtaatgtccaccttccctgatcagagcacccattggtccagagcacccattggtctgtctgtgctgtgctggtctgtcttagagtgtcttaaaaatgggttcatatgtataatgttccttttgtgctgtttttcttggtttagcaagcctttcagatttattcatgtttggagagtttcaagagtcacttccatttaaagctgtattctttgtgttttattaaatgtcagaattgcttcatctattcttttcagggcaggtttttaagctgagttctatttgttaccgtaacattctttttagaaaccaatccggcataaatatgcaaatgttcttctgtgaatgcagctgctctcacagcccctgtacaccaagagggaaacgataaaggtcatgcaaatgttgacattctctcctttttagttttaaatggcacttctaagaggaggtaactacaacaacaaaaaattctaatacagcatcttaattgtgtagcgcttccaaaaagtaaactgacattatgctaaaccacgcctttgttaaggaccacagacgcatcctttctatttgaagaatcggtccactggcgtgttctagcttctgtccagcactccacctcaagacctacgagggttgcaagcccgtatgtaatgcaaacgttaccaccctgtaacatcagcagactctggggaaatgcaatcctgccgccggggagggcagtgatggttgcctcactgccagggacacgaagcaactgtggaagagatggtttttctcctctccagaccacaacacaatgcgctgtttttcagctttgacatccaagacaagcaccggtcatctggatcttgcagatggcgcatgcgtggcactccaagtcccagctccacagggcgaccggctccattttttgagagaacattttgtgtcccctcgcaccacctcaggcagccggtgttcctggagtgtctggactttacagggctcctctgttccacccagggtgtggaagtgccttcatccattcttgtattactatttggtttttaaaaggacttttaattataataaataaaattgttatgaatatactactaatacaagtcaacctgtttacctcttttgtgaggttgtgaggtcatattattggcttgtgtttagtgttattgaaagtcaaaccatgttctagagagagtataccatttcaccaggtagaaatcttactaccagcaccaccaataccacaaacagcagcagcaccacaagacagactaaaccacacatttttttttttaacctcacaatttttatgggtctgggcacagtgtaataggtccctttcaaggttccaattaagacaatagtttagaatggattctcacatggcacctcagctggagggaggacctacttccaaaatcaggtcgttggcagaatccatgtcctgaagtcatgactcgggacttcaatttcctactggatatcaggagaatttgaaccctgctccgagaagctgcttgtaattcaaataaaaaggaattcgtgatgggcttgtgctttgtctcagcagttaatactcttactgcataagctgaaggatctgactttaatccccagagccaagatggaaagagagaaccaatttctgaaagatgtcctctgaccaccacacatgtgctatgtcatgcacacatgcacattggctactaataatattaaaaatcaattaagaaggaaactcagtgttgtaaaagtaattgctttgctccaaggtgcaccctcaggggtgtacctcccatatgaatttaccaaagatgctcagtaacacttatctacagcagacacccctggcatcatcagagctctgggttggatagatcttggcagcttacacagcagcctggactaagagaagtgtctgactttggtatttatttgtaactggaagctttctaagtcacatgatgagttggtttgagtttcacttccctctgaagatgcttactaaaatatcatctcgctcttcagtgtcaggatgtgagcggcacaacttctcctttacatcaaaaactatgttctcagaagatgaaaagcatcgactccaacttccatcaatgagatgggaccttgaagatcttagactttattttctgtgctttggcatatgccatccaaagtgaactttctgagaagtgttggttggacttgaatagtagtccaaagaaaaatgaaccagtaaattaaaattttatggctagaaagtttatagcacattatcagaggattcactgaataagatacagttcaagtggtgggagttcaatattttcaaacatttcaccccaaatgtctcttaaatcttatcttagatttcccccaccccctgccttcaatgaacatatgtggacctacaagaccctgaaaacctgtgtttcctctcattttgcctgttcttacaatcagatcctgtgcctgcgtttaggcttcaggaaattagactgattacaaatcgccagtacaggaaagtgattttccagtgtgttttcttacagtgacaagctgctctgagatgtttgcaaagtatacaactccgtcaacagaattcagcccacttcacaactgttctgcttgttcctgtactaatcaaacatcatggccaccacttagtccacctcctacttgcgctgcattccaattagctgaaggtgtgaaaccttagtaattgtattactgtgagttctgcctaccattcaaggtaccagaggcctctattgtcacaggattagtgagtaactcagctctaatatcccattctagttctcaaaacaaatcgttgggcagtcttgttatcatgcaagcgttatgcagtgtcctaagggtcagtggactctccttgtgccaactatcttagcttacactctctaaaaactagagctcaagggcctggagagatggcttggtagttaagagcactggtaaaaaggtcttcttccagaagacttgggttcaactcccagcacacatagcagctcacaaatgtctttaactcccattccatgaccttttttttgacatatgtgagcattagacatacaagcaggcaaagcacccatacacataaaattcacatttcattgtcatgttgaacgttgggcactatctagaaagggcaaagctgtgagttcaaggtgcctgtgtccctaagggctatgctgaacagaaccttcacttaatcatggtactcctatctgtagacatttactagaagtaaaagtgaccttttactacattgatatgtgggttctattattgtcagctaacatcactggagttaacttctgcactactgaaatatgtctgtcacctatgtgcctttagaccatactctatagcatagtatttctctttccactcacgttgcctgaaacagaccaaagcagcaactcctcggttacaatccaagccaatgaacaaagccacttcaccacagggagaagccttctacttgtaattgcagtgatttatcctcaagagggaaaagtaatgctatggcttaatgtgtccccacaatttcatatgctggaaatgttgcccttaatgtggcaatgttgaacaatggatcttgaagaagaggtcatgtgactgaaaactgtcactcattagaagaagaggggactataccagttttaactggcaaccattagatacactgaaatgatggagttaaaagaaacatgtatggactgtcaaattattaagacgatgggataaaatagagaaaactacaaaatatttttatccttataacacaaaaaaagagaaatctaaaacaatagtggtatttttccaagcaggaaaaggttttattgtcacccatctgttggttgtcttagttaggacctacctcatgttaagaatggtgagaagagccacctgtaaatgaaaagactaattggatcccgttcttcacagcagggctggtggcgatgtggggagaactggggaaaattttgtgcactcaagaatggttgctcttaataattggtaaggaaagagatgtgtcttcagtcccagcgcgtaactcatgattaggttgtagaaaatgtcaataaactcactcagctcttgtcttggtctatcataatgttaggacaaatatcaaagggtgtgtcactcttcaaagtctcagctcttagcataggggatgaagttcccaatgtatggattttgaggggtacatttaaaccacaagcaactgcttttcttcatgggacaaaaccatgtcacttggatgtgggaccgtttcttcttgtagtgtagtaactttgccggcttgaactacagtaatccagcagcttgctttggtcacccttcctggccctggccactggcagggaagcgctgagcatgcaatgagggtgttacaatgtgaggccaacacaaacattatgataaaggctttttcctttcttttttttaaagcctgcctgtcatctttatccctctgtgcccttgagatacaagttagagcctatgtgacagctagatacatgtggatatttaatgtcttccctcataacctttgagaaatatttaccctctttattagaggagcgcttagagctatgtcaaaaatcacttccacaaatattatgagccgagctgtatttcttccaatcataatgctggcatctcgacttcttctttacgtcagaatgtgattgtatttggagataagattaatgaagtaaaaatggggttgttagggtcatttatttgcatactttaaacttctgcatcatgtgccaaggccagcccaggcctggggatacatccgtctgttcatggctgtggatctatcttcgctgattggctggcttcgtgcatatcttgagctatgaaatcatgctgtacctcatgctagatcacagcattaatcttaatagttttaatgctctgatgtcacgatcttgaaattcttggtaacttttaaaagaatattattctttttaagttttttaattttcactttatgtgcattggcgttttgcctgcatttatgtctgagaaggtgccagatcccctgaaattggagctacaggcagttgtgagctgcaatgtggatgctgggaattgaacctgggtcctctggaagagcagccagtgctcttaacctctgagccacctctccagccctcttactaattttttgttgttttgttttgtttttcgagagagggtttctctgtatatccctggatgtcctggaactcactctgtagaccaggctggactcgaactcagaaatccgcctgcctctgcctcccaagtgctgggattaaaggcgtgtgccactactgcctggccctcttactaattttaaaacagggattctatcttttcattttctctagaaccttggaaatgacgcagcgggtcctgcagatggaaaccacaactttgaaggaatcaatcctatttttttctactgaggtgtgtgaactggtggcatggtgggggagttgggtagggggacaatgactataaagagatgaagaatgacattcagcacggggaggaaggggtggggggattggctgagcactcgctgtcatcacaggagtacaggaagacacagagagggctcctgtgcccttgctcttgtccctttaccctatcccagctcatcaccagtctttagtaacggagataagagtagcaggtctcctttcccaaaacctgaaagaatctaagaagtacacacataagggacgtgagtcctgatcctgagtccaccgcagagagcagaagttcttcagaggtcagttgtttcccatactctgcacagaaactgttcattcctttaaaccttccaattgtcttgaacttttggaaagtgaaataaaaacaaactgttaaactgggcataattccagcacttgggaggctgaggcaggagggctgccaggaatttgagacaatgggctacacagtgaattccaggacagctctggctatggcatgagatcttgtctcagaaaaccacagtgaattgccaggaagagaaaatgaaaacaaataacaaagacactctaaatataaacttagatttttttctcagattaaccagaaataaaactacatttaacaaataaaactggggcgaacataaaatgggaagaagagaattacaaaaataactttatttaatatgtccatacatataagtacagataatgtgagaagtgagttgtgttctttgcttgttaaaggagacattttagctacatttaggttgcttagattgatgacaggctacttgaaggcaatgcttagctaaaatgtttctgtatttttttttttagtaacactatcattactacagcaacctttctctcaaatgtatgaaggcaatgggagaagatacttcagtcaatacttacttttttttcttatgcatgtgggtgtttttcctgcatgtatgtttgtgtgccacatgcatgcttcgtgcctgtcgaggccatacaagggcactggagtcctagacctagagttgtagatggttgtgagctgctatgtgggtgctggggatcgaaactgggtcctctgcaagagcagtaatgctcttaataatctctccaccaccacccccactccgggcaataaacttttatccacaatgaaggaagcaatgctttattttaaaaggttatccttagtcttttattggcatcctgttttaaaagctggctcacaggattaaagctctattttaattgttttacagaaaaagaaagatcctggccaggccaggccaggtgtatttcagcttttatcccaacactcagaaggccaaggcaggtgtacttctgagttcaggttctctggactaagctgggtttcggggtctctggcctagactgggtttcggggtctctggccaaggctgggttttggggtctctggcctaggctgggtttcagggtgtctggcctaggctgggtttcagggtcactggcctaggctgggtttcgggatctctggcctaggctggattttggggtctctggcctaggctggatttcggggtctctggcctaggctgggtttcggggtctctggcctaggctgggtttcggggtcactggcctaggctgggtttcggggtctctggcctaggctgggttttggggtctctggcctaggctggattttggggtctctggtctaggctgggtttgggaatttttgctgtgaagcttattttggtggaaagtaaatattcaaaatggttagctaatccttaactaatttctttctattttagacataattatcattcaaatttggtgcttttattgccattgctaagagctatggctacaaataagtgggagactgaatttatttttattttgcagtacgtgagactgaatctggtgcccacacacactagacaagtattctgagttacatcccagcctggcaccatcttttttttttttttttaacttttttttattttgagagaggatctaattgtgaactcactcttggacccaagcaggccttgaatgtggaatccttctgtctcagcctcctactagatacatgagagactacagttctcagttaagtcaggagaaacccataggacttcaattctttggaataatttctgtgactattgtgaaatctactactactgctgttactaatacattacagatgtgtgtcttttactgacaaagtgagacaggctttgtttaaaaaaaaaaaacctactataaaatccaaaagaaatgacaaaacttttacatccttaatttagccgtgagttttcaaaaccacgctcagttaaaaaaaaaaaaaaaaaaaagaaaaggactttgaaaataacaatgaatacttatattcttacagctttctacttattctgagtagcgagggtcaaactcaccttaaagtttccctggcatatgacaagagcacagccatcccacccaacagccccacacacgctgcagaccacctgaagacctcgagagtctgaggaaggaggtgtccaatagccaggtggcaaactaccagaaacacaaacactttaaatgccttttcaaattccttccctgcctccatttctccttcaccaccaaatcccctccgcacacaccccctctcctgggctacattcccagcgctgccccatttatttatttattttttgaaacaggtttttacattcatgatcaagaattgaaaaaaaaaaactcatttgcaatcgtattgatgaactaggttcaaataaaacaagtcatatctacacatgcagagctaatgtaagtccccagcctttccttggctgtcctgtgttctcatgtggccaatgccttattagattctaaggctgtaatgatgtctctctctgtctctgcctctgcctctctctctttgtccctgagtattggaatcactgttcctcacatgctaggtaagcattttactattaagttatatcccagacttttcactttttattataaaacagagtcttactaagttgcccgggttggagttcaactcactctatagccaaagcctgtcttaaacttgggattttcttgccttaggctctgagcattatgggcctgagctaccaggtcaggctcaactttgatctgtgtgttgaaaggggcttatgggggaaacatgttacaatgacttctgacacaaatagctgaccatcagctgatttgaggtcagtaccagcagagatgaccggtcaccagctctgttacgcgtctgaggacccaagttcctttgccattctgtctcaaacttaagagtagcttgccacaaataccaaggtggcatcaattggccaagtgtcacattctctgataattatgaggcaggactgtatcatttctgtatattatttgatcaggctcccacagtctatcttttatcttcaccaaacctagactgtatgtagcctgagctcttgcctaaatctgggacaaagtgaactcaagtgctattttaattccattcattctccgtggctgcatcagggcctggggctctacctcctgacaaacatttggtctctagaaggcttctgaagttaggcaagtctgaaaattgaaggaggcccatgtatccttcactcatctgacatcaaggcagaaaataagcccaggcttgcaacctacccaattaagttctcgattcctcagtccttgctcagctgttccaagatagtttacaccagaacaacaactgtattttattcacagcacttcaattagtgagttgtatgaataaggactgacaaagggagaaaattatgttgactgacaggtaaaacgtaactagaaaagctaccattgctgagccagcttttggtggcggtaggtagttctagtataaagtatgctcttttccggtgtctgtgcgtcggcgacatggtcagacaaatattacttgggttcgagtcctctgccagggacctgctatgtgacgcgggcaaattggctccccgaactccccacttccaacccgcaaaagtggaatgccgaccttcccagtttgaccggctgtctcggagaaaccattatgaaaggaggccggatcgtgcgcatgaacacggccaactggttttctgctttcgtctcaaacgcgtttgtaagcgatttttcaaagtcgggtccgcctggcaaactggttttcaaaagctactttcccgctaagatctgtcccgctcggaccgcgcctcctgtttccccatcaaaagactatagtctgtgcgtgcatcgcccatcttcccttgtctccagaaggccaccaatggccccaccctggaccgcccacccgggccgagcccacctcccactggcccggcacgtttgtttttgttttgccggccgcgcgggccgggcgaggggcgcgccctgtccagcgttctcccagaggccgcggctcctcgcagcgggccggccccgcctcggctggcgccgcccacggggacgacgcgggcggagacaggcccgggcaggcgcggcttccccgcggcttcccgcccgcgccctcgccctcgccctcgcccttgcccgccgccgccgccaccgccgccccggttccccactgacgcccgcggcccgcgagcctcgcggacgtgacgccgcgggcggaagtgacgttttcccgcggttggcccgggcgctcggttgccgggcgcgtccggttttcctcgggggacgttcccattatttttgtaacgggagtcgggtgaggacggggcgtgcccggcgtgcgcgcgcgcccgcccgcctccccgcgcgcctccctcggctgctcgcgccggcccgcgctgcgcgtcatgccgcccaaagccccgcgcagagccgcggccgccgagcccccgccaccgccgccgccgccgcctcgggaggacgaccccgcgcaggacagcggccccgaagagctgcccctggccaggtgaggagcgcggccgccgcgggccggagagaagggaagggaagggagcggggacgccgggtgcatcccggcggggacgccgggcgggcgcatctcggcggggccgggctggcggtaggagcggcgccccgggtctccggggtccccttggtcccccatctctgcgggggtggcggcggcgcgctgacacggtcccgggctcgcgggcgacggggagggcatcccgaaggggtctgggctgcggcttgacaggtgtcgggcgggtggggctcctgctcccgagcgaagtgacaggtgcaggctctactccagcgacgcccaggcgcggagccggcgggtcccggagagccccggtcagatgcaaaaacaattgaaataaatatttaaaaaaagaaaaaaaaaactcgaccggtgtttgttttctttcttcctcccttttttctccgtggagatccgaagcacccccggggtgggttgactttctcttttgcagtcgtcctgcgatgcaacagttgggagccttgccctctctgagcttgcgctgcatcggcagcttggtcctgggagaggccaagaaaagccttgtaggcaaagcgcagggtcgtgggtgtcaattgctcacggggtcctcagctcccgggctttgtgggggtttctttagaacaatgctttgaggcccggggggatttaaagccatctgtggagactgatggagcagaactcttagaagaactggtatgtgggcaaaagtttcaggagacatttaaatgcaagggcttggaagtttctaaactttgttccccttttttttcagggtagaactcttcttgcgtgctgattggcccgcagcatgcttcattatttcttgccttttgcctttgagcattcacggattctggtgcctccccctcccttttttcttttttggtcttgtgtttggtactgtgttctctcaaagaacttttctctccatttattaagtggaatctaaacttaagttcatgtggatccaataagaacaacagagagatatttattgtatttcaacattttttttcttgactgtgctactgtgtgattaagtaacagaaattgaaacaatatgattgttgttattgtcagcactagttttgagagtatagatccattgtagatgggagttgtttttgtctctcacggtccttcaatttctagcccatcattaagttctcgagtttttgttgttgttgttgtttttgtttttttgggagggggtgtttttgttgtttttaattactctgactctgtaacccaggcttgccttaagctctctgttttactgcctctgcctcccaagttctgggattgtagccctgatgggctatcaagctcctttcttctcattgagcatcaatcaaggctctttgtgagacccagactcttaacagagttcaggtcaaatcctaagagactgaaataattttggaaattgcttgtctaagtctattaaaattcatattagatggattttcttatggaccaaataaaaatcatgttcttaaaaaataaatacagaataaaaactgttccaggggaagagtttgcttttgtttctaattaaactctgatgtatccagtgtgtggaagcttcactttagaaagagcagtaacatgtattctaaaagattccatgccatctatggacttattactgattattgtagagtaactgtacacattgaagttctggtcattgcctgtgggaaagacagacccagtttctttctcttttatgtacttttaactttggagaattctcaaaaagttctcctttaaattaaactttacaagacatagtctcatcttggttactcattgccactaaggttctcaaaaagcacttacagttgatctctgacttacctattgtcacgtgtgttcaccatagggatttgctacctcttctgaactgccattaaatgaatgttgtgttatcattggagaatacacttagacaaacactgatgatatatagattagtcactgtgctgtcttgctacaatcaagagaagtggtaaacactacagatacaaagctgctgccagtataacaaaacatgctgctatgcagtaaactttatcttttaattatagaaatatgctgaaaaataatgataaagctatagtttagtaaacacacaagccagtaacataatggcttcaggcattgtatgtccttgtatatatgattctctcctaccagtggcagcttgcttacagcagcatctccctaactgcacaagtagcaaatggattgtgccacaatgttatgctggttaagatgggctctaagtgatgtttctgcaccattataatcttacaggactactgttgtaaactgccttactgagtgacacatcatgtagtgtatgcctgttcttagcaaggataagagggctgcctcagtctgaagcttagaaaatagcttaggtatggattcaacccggtccgtctccactgagaataagtctgctttgacagctggggtgttatttcttttacactgtctctctcctaagtactacatgtggaagagaagctgagactaggagactgaaacacttgcgttattgaaatatgcagacgctaattatgcttgaagaaggagttgcccagctggaaaagtggtcaggagcacagatgatggagttaagactcatggttcatacctgggtaatttccacttggtatgcctctagtgactgctttaatttccctaatatggtagatgtgtaaaacatgaatgggaagacttaccaagtatggctgatgtggggactcaggaaaaccatgcataggatcatagtaaaatttcaagaattaagttgctcttcctagtgttgttgttatatgtcaaattgaaaggaattagccattaaaagcttacagttaagaaaggtcaaagagataggactgaaatacgtgatgcaatcatttctatcaagttaatcattaagaaatacaggaaggtggagagaatgtatggattgaccagggtgtggttttttcgtttttgctgtgacagttccgtcttcccagtgtgctttagctagtgcacttgctgtgtctcacaatgctgtccggctgctctggagtatatgtgcttcaccatgctagcagctcttcttcactttgtgctagtcttatttggaaaacccacaaaaaagataagcatatgtttaaatgatgtgtaatggttctcaaagataaagtaagaccttaaagcactcagagatgttctctttcaaaactgtgctggtgtgtgcaaactatagaaacaagtgtttgcttaattagtttgatctgcaagtgtatcaattttgtaactttttaatttgtaggcttgagtttgaagaaattgaagaacccgaatttattgcattatgtcaaaagttaaaggtacccgatcatgtcagagaaagagcttggctaacttgggagaaagtttcatccgtggatggaatcctggtaagaatgcttttaaagttaattttttaaaaagaaaatctataaagtaaaatatataaagttagtgataatttcactatccaagagtaccctctgatagcactagaatgcttttcatttcaatggtttcttaggtttttaatttttattttacatgaaaaaaattctgatggtgatggtgatgatggcagtggctgtggtgatgattctgacgatgataatgatgatggtggtggtggtgtgggagctgtgttccttctgcttttagtgaaggcctagggattgaactcaagttgccaggcctgctgggcaccaagtacccacaaccattgaactggcttcattttaaactgatatacaaagtaacgagtttcactgtgacagtttttgtacagatacaccattgttgttttctctattcatctcctcccccactcttctttcccatccattatcttccatttgctagtcccctgccacctctagacggcttctcctgcatttgtatcacacctgtgccacacacatttgtgtcacacactcttttcccctatgccttaaaactctcttcctctcatctccctttccaactttcgtgaccacacacacacacacacactcacttaagttttagaatcttcataggagagaacatacttgtctttttttagtctgacttattttgacctccagttgcattcatttttgtaaggataatgtgatttcatttttatttgtggttgaataaattctattttatatatattgactggctttcttcatctgtgcatgggtggatgaacatctccacttgctctatctcttagctattcttagtagtatggcaggaaacatggatctctctgctgtcttgacgtcgagtcttttggacatacataagatagtggaatggcagttttatgtaacctcacactgacttgcatggtgtttgccctactctaccttactaccaacagtatataaggctctcttttcccacatttttgccagctaacatttgttgttttgatgttagccatgctgacttgggcagaatggaatctcaaagcagttttaagttgcatttccccatttcaaatttttagtgctcctatgtatatctttttctgagaactgtgtttagttggttcattaacctgtattttgagtgaatgatttgctttaataatatttaaaatttgaggttctttatcagtttcaatacatgctggtattgaaggtgtgccccaccacactcagccctgtgttatgtttaatcacaatctgtctctctgtctgactgtctgtctgtttaatgtgtgtgcatacatgctctcatgcactgcatgtgtcgtggtcagagggcatctttcaggagtcagtttttctgccgtatgggttctagaattgaatacaggttatcaggcttaacaattgcctttacccattaaagtatctcactggcctgatattgggcaaaagatattgattgagttaaacatctacagcaggtagatgcccaattacctcagcattatttgaagaggattttttcccccagtgtcaacaactaggtggctataaatgtataggtttaattctgaattctctttgttggtccatgtatttttatgccaatatcatacagttttgttactatggttttacagtatactttgaaatcaactattctgacacttgcttagtattgcttttgttactcagaatgttttgtcacctcatattagtttcatttctattgtgataaaatatcctgacaaaaaacaacttacaagagaaaggtttattttaaatcacaattccaggttatagtctatcataatagggaagtcaaagaggcaagaacttaaaacaactagtcacatcacacctacaataaagagcaggcagggataagtgcatgcatgcccagtactcatagaattttctctatgaaaatttatatagttcagaggcaaaaaccctagaatggtgttgcctactctcaggctaggtcttcccatttcaatgaaaagattgggtggggtctttccccagcaattaaggcagtcaaggcagcttgccatagctgtgtccaaagaattcctgaagactcccttcctagtaatgttacactgtgtcaggttggctattcaaactaacattgctaaggggcatcatcctagttctgtaaagaatgtcactagaaataggcctcgcattgtattgcttataggtatttttggtaatgtaactattttcacagtattaattctgctaacccaagagcataagacttttttgtttgtttgttttttaattttctagtatcttcatcttcttaagggttcttaaattttcactgtagaggtcttttactactttggttatgttgattcttaggcattttcttttttgaagctaatattttttgtcttgtttgtttgttgttacaaggtcttgctttgtaattctaaatgatctagaacttattatgtagaccaagcagccttgaagcacagagatcctgccctgctgtaagtgctgggattaatggtgtgtaacaccatgctcttgaagctgttaggaatgggatcttttcttttcttggcaagttagttattggtatgtagaaaggtacttatttttgcttgttgactttatattctgcagtgttgaaagtatctaacacatctaagagttttctactggagtctttaaaatacaggatcaaataccttcggcaaatagagatgctttcttccccttctatttgcatccctttcatttctcgttttgctgctctaacgaggacttcaagcattatagtggagaggagcagtaagagtgagcaccttttcctcatccccagttttagaggaaacactttcagtcattccccaattagagtgatgctttccataggtttgttgagtagagctattattgtgttgagatgtttcttatatttcttgtttccccacgcatgtgggtggtgtgtgggtgtgtattcatgtgtgtgcaggcgcatgtgcatgtgcaagccagagacagcttccagtatgtccttcttcaggtgcctctacccttcctccttttttttctctcttcactgtttttgttttgagacagatttccacaggcctagagctcagtaagtaggctagactggatggccagtgagccccagtgacctgcctgcctctctaacaatgggattacaaatatatgctacatgcttggcctcatttattcattcatttattctatttttttttatgttcatgctagcgatctgcgtccggcactcatgcttgtaaatcaggcactttagcctctcctcagaaccttatcaagaagggatgcagtgaggtaacccaatcacaaaggaactcacacaatatgtactcactgataagtggatattagcccagaaacttaggatacccaagatataagatacaatttgctaaatgcatgaaactcaagaagaacgaagaccaaagtgtggacactttgccccttcttaatggaaggagttacagagacaaagtttggagctgtgacgaaaggatggaccatctagagacggacatatccggggatccatcccataatcagcttccaaacgctgacactattgcatacactagcaagattttgctgaaaggacccagatagagctgtctcttgtgagactatgccggggcctggcaaacacagaagtggatactcacagtcagctattggatggatcacagggcccccaatggaggagctagagaaagtacccaaggagctaaagggatctgcaatcctataggtggaacaacattatgaactaaccagtacccccctggagctcgtgtctctagctgcatatgaatcagaaaatggcctagttggccatcagtggaaagagaggcccattagtcgtgcaaactttatatgcctcagtccaggggaacgccagggccaagaagtgggagtgggtgggggagtgtgtgggggacttttgggatagcattggaaatataaatgaaataaatacccaataaaaaaaaagaaaaaaaaaaaagaagggatgctgctaaacattgtcataacctttcttgctgctattaatataatcaggatttttgtctttaagtgtatgtgtgggttatattaaatatcagtttttgtatgttgaattacctttgtgtccctgggatgaaaccagtttggtcgtgtgtgggtgaatttctttgtgtcctacgaatttgatttgcaaaaattgtattgagaattttgcagggaaattggtgtatggttttcattttgttgtcttatctgtatctaggcttgatattaaagtagtattggtttagtagattgagtttagtagagcctgctcctttctgttgcaaggagcagtctgcacagggtggtgagaggtgctgtttaaaggtgtggcagtgacgcccttggcaatgggttctcctcggaaagaaactttttacactgcctcagtctcattgctttctgaggtcagtttcctcacctatcttttttatttaattttggcaggttatatagctctaggaatttatgctgcatgtcttctagattttctaggagcttgagggaggaatgtaagctgtttcctttctggattccatcagagcctgtttttatctcctttacatctttatttttaatttggttcttctgttttttgtttgtgtttttttttaattagtttgtctaggatttttttgagtcttatttctttccttttttttctgagatagggactcataaagatgaggttgactttaaactcattatataataaccaagggtgaccttgaatttctgagcagtgtcctgagtgaattatagggtgtgtcccctagctcagaggtttatccagtgctgggcccaagttcagggccccatgcatgctttatcatgagaattttcttagattattaaattatatcaacatataaactttatttggtaatagagtttctagtggtaatataacaaccactggagttttaaaaaattaattgttggatatatagttttttccaagtaacttgtttatgctgacatatccttataagaataatttctgcataagcaagttattgataattgtaaataattaaattaatggctctctgatatctttctttgaataaattcccacaagctaatttactgagtcaaaacctacaaacttttaagactactcaatactttatttctttttatttgattattaaagagaaagtgtctttagtttggaattagatgtttttaaagtagtatatttaaagtctccaggttaccctttgaatgatccttgttcaacattgaaacaaatagaggcaggcacggtggcatatggagttggttcagcagttcagagtgaggaactgctgttctcattgagaatctcaagaagacataggtggagacctatgtcacgtggctcatagccacctgtaactcagtccattggcaactgcagttatgtatatacccctaaacagacacacatgcacgctggagaggtggctcagcagttaagaatgctggcttttattccagagaacctgggttcaattcttagcatccacatggtggctcacaaccttctataactttagttccaggttatctgatgtccttttctggtctctgtgggcactagaaatgcattggtgcacagatatgcatgcaagcaaggcaccttacacataaataaaaataagtaaaataataatgtcttcaaaaaataaattgatgcaaatagtaatggtccctggaaactccaaggataagaccctcctttcttagacatctgggtgaatcacttctgtaaacttggctgcaaactacagaacttaacagacagggaattatgtagaaaatgtgaagttcaaggttaatgacattaacctcaacaatataatttgttaatatacaccaaccaatagtcaacaaactttacttagaaaattcctttggggagtgggtcagagtactgactgtacaaaatgaggatctgaatttgaatttccagtacacaacttaaagaaatctaggtgtggcggtttgcacctgtaacctcatatctctctctctctctctctccccccccccctctctctgtgtgtgtgggtgtgtgtgtgtgtgtgcgcgcgtgtacacacgtgcatgtgcttctgtggtgcagataggtgggaggatccgtggggtttgctggctgccagtgcacctccaggcttaatgaaagaccctgtatccagggaatatggtaaacaatgacagagcaggacacctgattctttttgctgttctctgcatgtggtttctcgcacacatacgtgtgtataccatacatacacactgaagaaaattaatgaagaagaaaggcccgtgagatgggtcagtgggtaaaagtgcttacagaagtctgatgatctgagttagttcctatataactaacccatctgagttagttcctatataactaacccatctgagttagttcctatataactaacccatataatggaagggatggcctgtcgtcacagtgctgttttctgaccttctacgtgcactgtgacatggtcacatccccatacacacatggtatgcatacacacatacatacacacactggtaatctttaaatatttttaagctaaactagaagcttcctttatataacccaggtacttgggttataagacaagctattattccttgaaaaaataaaataaaaagctggtttgtttatgtggatactatagctatggtaagggtggctgctatgtgctgtggcatgcatttggaagagttctttccccccttctaccacatgggcctttcctggggattgagttcagaatgtcaggcttgctgacaagtactttgattagactgagacaccttgctggccagcctttgttttataattgctatatattcattatatggtaatgggtttcataaaaataatgtatctcaagtctgtcatattctttgagactgttcaaccctcactattctcccttcctccctctgcctgctcccctcttgcattggtttcttttactgtcctagtcagctttctgatctctcattaagtatatataaacaagtagctttctgtgtgtatgtaaaatctaggatccacaaatgagggaaaatataagatatttatagttctaagtctgacttaattttctttatctgatgactcagtttccagcaaacaacatgattttgttaactaaaactctgctgtgtatgcataccatttctttatccatttatctgttgacagacatatagactgataacatattacagccactgtgaccagtgcttctgtaaacatggatgtgcaggggtatctgtagtatactgactttgtgtcctttgggtgtctatctgggaatgggtatatcatatggtaaggctggctcggccagttcacattcccatcagcagtgtataaaggttcgattagtagcagaaaccattttgggctgtagaattaaatatatacaaataaatgtgactgctttcttgccttacccccttctcttcctggctttgttcctacctttccgtaggactgcataatttaaaatattacttcctagtggaggtcatgataggaattagaatatatgaattattcctggttgtgtgggggaagaggacaatagaggactttgtgttacttttaggacttgatacattttgaagggtgtggaagactattcttttgtcctgctgtaattcaacaaaccctttctttacaatatgcgagtgtttaatgttgagagttggcctaagaatgatggaatgtgttcagagaagcaaatgcaaagacagaatgaacctgtttgcaaagcagctgttgtggtcccagttgtctgttctctgaaacaagagaaatgtcgtaacttgggggaaccctttttggcatttgaaagtggatggtgtttattgagagaggatgggttaagatttctagtcagaatgagctgtttcaagtctgaaataaagcatgtggtgacgccacactcttgagcaaatgaccttaaatgtccagtccttggttttctcattcgtaaaatgggctatcagtaatttccagatcttggaatcattgtgaatataaataagttaacacatattaaatatatgcaaggtaatttattgagtcaaactctacatagtttttgttctttaaaagaaacaaaacaaaaaaccaaaattctatcttatcctgaaagactaccttgtgggcatgacacagccaatgcaatcatgatctcacagtggcagcagctgccatcagtgtgcctgcacaggcctgggcttgtcaacagtcagtcatagatcggtgagaggcccatttggccttacccctccctgctgaaatatgagctactgatggatttttggggaggggccgacactgtcttcagttgtgtactcgtgatgagttcaccgtgctccagtgaatggtagcaaactcaggttgcactggcatcccttgttaaacgctgggttacaaaacaaaacagaagggcctgagtgtgagaaggggactggccaggagggagtgtgtactggatgtcggagggaaatgagaaggggaggatgaaaatagccagagtacactacccacgtgtatgaaatggttacaagaacaaattcaatcagaaattccattttaattggcacttgattagtacttaaaagacaaaccatctcgatggctcagtgggtaaattgtttgctgtacaaatgtgagaattcagttgtctcctttacacctgcctacctaactcctgacacagctgcaacacttatgtgtaaccccagaattgagagacagaaacagatgaatcctggggtcttggtagtcagccagcctaatctaaatggccagctccaggctcagcgggagaacaggtctcagaagaataaggtagaggtgacagaggaagagatccagtgtccatctctggccttcgtacatgcatacgtggatgagcacacatacacacacatagttaaaaggaggtaaagcaacttcagtctgggttcaggtggatgtgttcaagagttcaatatctatggcagctatagacttacataatgtttcttaaattttgatttagaagtcagaattattccttgatttatactgctgatggaattttaatccagtgggcatgaaaacaatattacctggtacatctcttttagagccctagggtggtcaagtacattttcagttaagcaaaaatatttttaaagatttttctcttctcatctgtaggtcttcagattttaacagcaggcgtctactatttaataaaccatgctgtaagcacgcatactgtcatccaggttttgttttatttgttaacggttagtccagcaatggctgtctctcaaaggaaaggctgaacctggtagttgtttagtccatgaggatacatgtttcaacttgccaggatgaatgagggcaagtgggcaaaccccaaaacttactgttccatgtccttttatgtgggctgtcactagaaagtgtgaccctcccatctcaaatgatccaatcaagaaaatccctcagaggtgtgcccagctgtttgtggttttgttgttatattttattttgtttttccaagacagaatttctccgtatagctctagctatcctggaacgtgctctgtagactaggctgtcgttgaactcacatcagtctgcctgcctctgcttcccaagtgctgggattaaaagcctgtgtaccacatacagcctgcttttgttttagtagattcaagatgtagtcaggttgacacctaagagtgtctatctcacacttctcaagtctaatagtttggggttagaataagagatacatgccactttttttcagttgaacaaaaacagtatatacttattaatgagcctagtttcagtttcatgtctcacagaataggggctcataaggagattaagagagagatgagggaacagtatgttggattttataacacatatttattatgttcattgatttatatgggtataactcaatggctccctgaaacagttataatcatgtattaaagataagactgtggatcaccataaggtatagtaataatgaaaataatgccaagtattatgagagttatcaaaatgtgaccaaaaaatgaaactggatatagaaacatacatttgtaatcctggcattcaggctgaggcaggagagtcacaagtttaaggttggcttgggttttttcttcattatttactcttctgttgctgtgataagacactatgaccaaggcaacttacacaagaaagtctgttgggggcttacagtttcaaaatattaaaagtccatgaccatcatggtgggaaacatcatgatagcaggcaaacagatgtgacattggagcatgcagagagctcacatcttaagacacaaacacaaaacaaagacagacacactgggagggtaagagtcattttaagcctcaaaggctgcccccagtgacacactttgtcccaacaaagccacagctcctgttttttccaagtagttctaactgggagcaaagtattcaaatatatgagcccatttctattcagacttcctagtgaaaccgtgtcacaaaaaacccaaaccaatcaatcaaaatgaagcatagagcaagcacattgttttggaactgtggtgccagtagacttgctgtagagaaagtagccacagttacaaaaatctctacaggtctgcctgtatgcctgtagaaatttattttggctcatggttctagagagaaaagtctgaaatcctctgtgtcttagcctgatgaaaaagcaggggaagctggagcaggcagaagagagcctgagggacagcttcactttctaagaaccggctcttgcgctcactcagacatggacccatcacagtaggacagattcccatggtaatgccaattatttcttcagtgccttaaccatgtcttaatgttccaatcccccattactgtcatgatagccttcagatttcaagaagagtttcagacaggataaagggcattcacaccacagccactttcgtgtactcccagctctgcttaaccatttcttgaagagcaactgctctctagttcctactgcttgttctgctgttgcagttgtttcttagcaagttaatttgagcatttgtgtgactcacacttaagattcctgtcttttaggggtctgagtccttctgtgcttagtctctaagtgtcttgagttatttaattattccccaactttttaattgtgttatgccaaactctagttttgatacttatttttttgtgccttttctttgttaaaattcctttcaaattagtatatttgttagttgatgagtttacatttgcccatctttgttacttctaagtccatggtgtttacatgagggtttgttctttatgttaaatggtctgttgattttgacaaatgtctaatggtatgtgtctgcgattatagtacatatagaatactttcattgctctacaaatactctttgcctattcatcctgaatttgcctatttcctttcaacctgtagtaatcactgttctttaaaaaaataaacaaaaaatattgctttgcattttctaggatgtaatatagtagccaaacagtatacaacctttcagttgggctctctcacataataatatgcatttaagcttccacatcttttaatgatttggtagatcatttctttttagtgttgaataataatattttgtcatctgtttgtgccacaatttatttatccattctacttccaaagggtattttggtttcttctacgtgttagcaattatgagtaaagctgctataaacatacatacacatttttgtatgtatgtgtttatacattcatgtgtgtacccacatgtaatcacatacaggccccaaggtcaactttgggtatcactcactacttaggctctgtttaccttctcttttgagcctggcccagaatttccctactagggtaagactggcatccagggagctcggagtcagtgcttacacctccgtcatttgggacttcaagcacgcagcatcatgcctggcttttcaatgtgggttctgggagtcagtcttgggctctcatgcttcatggcaaatgacttcacttgctgagccatcttcgcagctcccaagcattggtttcaagacaggatcttgctaagtcgcctcggctggcctcacactcactgtgcagcctaagctggccttaactcccgattctccggtcttctcactgccaggagttatagcttatgctaccgtgccaagcttgtgcagtgtgtgtgtgtgtgtgtgtgtgtgtgtgtgtgtgtgtgttattggagatggaacccagagctctgtgcgctgtgggaagcactcagctagcactgtgccagatttctagccttgctgctttacctttacctcctacttcctgagccattgttactagttttgtgtgatatgggagggctaagtctggaacttgtgtgtgtgtgtgtgtgtgtgtgaagatgtataattgctggcactatttcctgggaaggtgtctctttccatggtattgtgttttgcgtcttcatcaaagactattattatactaggctgcggttgtgtatcttgatttctggcctctctatttcctgctgtctctctatgtctcagcctctcttttattactgtgaagagacacaatgaccttggcaactcttaaaagacaaaacatttaattggggagttagttacagtttcagaagtttagtctattacatcatggtggagaatatggtagcatgcggaccgacatagtgctagagaagtagctgagagttctgtctgcaaacacgggcggaagagatagagacagatggacagacagacacagacactgggcctggcttgaacttctgaaacctcaaggccacacttacttatcttctcaagtactactattcccagatgactaaacatttaaatataggagtctgtggaggctttcttattcgaactaccacattccattccttaggtcccataggcttgcagctacatcataatgcaaaaaatccattcagttgaacttcaaaacagtattatcactgcttaaaagtccaaagttcaaagtcatttctgagactcatggaaaattttgtaatccctataaaatcaaaataaaaaatcatatctcatacttttaacatacagtggcacagaatatatattaccattacaaaagggaagacagggagagtagtgagaaaatactgggccaaaggaacaaagccatcacgtcagtctccaagtcttgtatctgcacctctgatgtcaaagtgcctttcagatcaccagcaactttcaggtttcttgccgacaacatacttctttcacttggactggctccatgccctgtatccagctctcctaggcaggtgtcccacaacttggcatttttgacatcttgggtgttctaggataatccaggtttcacctttacaacttcaagcagttgcctctctaggcttccatacagagacacccctggtgcacacgtagctttagtggctttccttagctgctgggggagttccacaacccctttcttgtactcttgactccaaagtcagaaccacatggctggagcggccaagttctgctgcttctgggcttggaacatgctcccctcatttagttacatctacattctcttctgttgttgatgggttccttcacttcttaagccctttcttcaattcctttttcacaggttgaaagcttagctggttggcatctttccctgaggttagagtttccgctattccatttatcatcaggctattctttaaacctttttatctccttgagcattggacttggcaccaacatttcatttcctgatgctccccttttctcctcaagctataatttttctatttttccttgctcagcttgatcttttcattataaatctgcataagagtgaccacgaacaaccaagtgacagagtcagtactaagctctcttgaaatttctgccaacatcattaacccagtttagcacaggcagcttttttggacaataaaagaaaccacagtgttcttcaaaatgacacaagaatggtctttgtgtcacttactgcttccctttgaagcttcttgaactgggtccctacagcccttcgcaccactgccttccatgctcttacttggatggctcattaagccctgcttaaagcacctttgggggacatttctattcacactataatgccttgttgattttagaatcattttattagatttatagatcttcttgattatttaggtctcttattttttaattagacttttatggttcccttcaggctgattttgtatagactttattagctttatatctaactattccactttagatgctcatgtaatacacacacacacacacacacacatacatatgtatgtatatataatatacatatatacacacatatatatatgtgtgtgtgtatatatattccttcctgactggcctggagctcactatggccagggtggatgcaaacacacaaaaatcaagagttaaaggcatgtgcaccacattctgcttaattgtatttttttttaattgcagtctatttgttgggatatagcaaagcagttgggttttgtgccctaaccttgtctcctgtatccttgttagaatgtttaatagatctcattgtctctattgagtctttggggatttctgtagaaatgattgaataattttaaataaaggcatttttgtttcttctcagtccaaacaacttttaatttttctttttgttttattgcattaattcttgaattctgtatgatgtcagtgtgtggtaaaggataatgctgataccatgtttctaccctctcatcaataaatatattagctatagattttctgtgaagattctttttcccctttttattgaaaacagattccccccctcacatatatatcctgattaaggtttcccctctctctctcctcccagtttctctccatctcccttcctatctggacccacccctttcctttctcattaaaaaaacaaacaggcttctaagggataataataataataaaaaaacctaacacatcagaattggacaaaacaaacaaacagaaggaaaagagcccatgagaaggcacgagagacaaagaccctctcactctcactcaggaacgccataaaaacactaaactgggagccataataagggacctatggggtaaaacaagagaaacatgtaagtgaaataaaataaaacaataagattaaaaggaaagaaatagagaagccttggcatgatgttatgagacacagaacctcagtgattaccgagtcgttttctgttggcacctactgctagcatgcagcctacctttaagaggagtttgtttcctccagtgagagtgagtgccttagaggaaattacacttacattggcaagtaggtatcagctgcatattgcttctgagttagggatggggacatgtattctctttttctttcagctctagggaacatagcctgagaaggcacaagagtcagagacccactcgttcattcactcaggaattcaataaaaatactgaaatggaagccataaaatacacatggagggccttactctctgtgagtttatgtgaactttgatcatggtgatttagagggtactcttttcttgaccttccaactcatctggctcgtacactttttctgtctcctcttctgtggggtcccatgatccctgaggggagagattgatggggacttcccatttaggacattcccttggagtgttccaaggtcttctactttctgcatcatgtctggctgtgggtctatgtatttttctcatctgctgtaagagaagacttccctgaaaatggctgagcaaggcactgatatataagtatagcgaatgtcattagtagctttgttttattgccatactcttttagtggaatagtaacatttggttttatcctaggagcttgagctatctaatctcaggttcttagtcattcaagcaaagttgggcataggttccatcttgtggagtgggctttcagtcaaatcgaatgttggttggttactcaaacaaacattgtgccaccattgccctagcagatcttgtaggtaggacaccattgtagatcaaacagtttgtagctgagttggtggttacatttctcttttggtagtgcagagtaccttcctatagcaaagatgctagactgtagggatgaagacattatgtaggcaccagctcaacttctccatggtcagtgggttgtgtgggtgttgtcttcagcagtggggccttgctatcagtttgtgacgaacaacctatagtcttggcaacaatatgggttgtttggggttcccatggcactcctttggccaactcaacttacatcaactcaattagatgtaacccaatcttggtactggaagattcatttggtgacagaggatgtccacttggggatctgtctccctcattacttggtgattttatttaaatcaccttcgtatatgtatatattttagggagcttctactgtattaggtttctatactatctctcaaatagcccttaattttggttgtttctctccacattccttccttcatctccctctacatttgatcctcctggtcctgcccaccccccccccataatgataatgtttccctttcctagggaggtctatccatctctcccttaattccttaccttgtacgtaacctctgtagttctatagagtgtagcttggtcattattgatttaacagctggtattctgaggatagtctttattaagttgaggaaatacctcttaatttatagtttgctagatattttttaaatcatgagtgaatgttaggagctaaattctaggccagttatgtaccctgtatagaaaatgaggcctgtcagtcatttctttgaattatttggataagcaattaattgatttgctattagaatgtggatgagatctaaagaaaccagggtagaatcaacagtctttttcttgggcgattctattgctacttgcttttctgattatgttaagggaaaaggaaaaaaaaaaggaaaatctgaaagctactatatcctatgttaaggcatagacgttgttataactttaaaatatttgcatttagtgtcattttagtgctgagtagtgtattagactctgggggggtataatagaaattagaattttctgttttcaagacacttataaatttgttgagatggaggtaaaaataagcaagcaagtcagacacagacaaggaagagctgtaacactgagatctgtatccagtctttaaggaaggaatcttggttgttcatcatagggtcaggtaagcctgaactttccagatccatgttttcctggagtagagctaactccacactcaaatctaccatgcaactagatggttaactcacctgctctctaccccagtgtgtcttgttaaaactgattggcgggctggtgagatggctcagtggttaagagcacgctgctcttccagaggaccaggtatcaattcccagcacccacatggcagctcacagctgtctgcacctcctgtcccagggcatcttattccctcacacagacatccttacaatcaaaataccaatgcacatagactaagactaagataaataaatttaaaaacacaaaaacaaaagctgcagctggctaggtatggtggcacacacctttgatcccagcactcaggaggcagagacagaccaatcttttgagttggaggtcagcctgctctacagaccaagttccaggatagccagggctacacagaaaaatcctgtctcaaaaacttaaaaacaagccaaaagactgtgattgagtgaagtgggttagcctttaccttcctttgtgactctgccactcctgcatcttctgtgcatagtcaagaatgccttaaatactgactgctgccagctcaggctgtataagtaggatgagtttcctgacatattagtatcgtatttcttttgttcatatataaaacctaggtgaagaggaaacccaagcatagaaagaagtagctctcctgtttcaagactttctattgcacacccaatgcttaatgcaaccttgctattcttgcctggaagagtacatatttccatatatgtgctagtagtttactttcattacattttacttattgtgcgtgtgaaggggcatacgtgctatgacctgagtgtggaggtcagaggacaatttccacacgcatgtcatggcacatgggagctctggatataaaagtcaaaggatcggctttggacaagagcgtcttttcctgctgccaatctcataagacttttttaccttgtgaaattacagctgagatttatgttcagctagctttagttgttaggtttttcacactgcagtgatacttactgtcaccacttggtggagctctttggtaagtgagaacattgtcaaaaagcaagctcaaataaattgtcactgatttggggttgtctttaaggtggttcagaggaacattaaatcacatagcagatagccatgtaaagtgttggctgtatattttgatttaaactgttaatatataattgaagttttgatattttaataattttatcatatttctgacttttctatcctgcttttcataaatttagcagtttttactgttgcatcttctttgttgcagttgattttaattaggaatatatatcttgaattaatgaagaaaatgaaagttgattatgatcctaatagctctagaaataagaacccactttagatatattataatcctttccttaactttttgtttatttttttttttttacaaaattggaatcaagaaatacaaataattttgtagatttttttctctcacttaaacattgtaccttgggcatttcccatgtgcttgttctggtctttgaaaatgtcttaggattttgtgtaaccccataattcagctatagcattgtttagccattctattttaagatatttagacaccccactgttatggggtatgtaagtagctattagaacatctgttacaaggatcttgtcccagctccccagttattttcactgggtggattcttagctgtacaactgaatgtctcaaaacatcatggcagcgtattgttcagttgacattattctaagatttgacatttgctgaatctggtttttgaaaggtaagattttttttccagttttgcaaagtccacttcctccacacacttcctccacaagttttacctttttgtgtgtgatttcactgagaaatagttacttttttgtaaataattttaagtgctgttttggactccctttaataatttttaagctttttaaaaaattatgtgtacttgtgtgtacatgcacaggagtggaggtgctcatgcaagctgtagatcccaggtgccagtcagatcaacagttgtgagccccctgatgatgtgccaggaaccgattttgaattgtctaaccaagtaatgtacactttggacgacctctgatctattcttccagccttccttttataatttttaagaaaaacattttatttgcaagttctttataaaaaggtttatgcaattacagcaaaacaaataaacaaaaacaaacctgttttcaatttagttgtaaattggattggaaataaatcctgtagctacccagagccactgtgctacaaagtagcaagagaggcggaccctctgtttgcagataatggcagggctgtgggagtgggcggggtgcttattaaaggaaggatagcaacgggtaggagttaaacacagagatacaggaaagagcacaaggatattagaggactttagaagtaaggaaaaaaggctcacagtggtaggttgaaggagaaaaacttagtgcgactcttcagccatagcattaaaatagaaattaaaactatgagtttaaagtatagcatttctggggaagctgacagaaaaatcttgactcaaactccattaaaaatatccagaacctttaaagctatactaatggagaccttgtggtattggtgcaaaaagaccagtgatccgtagatgagggcggcatggacactggcacgaggacacatgcgttgtccgttcattttctagcgaggcgcaaaggtaattcggtagagggagcctgttcttttcaaccttgaagctggaccaactggctatctgtttgtgacacttcacttacagggtttgggaggtggctcagtgggtgaaggttgccaaacctgatacccgcagttggatccctggatcccacatggtgaatggagaggaccagtttctgccacgttgtactcaaacctttaccagcgtgatgtggattgccaacaaatatgaatttaaagaattttctgtctcatagtacttagaaaaattagttcacatgaaccctagacataaaattctagagcaggacatgtaagaaatcagtgtggaactgtgttagagataagtttcataaatagcatcactaaaaactgaaccagaaaagaaaaaaaatagtgaaaatttaaacactctttctctgtgaagtacacctttaagaaaacgaaagattgggacgagtcagtggataaaacccttactacatacacatgaagacctgagttcagagtacccatagccaagcacggaacactaaccccagtgctgggagaggccagctccatgactaggcagtctagctggagcagcaggcctaagggtcagtaacacacacacacacacacacacacacacacacacacacacacacatgactaggcagtctagctggagcagcaggcctaagggtcagtaacacacacacacacacacacacacacacacacacacacacgactaggcagtctagctggagcagcaggcctaagggtcagtaacacacacacacacacacacacacacacacacacgcaagcagcaggcctaagggtcagtaacacacacacacacacacacacacacacacacacgcacacgcacatgcatgcacgcacgcacgcatgcacgcgcacacacacccgcacacacacttgtacgcacagagagagagagagagacatagagagattgattcagttgtagggctttattctaatacaatttgaggcttttagggaaggggatgtagctcacttttagtttgtttgcctggtatgtgtgaggcctgggtttcaatttccagcatgacacaaaaacctttttctagtgtttaaaaaatgaataaacagtataataatgtttgtcggttttagttactaaaaatgtgagtgtgagagttttcttagaaaaggctgtagtagctataggcaggtctatcgaggacagttatgttcaacagggggtaggtggctaggggcaaagaagcagagaggaagtgagataagtacacttaaaaattccagaagtgaggattaaggagttatagcagcaagcagctgtcatatcttagtagtttctaagaaattagccttattaagaaacataggcaacaaggaggacaccaaaagacatgctgacatggaaaggagaagctcacaggaccccaaccctgcatcagatctacaggcaactaaggaatgctgaggcgggccaggtagtctctcccagggaagagcacaccaatgggtatccagggccagatagccagcccttaaaacatgcacttacagttaaagtacaaaatgaggaggtatttatgtacttaggaacacaggtagacatacacataaatacacatttgcagcagttaatgaaaaagagaccatgaatttaatggggtgagggtacatggaatgggttgaaggagaaaagggaaggggagatgatgtaattatatcaaaatctcaaaaaaatttaaaaacaggcaaaagttgatgtttttattttctgagaccatataattatcattgtaatgctgaatcaatacacacacacacacacacacacacacacacatatacacacacacatacgtacacacatacgtacatacatatatatacatacatacataagtatatgtgtgtgtatatatatatatatatttctgtttcagtagtaggatatacgtaacagtttctgaatcaaatttattgagttgatggagatctattcccatataatgaccaccagcaaggatgaaagcttcccgagcacgccagaaggttctcttcccctctttgtggtcattccctggcacctgacctcgtgatttgagcagtgcttacctagtgtctgacattaaatacggctttaccttccctggaactgtgtgtgcacagaatctgtgctactgttttgtgtctagcttttccttttttgggtgactttttctcagtgtaataattttcacttatctgtgttgctacatttagtagggccttttcttttttgttagatagcatcagctgcataattctattacagtttatttatagaattaacagtttgattatttctgtttggttctatttctattatatttggttggtttctagtttggaattatattcattagtagtgttttaatttcttctgggcataagtattggggatagaatttctaagtgatatagaaaatgtatatttaaatacataaaaactatccaaacttgttttgcaaaatgatcatagacattttaccacttgtcactggattcagttgtctcattccacttcttccttaccaatcatcaatattgtaatttgttttaatttaaactattttggatgtatagttatattttaaagtatttatattagaaggaaaagtttatagttggacaatggtgaattattgattacccacaatcatttgatactctagatcctctcattcttcccttggtacatgagatgcacatagtgtgtaaaatgccttacatctgcttcctcagcaatgcttctatctccttattagaccagagataatctgacacaataggatccagattttacctacaaaacatacatttagagggtggcatatttcattgagggggtatactgaaaaatactctacctacagtgttactcattgctcatcagttactaaatgagtgctgggctatggtcaagggtttaaacatagcttcatttaagccttgtaaagtaatgtatgcatgtaatccattgtacaggtggcttagttgagaaattgcacaagcccagaaaattcttgactgaacaaagggaaaaaaatggatgaattagagcaaaagacatacgtatactctgaaaggaagtcagcttttgttttcctggaaaaaacaagttttaaaaaattttagaatcttttaatgtggctttaatgatattggactactaagaaaacaaactttcaaataactagcttactcaaagtttccaaaggaaatagtaatttaactttttgaatctcctcataattttttccttataataaaaattgagtgttatattaatgtaaaattaaatattttcaagtatatgccattataagaatttaaaattacatttttatgtttaatgaaaaaatcctttgtaattcaattttaacatggtatccagtgtgcagatgatttaataaaatacttgaacctttttattcctaggaaggatatattcaaaagaagaaggaactctggggcatctgcatctttatcgcagcagttgatctagatgagatgccattcacttttactgagctacagaaaagcatagaaaccaggtaaaagctctgactgaaaatcctgaagttaaaaagggcttctaaagttttaattcacattaagaagttggtggaaatgctaaaattaaatttaatataagggatttgggaccaataatgaattttaattctctgctgggatcagttaatgcttacttaatttgggggcagtatttttttaagaatttattattttttattttatgttttacctacaggtaagtgcaccatgtgcaatgcttgaagaggccaggctagggcatcagagcccttggagctggagttagaggtaccgtgagtcatcctgtgggtgctagggaccgaacatgggcacctgaacataccaaagacaaacacacacacacacacacagagacacacacacaatcacatacatacacagaagtgaaaaaataaaaatcttttaaaatgtaaggtgtctgggtttttttttttttgtttgtttgtttgggttttttgtttgtttgtttggttttttgagacagggtttctctgtgtagccctggctgtcctggaactcactctgtagaccaggctggccttgaattcagaaatccgcctgcctctgcctcccaagtgctgggattaaaggcatgcaccaccactgcccggcctaaggtggctgttttaaatttagataaaatttatttaagttgaagactttagcgtacgtggatgttttaattacataatcacataaaactgccatatattcagtattgattgacacttgacccaggcatttaacattttttagctttaaactttattaatttgttctctagtaacttgtagattttcatcttaaactcacaggacataatgttatttcctttgtaacatatttacaaaatacagcagtaagtaattttaccagattggtaaatagatgtatatcttcagtgagttgatctataattcaacataattagtattttagctaaactaagtagattaaatcattacatttatagcacttttttactacctttaaataaagtgtgaaaacaaaggctttgtgtgtgtgtatacatacatacatacatacatacatacatacatacatacatggcatataaatagcacaagagtcattgtctctaataccacaggcactgacttcccatcccttctcttaaactaccccagaaagagacaactttgtttcaggattttcgtttcatttctgtggtgctcggcccctcccacgacgcttggggtacccctcataagcacacgcactgctccgaggttttctttttttctggattctacacatttacatgatgaactcttctgttcttccttctctctcaccctctctctcttcccttctcatcaatacagcataaataaatgtaaagcagaggccccatgagaggataacagttcattctctgacccagtccttcatggttaacctaactttagcatttctcactaactccctaaactgtattgatggaagttcaaagcagtttccagtcagcatcttgatctctgctgtcttctgccatccctgcatccttctttactgtccacgtaactatcagcactgctttacccctcttggcctgaacactttgtaatatcctctgttatgtggatttttgcctcctgctgactatctcgggctcctttggttggttggtttgaggtgtaaccttgtacttcccaggtctgcctcaaactcctggtcttaagtaatctttctagactcccaggtctgggaccgtagacacgtactctcttacctggctttgctttggacagcctataatagttgtaatgactattccttgctctacttagctgcttttgtacaattgtatatacaaagtcaattagaaattaatatatgaagtcagatgtgatggtgtaaggtaggctgatctctgtgagttcaaggccagactggtctgcatagcaaatgccaggccagccaggagtatgagactttttgtcaagagtaggaggagatggtaatggatatatgagagctatccgatcatgtctgccttactgcccttttgaaaatatgtatattgaagattaattttatagaaaacaacttttagaattactagaagttgtttaacaatgtaaaattttagccaggttttcactttctttctctatttaaacatgaagcttttggtaaggcaaagcatgttagtgtgtctatgacaaggaaatgccaagtggtgagaaaggttatcagagcgaggtgaggtagacattcacagggtggggatcatcgtcatgggctgggcagccccacatgggcagagcagtcctgcacaagctgtctggaatgcagtgtcagagaccaggcacttggtgtagagaggtatagtacaggagggcagcctgatgggggagggaggggacagtgtgcagttaagtcagcctgtccttgttggagactggaaggctttagggttataagaaggacagagtttcaaatatgaaaatggaagcactagaataaactatatgttttgaaaaaacatacagatacagatggctgtgtagtgtttaagtacaatgtattgcggaactctgaaagaatgtattttaaatgtttttgctttgaacaagtaataaatgtttgaggagattggtatgtttatctttgttatgcagtgtttacacgtgtgaaaacatcacatgctacttccctaaaatgtatagttcttgggcttttatgcatcagttgataataattttaattaaaaagctcatacatttatatttagaaacacaaatgtacatatttcatgcccctgcttttcttgttttcttaactttaaataaatataattggggtaggtagatactagggcctgggttgcttctaataaaatgcaaaaccaaatagagcccttccagagaatacacagtgtagagctggcagtcttttgaattgaattgcacatgctttgaaaattaaataaagcaaattttgatagctactcatgcactttttctattttttgtagtgtctataaattctttgacttattaaaagaaatcgataccagtaccaaggttgataatgctatgtcaagactattgaagaagtataatgtgttatgtgcactctacagcaaattagaacggtaagataaaagttttattaggcttgcactttcattctttgttttttatttttataccttgatacttcaatttggaaactgtcatgggtaatagaagtattaagcattatcccctagccttatccattttgctattatttcttaaacattctgggtacttgccctaaattaactgtttttaccagccttttatgacatttgcttcttcagattttgagcttgattttcattttgtctagtggagcttgtaattctaaatagtgatctaaattttaacttcttccggcttagaaagaaaccatattgtctataaaagtgtgtgagcagttgccaagttgtgatctgtgctctcagtggtagctgagaagactctacctgcactgttcaactggaaagtcatggctaagcttggcttatattttgtcataatacttttattgatttggggggggggatttcacatcgtgtatcccaagccccactttcctatcctgcccactttaggacttctctccccacaaaagaagacaaagaagaagaaaaaacaagcccaattttgttacccatgtactcaccggtacatggtcaaaatcctggtggatctcatgttaaagaaaactgagtccttccctagccatacctccatcagaagcaatcaattcttttttaaaaaagaagatttatttatatattttatgtatgtgagcacactgtagctatacagatggttgttagccttcacgtggttgttgagaattgaatttaggacttctgctcgctctggtcagccctgctagctcaggtccaaagatttatttattcttatatctaagtacactgtagctgacatcagatgcaccagaagagggcgtcagatctctttatgggtggttgtgagccaccatgtggttgctgggatttgaactctggacctttggaagaaaagtcagtgctctttcctgttgagccatctggccagcccagaagcaatcaattcttgtagaggaattttagttgagcaacatggctactctgacaagagatcacacccaaagatatgatccagctggaatttggtaatacacatctttggtccctctggctggaatgtagacactcatttagaacatacctttgattccagtcaatgatatctaattgatggaccgacaaagtgacaaatcggagaaagacttgaaggaatgagtcagagataggatatgcccagttctcacagtaaagacaggaaggagaggctaaggaacagtcaggaaagagcagggagggagagagaatagtttagttcagtttggagcagttcagttcagtgcagtttagttgagtgcagttgtgctcagttcagctcagacagttcagttagttcgtggaattcagaggcaatctttccaagtagaatgttatcttatttttcatatgactatgaccccaaatatgaaagatttttgttatgatattatttagatgtctgaaaattagaaatgagctctttataactgaattttaaatatttcaaatattataattataatcaaacaattataagctagttttgatgaggaataacagtgtaaagaagtgcttgtaatgttagatatatagatcagagtatactatgattgtgacagtgcaaaagggaaaaatccaagcctctaatgcatcacgtgaaatgactcagaagaagctagaattctagtagaggtttcctatccacgatagacaaagtacgcaaacatttctctgagccagttgttaaaaacctgtggtaggctctagagatggctcagcggttaagatgcttaatgctcttgcagaactcagctcccagcacctacttcaggtgtctcacaaccacctgtaacttcagcttctggtctgtgcaggatacttgcacagacttgtgctaaacaacagacatacacacacatacacagaagtaaaaatgaaatgagtctttaagagcaaaagaaaatgctgcacaaataagttacttaaaaactgactaggtgatttctagatctagaatttgagggctcggaatgacttggggtacagtgcttactgtcttctgctatagtgattttattctacttttgttattaaaatataattacatcatttcaccctattcccttttattcctctgactcctcccacacctcccctcctctcccacactgtgttcctgcttccttttaaatctggcagctcattttctttgttgttgttacatgtatatgcataaacatgtaattataacctgctgagtctgtctagtgtttctcgtgtgtatatgatttaaatgctaaccatttggtatgggataaccaattaataggcttctccccaggagatagattattcttcctgctctctttccttaattgcctgttatttgtctaggggtggggccctgtgagtttcccccatttatatttctgctataataattttaattggatacttccaagtagttttactttcttatatgattctgctttaatatcagcttctgtcttcagggatttgtttgcttgtttgtttattatactttcctctgatatagtgcacttgatatcctgggagttgagagagaggtaaaaaagggtactagaaaatgaaatagtctcatatgtgatttttaggctttacaaaatattctgtttaggtggtttaccctctaatttttctccaaacagagcagtgatcaatagataaatcattaggctgacatttttctctttatattcatattaatctcaagactactaagtcttaagaattttctgtatttgtattttgaagagtaattttaagtagtttggaagggcagagagaagaatgttatagagaattgattaaattacataaaaacagaaaagaatattataactactacatattgaagttcaaaaactttagcagttatatagacaattttgaagtgctctggatctttctgtatgctattccctaagggccaggataagcaacggtgtttacagtccagtctgtgggatacagcaccacagttcccaaagaattttcttctaatacaactagaacatgagagttcacgatgaccgtccacattccagttgaatctttgagatgtacttgatgtagagaactcacagtctgagaaacaaccaattggctcctagagttagttatctctcctgtaatctatagccagcaagcttgtcatggaaggggagcggtcagggttctagagcaggctctgcccctctggtctggcttgagattctctctctattttctgtagtttgcctttgttatcatctctgtgggaagctgggttttacagtcctcgtgaagtgtcacctgaattggggctactcaatagacaaccattagagtgtgttcccaatgagctgttcatagtaaatatgcatagatgccttactgtattatcaagtacaaggtgcccttacaacagagagggtagaggctcatcatccatccttcttgttctctatcaaaaacagtagctattatctatgagagagaaggaagggggttacagtagagcttagaggagaagcagtcactcaggtctgcattctaacctgatcctgagtatatactatgtaatcttggataaatgagttacctaacttgggtacatagttttctaatgtctaaatcaagttaatgagagtacctattagtcagggctctctatagtaacagaactcatagaatggacctgtatctatatctctagatctatatccaaagggaatttattagaatggcttacaggctgcagtccagctaatctaagaatggttaactatgaatggaaagtccaagaatctagtagttatgcactcagtccacaaaactgcatgtctcagctggtcttcagcatatgctgggatcctgaagtaggctctagtggcaatgaaggaatggacttgctagcaaggggaggacaagcaggcaaagaacaaaagctttcctctcccttatatagactcccagcagaaggtgtgacccagactagatttgggttaaaggtgtgttttctcctcctaaagataacggacttttgaattttagttaattccagatgaggtcaaggtgatgatcaagtatagccatcacacacctgttaatgttttaattgagataatatataaatagtgctttcatgatagcttttaatttgtgtgtgtgtgtgtgtgtgtgtatgtgggcaaatgtgggctatagcacagttgtgaagagtagagggcaacttgaaagagttggctctctccttctaccacgtgggtctcagtttcaaacttatattgccaggcccagcagcaagcatctgtacccactcagctatctcacaggcccaaatatttattaggtttttaaagaagaaaataagacattgtctatttggaaaacactgcataatactgtattttcatattgtattccctcttagacagtcacaaaacaccaaggcaatgcacgatatttagaagtttgattgagttaagcattttctaaatgactaatatttacatttgccttagttactctctgttgctgcgataaaatactcctacaggaacaatttaagggagaaagggtttactttgacctacagttccagagggatacagtttgtcacagtgaggaagatgtggcagcagacctggaaagcatggtggcagaacaggaggctcctgaccacatggcatccctcaaaagaaagcagagtgcatgaacaggaagtgggttttggctattaaagccgtaactcccacccccaccccaccggtgactctctttctcaagtgtgatccttgtggggatatttcacattcaaaccacaaaccataatgccatttaacatcagttaagatctcatacaagaagtgtttatggaatatactttaagaaaatgtatgatgtcagctgttttgttgtaatcaaattaacaagctacatcaagaattaactgttaggggctggagagatggctcagcggttaaaagcactgactgctcttccagagttcctgagttcaattcccagcaaccacatggtggctcaaaaccatctgtaatgggatcctatgccctcttctggtgtttctgaagacagcgacagtgtactcacatacatgagataaataaataattcttaaaaaaaaaaaagaattaactgttagtaccctgctatctccatgagctctgagtttgatcaagagatcctgccctcaaagaataagatgaaagaacaatttaatatccctgacatcagtctcaggcctccacatacatgtgtacatgtgcacatgccacaacatgtccacgtgaaaatgcagtaatggctgtgatgctggattgaagagtaccgcgtttaagtagaaatgatgcagtacgtcatggatcttagctaggtgagaaggcggtactgttgatttctactaaggaaaaagagaaggaggaagttctgaatagggattagaaatagaaatgtatccagaaaaatgagtggggacaggaactgggcgtgtcaggcatgtgctgagcatgtgcacaccaaaacagtgactggatgtgctttgagcgctgatgtatggaaggtaggatgggggctgggcaggagcaagctagctgtgccctgcacagtggaaatgctgagtgcttttacactggggaatggcatagtctgatttggccttacaaggctgccctgcactttgtaacttaagatttttattgactagtcttttggaataatttagctttaattaagttggtggctttgaatcaaatcaaggtttccgtttcccattctacttgtacagttttctggagtatgaagattgcaatgccaaagcttgtttattatagggtaaactatagagatatatgtggcttattggttagttacccactgagctaacagtctggtctggtcattggttttgatttaacagtgagtgacagaagccggttcttttatcttagaacatggtgatatgagatggcattttgtagtaagcagatatactttaactttcttttagaaggctaatgactcatgctgcagaagtattttaaaagttttcttttaagctgttattttactgaaattatttttttcttttcaggacgtgtgaacttatatatttgacacaacccagcagtgcgtaagtagcatgtaatttttcactaaaatttgtttttttggactaatctcaaacatattgtttactttggtgataaaaacatactactttataagttaaggtggtaaaatcctgtttggatttgtttatcttctaaaaatgtgtgccttacttatatagcagagagaaccaattggctggaattcagtgttctctgtcacttttctgaggaaaatgcagttcattcattaagtttttattaacgatctatcacagggattttatcaacaaggctctgcatacttttgtataagaacaaatacattctcaatttagggatttggagagaagactggacccaggcgtgaaacccaacatcccacatggtggcttacagctgtttgtatttctagttctgtggggtgggatgcgatgacctcttcaggcccctacagacaccaggcacacaagtcgtgcacaaacacacagataggtaaaatattcctactcattaaaaaacttcatttacaaatcctaaattcctgaacagtatggcagtgttcttctctgtaaatagctcaagtaatcctggagatttcctgccccacgaaagcactggcattgaagagattgattgaaatgcaaattgtgcatatattaattcataaaaagctgttgattctaatgagtggtcattctatggaaaaattatcaaggtaaagtgttaagttgacaaaatctaagccacctaattgtttgggtttttttggttgttcattttaattagaaaaacagagcaaacaagtataaaggtaattagaaacaaatcagtgtaccgtgggctttatatagttttagattagaatcaatattttgataggcacaccaaatgagctaggtgagtttaggtgaaaattgtgcattaaagagggttgcatttcatttgtgtatttatttaactcaagtctataattaaaacaaactaccccaaagtaaagctggaatactttgtcagtgtctgacttttttttttttttttgctttgtatttgtttaccaggttatctactgaaataaattctatgttggtgctaaaaatttcttggatcacttttttactagctaaaggtaagtgaatgtgttattgaatgctgatgtgtcaaatataatgattaaattgttcacttggaatagtacaaaaattattcaattaataaatccttctgtattctctgcatggcttattaactgcattttatagttatgatgatagaacatcattcgaaatgtttaattcctccgttcctcctggtttctgtcttatcccccctttcttccctattttctatgcattctccttttttagtggtgttggggataaaagtcagggcctagtgaattttaaattataaaaatttatttaaattaaaaataaagtaataagaaatggaaataatatgtgtttggtcactttacatggagtttaaaatatttcctaagatagaatctttacttttcttttttagactttgtattttgagaatgctaatacaatgaaaaggaaaaagtagagtagttaaatgccagtacctattccaaattcagggtgaagtcttagggttttttcttctgacttggagaaagtagaaattgctggaaggagagtcagatggaaataagctatgatgattagtcagtaaagacgagattccaggataccgtgctgagggaaaacaacaggatcccatcacggtccccttagagaggagggagttcttctacccaataccagccagacctttccccttagcagctgagagcagctgagatcgggcatgtggagggtggtacagccggagacaagggagagggaagtctgcaacactgcacaccaatctaccttgaaaacagtgatagtaatcgctcttggagcatcatcctccctgccttcccactttctgaccactgcattctcttgtcttcatttcatttctgaagactataacatttattcatctgtaattatagttactatatgcctttactgtcagttctgtgtataagtgcattctgtgcccattgtaactactttattacagcgtctctgtttctgagtttttgagtttgatttatttcttagctatctggattgtaccatcaaggatttaacattatcttgtacatttatttacttactctgtgtgtgtgtgtgtgtgtgtgtgtgtgtgtgtgtgtgtatgcgcgtgcgtgcatctcaggcttggtggaaagcacttttgcctgctgagccacctctccaacctgtggaattttaaaaactaggtcttttcatgtcatcttccaaatgcttgtcatgttaatggcaagtgtccacagcatttatccctgaaagacaacttgactgtgtgtcctgttcttgagtcatttgtcccttaattaggaaatctgaggctcgagtagcgtccctgctgtcatttagttgctgagtacttgatgagttctttctgaaacgtgagatttaagtctgaagtgatgacacagtagataaagccatctttagtgactagttaaagtagctaaagttaaaacttgcaccagagtcctgctttcaatccacatggcagcgcacagtctccagtccagggcatctgttaccctcctttggccttcatgggcgcagacaaacatacaggcaaaaatgctcatatgtagaaataaaagtaaatgaatattaagtttgaggtttaatatctttactaggatatctgttgatttgtatcatactgcattcatttgtcttggaatacttattttaaaacaaacaattctgtttttcatttctgagacatcttaataatgttgtattttaagacattattttattcagtatgtcttctctgaacatgatatcaggttgttttgttcttcatatttttctgtcattttaatgattttaaatcttttttttttttgcaatgctggaaattgaactgaaggttcatgagtgtcaagcaaatattatgccactgagctactccctcaactttgtattacatacaggttctattcatcttgtctttttgtctgttttgagctaaactaattttgttatcctagttctgtcttagttcatctgacaccgtgtttttatataaattgagatcagtgagctcccttgtttgtttgtttgttggtttgtttcaaagcaagtacttggcatgtagctcaggctacctttgagctgatggttttcctgtctgacgtcccaggcactgggacttcactagaatgcaggagcgccggctttgtttgtctctttgcttattagatagtctcttcctattaggttctctgattttgtccccttttgtgattttactttttcttttgagtgtgcttttccccttcatcttactggttttctctgaggtagtttgagaggccctcccttcattcattttgcacttaacatgtagttagtttgtattccctatagaattgcagtgtgaagctgggcagtgatggcgcacggctttaatcccagcactcgggaggcagagacaggcggatttctgagttcaaggccagtcaggtctacagagtgaattccaggacagccagggctacacagagaaaccgtctgaaagaacccaccacccccccaccacccccgcaaaaaaaaaagaattgcagtgtgttataaacaggtattatactaccttgcagaaggtaagggtgagactagagaatttatctggaatgccaggagcctttgcagttctgagtctttgtaggacaaactttatcctcccctcttttcccaggcagcactggttccttttaccttctgtagcaatgacttctccctgcaagtcagaaggtggaaagctgagcattctgctgcatcgttgcaggctggtactgcctctcctggcccctggctaatgtgcgccttcctttcagaaggttgtttaccaggggagaggctgtttctcccggctttgcgcctttgcgattcgtactgggaaacacctgatagcaatctcatccctgtttcttcactagcttaccttttaggtaacatacaaatgagtttatagtgacattttcatatcattgatttttttctttgctgtctacactcctgtaatatttctttactgaattcattgcaaacattcttttgtaccatatcatatggacttaaaacacctacctgatgctgggttattaattttctcacatatttggcagtttcaatattaattgtcattattacaagcttagcaggtacccagaagagagaaagtgaatcagtcaagcttttcctttattttaaaatgtatttatttttatcttctatgtgtatgagtgttttgcttgcatatatgtatctgtattatgccaggtacctgtggagggaggccagagacggcattagatttcctgatataggaataacagacacttggtactaggagcctaacctagttaggctaacctggatcagctgcaagaacagcaagtgctattaaccatgagcaatctctctggcccctacacttctgtctttaaaaaaaaaaagagcaagggaatgagagagagggggagagagagaaagagccacaagaaaatatgcacttatatttttaaataatttatgtttgtatataaatacctatcatgcatttattttataagccttgtagttttgtgtgtgtgtgtgtgtgtgtgtgtgtatatatatatatatatatatatatgtatatatatatatatatatagcataaactgttaggatgttatattctgagtttgttgtttcttgatggttttggctactgtaatattttatagggggttaaactgagcatatgagatattttataagtattttaaataaaagacaagcatgcattgtgcttcagcatggtttctggaaaatgtgagttttgcaagtcataccaagataggaagtaaattttacaaaaaacagtgccagttgattttaataagaattaattattgggggttggagagatggctcagcagttaagaacactgactaggggctggtgagatgtctcagtgggtaagagcacccgactgctcttccgaaggttctgagttcaatttccagcaaccacatggtggctcacaactatctgttattggtatctgatgccctcttctggtgtgtctgaatagagcagtagtgtactcatatacattaaataaataaataaatcactttaaaaaaaagaataatcattataatccttaatcttaaaatccagagggtagattaatactacctaattttgtaacttcatttatgttttaaatctcacttttattttgtttttataaaaaagagaaaagtctttattgtggctgtagcgattagcaaatgaatgagcatatgaatatattactacccacattttttttatctaatttaaaggtaccagtctctaacttttctttaaagtgggactcttgaggccagtgaaatggctttgcatgtaaggcacctgccatcagcctggcaacccgagtttgtcatgggacccacggagtaaaagagcaccggctcctgcaggttgttctctggttaccacatgtgcattgtggtacatgcatacatacatgcatgtgcttacaaacatatgtgcatgcacatacaggtagctaaagaaataatagataaatatagttaaaaaattttaaatgtgcatcttttttattttaggagaagtattacagatggaagatgacctggtaatctcatttcagctaatgttgtgtgtagttgactattttattaagttctcacctcctgcactactcagagagccatacagtaagtattgtaaacaatacagcgctcctctccttttcttcagcagttccgtactgactgtctataggactggtgtggtccttaaactgaaggatgatgaaacattatcaggtgtggactcggcctttgttctcagctctggttttctgtgacagaatccaatgagatgaacttactgaaagaagaggttgttttagctcacagtgtgggaggtcctatgagggctccatgacccagtgtaagggaatgccagtgtggggaggtgggagtgggtgagacggtgggtgagggagcacctcatagaagcaaggggagaggggatgggatagggggtttccggaagggaaaccaggaaaagggataacatttgaaatgtaaataaagaaaatatccaataaaagaaaaaaaagtaactattgctgatctagttagataacattaaacaaatctaagtgtaaataaatcagtttcttggaatagaaatgtttctttttgtcaccacaagaataggactttgaatcacttttatactatagaaatataaactaaactagggacaagccgattcctagctgctggaatgatagaagtgctattagtagatagcagatcaagacatcaagtctaaaggtactgttgaagaggatgaaatggtgaagcctaattcatctctgtgaacagtgacttcctgggaaaacataacctggaaaattttgagaattattcaacatattgtgcttctaggacatgtagctttcctgttctgtctcttgcagccttctgtccctttgtctgcaagggcccttaagccgtaaggactctagagttttgtaggtttgtccatcgggactgggcttcacagccctgcatttttgattggttgtgattttctgtaaaggtctccatctgtgatacagagaagtttccttgataaggagtgaagagtacttatctgtggtataaggacaaatgtttatagattgttactaggaattatactggtctaataaagtgggggttgcaggttctcctccagtatctgtaacatcactagcccttaggtagttggctaggtttcaagtaccaggcatggtttccttattgttgagtgggtcttaagttcaattagagagctgggtaataatggtagatgtgttttagcttttgagtattctccacactgatttctagagtggctagaccatacttaatcacctgtaatcttcttaatagctgagtctactaagtagttggtcagcaacgttcaaaataatacaggttatttaagaaaatcacaatttgtcatattatgtttatcttttatttattttttttaaagatcacactttggaattttatttttattgatattatttgtgtgtgagggggtatgtgtcgtgtggctgagtacaagtagaggtcagaggacaactttttagtcagttctctgtttttctgtttgtgtgagtcacagagatcaaactcagggcatcagacatgggtggcagtggcctttattcatggattcctcttgctatgtacttacattttatattagatctgttttttgtttgtttgtttgtttttaaacatatgtactggtgttttgccagcatgcatgcttgcctggtgcctatgaggccagaagagggcatcctatcccctggaactaaacagataattatggattctggcaattaatcctgggtactccaacagagcagccagtattcctaaccaccgagccatttctccagtcccctacagcacaagtgggaggattatgtctgggcctgtgtgtaaaaattaaaggacagattccaggagtcagttctttactccagtgaatgggttccagggattgaactaggttgtcaaccttgatatcaagtgtctctgccactgagcaatctcagcagcctaggaaatatttttgctcatacatcctgagtaaaatacacttacaagtaacataaataattttttgtcagtctttctctgggtttatgggatgtagctttgggggaatgagattgggagtaaaagaaaaatgtgagttgcaaaaatttgtagcagcgtatacatcacaacagatattcaagggcagtctgtggctcagtgatagagatttgtgtagcgtgcataaagaccctggatttgattgccagcactgcagaacaagagtgtcccaataatcatgaattgataagttaaaattgttatatagtaaaccataataagcagaataaaattctaccaggattatttcagacatcttagttataattacagtgtagcattattttataatttatctaactttaattattttggaaataggacctcatgtggcctaggctggctttgacatcgctgtgtagacagtggtggtactgaattttgattcttcctccacctcccaaatgctgggattacaggtctataccagcactgctggactatgtggtgctggcaatgaacccagggtttcatgcttttctaggcaagttactctaccagctcagttacatccacagcccaatttcattaatggtcaatgtggaatacacaattgtttttattctaatttaccatttttacagaaacagctgcaatccccattaatggttcacctcgaacacccagaagaggtcagaacaggagcgctcggatagcaaaacaactagaaaatgatacgaggattatcgaggttctctgtaaagaacacgagtgtaatatagatgaggtaatttctcttacactttatttaaaacagctgaagtagatatatatgctaagtctgcctgtcaatatatacttcttgtgagcatactttctttttttaagtaggaccacttctattacataggaacaaaattctgggaaaaaaacagtttcatacgttcttactttgcttttaaagagaatagctcccttctgtcctcactggattgtagcatgaagatgatagttttcaaatgcattattcttctagtccattgaatttactagtatccatagtgttttcaaacaccctgccaagaaacctcagtttctcacttccctaaagctaaagtcatctagcattcattttctgtttagtattttatgactctttccaaatacaatatcagctgttaataactgctggggagaacttaaacacatatagtaattattttcttcaagaatctaggcattgaaaggacttttacaggtaatgtacccacgtccctgtagtaatgagcaggcatgtaccagacactggttgctcatcactcgctgaacctttgatagcgtttaggacatgtctcccaggctctgttcatccagtacattctttctctcacagtttacttattgaaattttgtctgtaattcgtcatcagatgtgtgaagtgttgcatctttggaattctgacaactctgggaaggagtaagcccctgtttccagtactgactaaagcagtgctagagccatttccagctgtgctctaccacggtgcttcttgctaatttatgaatttctgtatctgtataggtgtattgcatttacatagtaacccaggtgttcactttccctctttctacggtcacaagttacgcatgcaaataagctgacaaatgtcgtacaagtagctctgtctcaatcctgctgtttagtcataagggaacaaatagtagtaaatacattttctatttccctggctttttgtaattacttaaaattaattttattttgcatattagaataaatacgtttttcaccttaaggaatttattcttagaatttagaatctttacatatttaatattcaagcatagctaataaaaactaatattttaattgatacttgatagcatttgtggatatataactagtggctaattttaataattgattactaaatatcttaggtaagtgtgaacaaattaggaaacaaaaatagtgagtgcttcctagacttaattcctgtgttaattcttatttgttagaaaaaagaagtgggaaaaaaagttagattaagaaaagcaattggttaaaaattctatagcacattgcacttgtagagcaaccagtaatctaaatatgttttataaatgtcattttaaaatgttggtttcaatgtctcctcatgccattaatcccatttcattaacagttttccacttaaactctgttttatgaaatcattattaaaaagtaaacgatcgaatcagttataagttagtatcattactttgaatgcaatgtaagtggcaggtagcactgctaatgtgagggttactaggactagattttattttgttttaaattatatcatcatattactggataattttagatttatatattcaaatgttgtatttttcaggtgaaaaatgtttatttcaaaaattttatcccttttataaattcacttggaattgtatcatctaatggacttccagaggtaatttgaaaaaaaattcagttaaaactagtatggtttgtttgagactttgggggaatggaataattgtttacaattcttaaaatcaatttactatatgtcagttgtttatttctcaaggaaaactaagctgagtagagctgtaaagacagcttttctgtggtgacaaaggttgtaaagatgtacattcagatgtataagttaccatagtttgtcagaagacacagaattagaaagctggacagctggttcttttacctggcttggtaattctatttaggagtttacttaatgcttgttatgtgttcaatgtgtgcaagtgctgtgctaggtcacgtggtacagagatgagccttcattcactgtccttaaaagtgctagtgggagggagggaagagggcagatgtgggatgggggtgtggtgaaggggaaaatgggaagtgggatatcatttgaggtgtaaacgaatggaatggataactaaaaaaaaaagtgctagtgggggaggcagacgtttaagttagaggctagcctatgtgctccctccctcttcccctccctaacaaaacaaaacctccgtgaaatgaagagtttattctttgaaaagataagcaagattgataaaccttgagccaaatggaccagaagaaagacccaaaacttaataaaattaggtgttgaaaaggaaacaaataccaatgaaaaacaggatcattagagcaccattcaaaactaatattcaagccaggcagtggtggcacatgcctttaatcccagcacttgggaggcagaggcaggtggatttctgagttcaaggccagcctggtccacagagtgagttccaggacagccagggccatacagagaaaccctgtctcggaaaaaacaaacaaacaaacaaacaaacaaacaaacaaacacacctaatattcaagtaaaatggaaactctaggaaaaaaagtggataaatttcaggatatacatggcttagaaaagtagagcaagagtatataaacagaactgttagagtgatattgggaaggtaatgagtctcttcactagaaaagctcaggtccaggtggactcactgctgacttcaacaccgttcctcactattccatgacccagcaaaggaaggaatgccaccagaaccgaaacaaaatgacaacccacagcttcttcccaggccatcctagggaaactgcacgcagaagacggaagttagatcctagttctcatcccatgaaggtcaaatagctgtatcaacattctcaatgtaaacagaaactaacactgctacagaaaaccataggcagaatgctttaaagtagatacactatcttctgagaaaaatgaaagattacagttgctcagcaatcgaatgaaactaaaaggcactgcatgaaattgaatgaacaaacagcctatggaatgagaggaattctttggaagctatcaatctttgtatatcatatatatataatgggaatgtaattagtctagtcttgatggaatcaataatgaagttctgaaaaaaactaaaataggactactaaatgacccacctgtatcccttctgggtgtatgttccagagatgttatgacagtataccataaatatccttgtatagccacgcttattgctgctctagctataatagctaatttacaaaatcagtctagatgtctcttcaggaaatggataaagaaaatatgatatttatacacggagttttttaagcctttggagaatgaaggcatttatgctgtttatgggaaaatgcatataccttgagatcataatattaagtaaaataatataaactcagaaatgtgcagattatagcatatcagtgattaattctgagttaccaataatacaacagtgtcacattaaagaaagaaaagtacttcttggagttgtttaaccaagaaagagtccagatttgacttctctacctgacactcattgtgtcttctgtactgtctactgtgcatctgaatccgtgcctgcctaaaggctgtccttgtgtctgtctgtttcaatgtctgtgattgtgtatgtctgttgtttgagctgtgtgtgtttgtgtgagagtgtttttccccaacaaagagctttgttctgtttattgaacagcatagaacacatcgcatgggggaagaatgggatacttcaaagaaatctttagaagtttaagcaagggattaattcactggctccaactgattgcagccaacccggataacaaagacctttttttttttttcttttttcttttttaatcaagcagtatccataaagggttgttttgaaatgttgtcacggattttaggaaggttttcttcagctcctgcttttgcagctttcagtaaattaaatgcgtgcattatctaggtcagaggcacggaagtgcatgcaatttaaaattgcagctatgcattaccttaggttgtaaaaattgattaggtgggaaattcaaggcaggtaaggttggtggttggttacattgttgtcttaaaggtaggttaagcaaacagtctgagtacacagtatcttagtcttaatttgtaagtggcctcaaggtatattaataactttggctgtgaggtacagcaaaaattccagtctcttagaatatagtagatagtttaagaatattgcatcaccacagagaaaaacaaataccttatgtttgctctaatctgtggattctagattttacatagatgcagaaaaccctgaagttcattatgacaggagagcagcagaagacttggggaagggaagaaagagtatgggagggtttgtacggccagagtactaatgctcttgaaagacatgatgaaaactatatacaataataacacaccaaacaaaagcagaacaaacaaacagaaaacccagagataacaaagaatctccaagagtctgacggaagtatgtatgggttcttgtttcctgcggaggactttcccatccaaactggggcaggtgaatttcctggaacactgttttaaggtggtgtgatttctgagctgagcatgctctatgcaagatggcttttcaagtgactgaatttggtcacttcaaaggctcagtggtatgttgtagtagaacctcttcaataaactgcaaagtttcttacaagattgatagaagagtggtccactactgacctgggaaagcaagaagggactggtcttttttgtctttcgtttgtttgtttgtttgttttgtccttgttttttgatacagggtctctctatgtagctatggctcactctgtagacctggctggctgtgaactcagagattgccttcttctgccttccaagtgctgggattaaaggcgtgagccggcaccacttgtctgggacctggacttttaatagtcttattcctaccttagtcattagaaacccgctgttctcaactctacagagtatcctaaataaagggttggtttcaatgggtaccttaagagaaactcgacattttcagtattgcacatataattgtcagtcagattgtgcttctctaaggtagggcaggagtggtgactaatcttagccatggattagtcaccactctgcccagtatatttatgtaggaaaaaacacacaatttgcattcttctacctttttttctttataatgcagtttttgttacctcaagattaagcattttttaaaaagatttatttatttattatatgtaagtacactgtagttgacttcagacacaccagaagagggcatcagatcccattacagatggttgtgagccaccatgtggttgctgggatttgaactcaggaccttcagcagagcaatcagtgcccttaaccactgagccatctctctagcccaagattaagcattgaatttgaaagtcccagaaagggcaagggaatgtgggtcagtggtagagtacatgtcaaatatcctgggttctgtccccagcactggaacaacaacaaaccaaactaggcagggaacactaaagggctcaagtagtagtggaatgtgtgtttagtatgtacaggactcttggtttttccctaccactagaaggaagggggagaaaaatcacagcaaatcatggttatagtaagagcccttaatgatttgttattttttttttaacactgatatgaccacaagtgaaaggttctactcagaacacaaaagtattttagaaggttgtctaaaattaccttcatactctgcatacaataatatgtctttctgacataattttattttgtacttagatgttgtcattcagacatctcatttttatatgccagtattacaaaattttaaaaaatttaaaatattaaatgcttttggttctaaacatgttgggtaggaaatggtcaacctgtgatgactttttttgtgttcagcactattttgtgccattgatgaccctcatctagctaaaattctaataagtgaaatgtatatgtaaaatagtaaaaaaataaataaataaagtttatgtgtaatgttctgttctagaccgatcttactttgaatctggactcagtatgttttaaaattaaatgtacatagtataaaagttccttaatgaagtctacttatgtattctaaaagacataacacaaaaaggaataactgccaatttctttcttttgaggttgaaagtctttctaaacgctatgaagaagtttatcttaaaaacaaagatttagatgcaagactgtttttggatcatgataaaacacttcagactgatcctatagacaggtattgcaatgacataatgtttatatattggtatgctttttatttggattaataattactcagatatgttatgtagattttcactaacttataaatcttttaacatcttttgtagcaggttattttcaaaagtctttgtctagtgcaaaggtagttctttaaacatacaattaataacaaacagagatttagtgtaaagtatttcttaagccaattttctgattttgtgtttgtttgtttgtttggtcatctagataagttttaaatgtgtaccaaaagaaaatggttgaattaattagtttactcaagagtttcctctttcattccattcttttttatatgctgttgcttaattgatatttcaaacaattttaagaaaatatcctcttgacttaccatgtagagatttctaaaataggaaatggctgagagtaattacagtttttaactgttcacatataaagctaatttgactctttaagaagaattactttactatgaaattaaaacatataatttagaagttaaacacagtaaaatgtttctagctctatctaagtagaaatgaaatctttggacagcatagcgcactggaaaatgggttctgcattgttttaagatctcacgaagcttagccatgaacaccaccagccagaaatcagcttccactttccagaaagctgtgccctgtggttggtgcacgattttctgtaaaccatgaaggagagccatgctgaagaacggtggtgacaaaaaaatcatacaggcagcacttatttcatagtacttaccatatagtgaacattcgtgtgatgctctcaacaacaggaattaattattgttattgattattaagtaataactgctttttggtgcataaacacaaattgtaaatttcagtatgagttactttacgtatcatttagttttgaaacagagagaacgccacgaaaaaacaaccctgatgaagaggcaaacgtggttactccacacactccagttaggtatgccttttcctgggtccagttttcataattgttcattcagactgtgttagtgtttcagacttgctctttgttggactttgtatttgcacagcatgtaacaaatgtgtatggaggactgttttgtcgatttatgacttgcttatgttacatatataacttggttgtttttatgtataagaaacataactttaaaagtatgtctcactcagaaaggagaagcatcagtgtttaatgttgcatagcctaggttacttcatgtcccttcttcactgctatcccactttggttctaatggtcagatccagctgagggctccacatgctttcccccgtttctgtccaccctcacctttgtgcaggtcagctctctccttcttgaatttgtttagtatctaactgatcgtgtcattcatttcttaccactgtagctttctcctaccaataaatctgttttccacagagcctggaaataatagtctgtgaatgtaaattaaattgtgtgtgactgctgcttaaaccctttgattgcttctacttgcatttagaatacaaagcgtattccttaacaatccctaagaccttacatgacctgttttccgttgcctagccaacctcgttttgttcttgattactctgtgttggccacacactggtctttttccagtttttgaattgtcaaagctcttttgtacttgagagccttcatacttggcatttttttcttgaaattcttctttctgtggactgccatctgctcttcctttatgttcacgatataactgtaaatccatttacatatttacgtgtttttcactaataccaacaatagcctttaagttgctttccatatggaccatgggtttttattcacagttttagtaattaagacctgtcatggtgcttggtaccttgcaagcaagcagtgagacctatcagctacagtaggtatgtgaacaggctcgttttagtaacacaaagtgtatggaatttgtctcaagtgaattttaccaagaggtaatattatataaagaggcactgaaatgtggcacagcataatggatctggggactactagctgctctgtactaattgtaagatggggcataaactgcaggaatggaaagcaggtattgactagtatgccatcctcactttacctagtgcaatggtgtggtctgtgttttaaatggatgataaacacaaggaaagataaacatagatttgatttctcagagaagtttttgtttgtttgttttcctggtgatcaaattcaaggctttgcacatgctaagcaggtgctctatcattgagctacaccccagcccagactttagttttacagctttacctatcagtggctcatggaggaaaagtgaagacagacaggttagaaataggactgtcagtgcaacttagtgcttagaccacagtgcgcaggagaataacctgaggattcttttcctgtccatgcctcgtgagtgggaatctctacactgaccttttggagtagttcagctgaggcatgccaaaggactggaccaagtgaatagtggtaggaatgaaggaccagggacaggtgtgacaaatgtgatgctttcatgtttcacagagcaatattaacaggatgtgtgcagattctagtaagcagagggacacagagcacccacagattggggattacccgttagaaacgtgagaacacatggatctgcccaaagccagcaggcatgaaagcaagaagggaaggcttgacccgtgaggaatgcagtcagaagaaccagataatacaggttaggctacaattagctgataaggcttggagcctagagcggaaagccaagaatctgagggaaggtaccagtgtcaagaaaaaataagtgctttgagtcagttgcttcaaagaagtctgcagttttgtttttagtacttggtcatttgtggcattagtcattgtgacttaaattaatctctagtaactataaaaatgtagtatgtgaaatatgaagtatagagaaacctgcgaatatggcatgttttgtattatatttaatcagcctttcatctctaaatggtttgtggttctttgcagtccatacgatgtctcaaaagcaaagctacaacaccaatctttactatgttctataaacacaagtgtatgtctgcatgcaaagttatagaactgtggaggtcctgagaaactggcaaattttatgctttagcaatagtgacttttaaaactatcactctcttcagacaccccagaagagggcatcggacctcattatagatggttgtgagccaccatgtggtcactgggaactgaactcaggacttctggaagagcagccagtgctcttaactgctgagccatctctccagccccagcaatagtgacttttatggttactcaagaccttactctcctcccttgaaggagtaatgaaggctcttttaattcttcacatgagtttctaagtatcttactgtctttatttcaaagtgtataaaatttaaggacagacatagtgatcctttgtttaatctccagatttgggaggctggatcaagagggttgttgcaagcttgaggctagcctatactacacagtgaagtcttggagagtggggtattaacatttcattgtaatagtttcttgaaagaacagtattttgatgccagttatgtatccatataatatgaaaatataaggtatattttctggaaaacatcattagtttgacaggtaattctctattgatactaatggtacttagttttattagtaagtgtatcagttctgcaattatacttaatgatactacttttctaaaagacttaagtaatctgtaatttttaaactatacatggtaagtggattttattttatttagaacttattcaagatacatggaatacatggtatgttaagagatatgcttaataggatgcctttactagtgtttccatttttcataattgttttggctatcctgagtcttttggatcaccacatgaattttaagattatcattctaacttctgcaaagaagtgcattggggttttgatgaggattccattggatctagagatggcttttgggaggatagttttattcataagcccatgctctcacttcacctaacttgacaaaggccaaaatataccctgaagaacagacagcatcttcaacaaacactactggtcacacgtagaaaatgaaagtagttccatatcttgtaccttgcacaaaattctggggtgagttcctcctgcctttacttccttcagtgcactgtgacttaggatgtgtaatgcaaattacacccaccccccaaaaagggatatgctcaacttatgtgatagctgtgtttccttcttcctcgttttctttcttagtggcttaatgcttcttcctcggttttcttctctaggactgttatgaatactattcaacaattaatggtgattttaaattctgcaagtgatcagccatcagaaaatctgatttcctacttcaatgtaagccatatgtaaaatatcacttgtgatatcttataagaaaattgaagttagaagctaaagtactaagtatattttaaaacactttttttttaatccaaaatgtacttaatttggtattttatttgttgctctttgaactgctccaaatttgatggttattttatttaaatattgttaagtttttcttatgtttgctactttccttgcaactgaggcacttccctctaagacactctctttttcccctccctccctcccctcccctcccctcccccttcgctccccctccccctctccttccttccttccttccttccttccttccttccttccttccttccttccttccttccttcctctctctctttctctctctctttttgaagcagaatctcaccatgtagccctggctggcctagaactggatgtgtagatcagtctggccttgaactcatagagatctccctgcctctgcttccccagtgctgagattaaaactatgcatcacctcttttttcactcccttttccttttttcccattcctttgtcttccttcacattgtacatggatctatctgcatatatgtgtgtttgtgaagtctagggttcaccatctggtgtctgtcttctgtagttcttgacttcatttctaaagacagatctctcactgaacttgagctcactgagtcctataccagccgtcagtgagcccccaggattgggtcctctggcttctgcatcccactccgagatggcagatgcatgctgccacatcaggttgtcacatcaggctgagatcaagcttaggattgcacggttgcatagcaagtagttcacccgctgagccatgtccccagcccatcttttctctctttctgttttctactactgctcaatatatatgctttttcttactaaatttaaggtagaatacaaagtaatgagactcatgtcatattcagacatatagctcactatatattataatttatctattcctcagttctctgaaatactatcttcctatttttaagatcccattgctgctaagtattctgtgagtctaactattgtttgttttagtttctattagctaataggacttacctttcatatagcccttcccaatcctaggagaccctaaatttaatatttgaaagctcatgttgtctttccctcagaaacacaagacagaaagagtggtaactggtgactggcatctacaagtggtcccctcatttcgtctcttgcttaagggttaagtgacagggaaatctatagtcatgccacacctggctgggagcctttacaaatgaattaatataattaagtgccttttatacttgctaatgttctgtctcatactggaacaagtttttagcatagtatgttgttctcttctactgtataatccagagattagcagaacaagttctgtcatccgtaataattgttcaaatatgattttatttgcccaacttctataaagtaataatttgccatatatctacccaattgcttacagcttttagcaaggataatgtagatactaaagaaaaataatctctcatccaatattttcttgagtacttgctcccagctttgaagtaggtaggagctcccttttatttgagttactttagttaaacaagaaattcggtttcagggacattttcttaaggagaatttatagcttagctttttaatgaatttgaagcttcatgcactgtcagaagataattgatgtgtagatgacagatgggctcaggcaaacattgtggagaacataatagattttgtgtgtgtgtgtgtgtgtgtgtgtgtggtttttttattttcctcatcttcctcctttttctctttggtttggtttttccctctttcttctctcccttccttcctccttttcttcatccatccatacattcatacatacttatatccacccattttgtcctcaaactcattatttagcctctgctgacttagaactcaaaatcttcttgcctctaccatagctggaaattttacttctttctatattcagttgtcttcatttttctcttttttggaaaaaaataattccatctttcctatacataaagtcttagaaattatgcaaacattttgacataagtaatattacactgggaaatggtgtctttgtgtgtgtgtgtgtgtaagtgtaatgttcctaagatttgtttgctattttctttagggaatacagagttattgacatcttatgtgcgttacatttttagtgtcactgtgcaaaaagaattataatcttaaatttagaaagtttatttttagtgtattttgaatgtatatgatatatcaagattataaaaaataaaattagtctgattataggagacaagaatgtttgtaacacattttagtatagcatagtataagttatagactattataatatgtcacttgtaactattctcctgacttgcgtacctgaaaatacaaataaatggttttcctaattctgcattctcttaaagcacatttcactaggaaaagaaacaaaactcaaatcttgcttttacttcttcatttgcttttgagtagtaaggttgtatacatttttaaaaagtatttttttaaaactttttaaaaagtttggggttttttgttagtttgtttttatgtatgtggttgtttttgcctgcatgtatgttaatgtgctatgtgcatgcagtacctgcagaggccagaagagggcattggaacccctgggactcgagttacagagggttgtaagcctccatgtcaatgctgggaaccaaatccatgtcctcggaaagccagtactctaaccgcccagcatctttccaggccactaaagcaattcataactgaggatactttatgagaacatatgatagatggaaaggctgagagatatgttttgtctataacctttatttgtttaaaacagctcttcttaatctgtaggttgcaatcccattgggggttgcatatcagatatcctgtatatcagatatttacattatggttcataacagttgggaaattagttatgaagtagcaacaacattttatggctgggcagacaccacaacatgaggatctgtattaaagggttacagcattagcaatgttaaaaaccactggcttaaaatttcaataacagccgggcagtggtagcgcatgcctttaatcccagcacttggtaggcagaggcaggaggatttctgagtttgaggacagcctggtctacagagtgagtgccaggacaaccaggactacacagagaaaccctgtctcgaaaaaccaagaaaaaaattcaataacagtgtactgaataatttttgtgtctgacaagcagtgggattgcatgttgactggtcatattctgtagtgtcagttgctttgttatagtagaagtgtttacacggtaacttcaatagttatttatgtttatatttcttaaagaattgcacagtgaatccaaaagaaaatatcctaaagagagtaaaggatgttgggcacatctttaaagagaagtttgctaacgctgtgggccagggctgtgttgacatcggagtacaggtaactcgaggcacttctgttggtccttagtgtagaacgcatcagctgctgccgcctgtgctgcggtggtgctgtgtggtgggatacggtagtgggatacggtagtgggatacggtagtgggatacggtagtgggatacggtggtgggatacggtggtgggatacggtggtgggatacggtggtgggatacggtggtgggatacggtggtgggatacggtagtgggatacagtagtggcagatggtgcggtgcgtttgctgctgcttacgggacactttaggaaggttgaggaccactgggttaagtgattatgcacagaattcttctgagtcttgttttagaataaaggaatagtcttgtgtgtgaatgtctataattcaaacaccaatttttcttttctttaattttagttgatgagaactaatcatttgtttaaaacatttactgatttaatcaacttcggttttttgtttttctttttctctttttggcctgtgctagtatcattgagttttacagacagaaactattcttttaatattagctatttcaaaaatcaatattctgcatcaccaaaaggattatactagatgtgtaaaatgtttaaaattgtactgggcacatcgtctctagggagcaagtgacaaaagctagatgtgagcggagaagcatcagctcccagacatactaagctggctactgggagtgctcagcacaagtgtatagtgagccttagactgtaaacaaacgagcctttgtgatctcttgctagccacattcctagaaggagcagaatgtgtttcaataaaagactttaacaaaattcaattaactttttgactttctgaaacagtaaaagcttattatttttccttttgtttgtagcgatataaacttggagtccgattgtattaccgtgtgatggaatccatgcttaaatcagtaagttaaaggaaacaaaatagcaaaaaaatttaatgctgacacaaagaaagtttcaattaaaagtttttttttcaattatctgttttaggaagaagaacgtttgtccattcagaattttaggtaaatattttctcgttttaataaaacaatttctttctataaaagccctatttaaaattattcactctttctccttttagcaaactcctaaatgacaacatctttcatatgtctttactggcctgtgctcttgaagttgtaatggctacgtatagcagtaagttaaattttaataaataagcactgtagcttaatttaaacaaattaagttgtgttgtggtttagtgttgctttgttttttgtgtgtaactgtggtgagaaggaaaagtcatactgtagatcaatatatgctgaacaatgtaattggcagttacagctatttaaatggtttaacatgtcagtcagtcaggtcatctgggggatagaattttatgaggcttctgctctgagtgtattgagttcaggagaggcagctaatgaaacggctacaaaggcttgtgagccacagagtgttgaaggacagcagtgcttctgtgccccgctgttaggcctctgtgctcatgagaccaggagcaggaggctatcagaaactgaatacttcctaattggttgctgtttttataatacctatgacaatttaatgatcatagaaaataacaataaaggctcataactgtttttaaaaatataatttgaaaaatgtattacttttcttttttaatatattacttttcaaacattgttgcaaatattaaaatgttgcacttgcagaaacaaaagaggaagagttatctaaagatagataaatagataaaggaatttaaattagtaatcactgaaactgaatcttcataactgcaatctgcgcatttttaagagaaatcattttctaataaagctagcaaattctcttccatttccctttgaagtgttgagaactgaactcaggacagggactaggcaacccagccccctcatatttactggttctaagaaaggatctcaggaggcattgaactcagtctgtagactgactaggtcttgaacttgtaattctcctgccttagcctcttgagtatctggtattataggcctgcagcatcgggctcaaagaagggcctcgctgtgtagccctggctgtcctagaactcaatatatctgtagaccaggctggcctcaaactcagagatccacctgcctctgctgggattaaaggcaagcactgctactgccaggctaattagcagaatcttaaaagcatcactagtcatcctttaaaaacaaatccttttatgttcatgagtaaactgtaaactgcagttgtcctcagacacaccagaagagggcatcagattccagtacagatggctgtgagccaacatgtggatgctggggattgaactcaggacctctggaagagcagtcagtgctcttaaccgctgagtcatttcatcctaaccaagcagtaatgttagttaaagtggatattataatgaattgctggtaagatacctgcctgggtgttagtgtagggcatgtaaacttgtgcaaatcttatagaaactatgattcctatctctaaggaaaatgtgtgcacatacacttaaaaagttggaaaccagtttcttgagagtctgtagaccacagaataagaaatacctgctgtaaataaaaagtgcttacccttttttttctatatgttggtttgtgtgataagatcttccgaatctcatcatttcagacaatactatttcatattgacacatttttcctcttgtttttaggaagtacattgcagcatcttgattctggaacagatttgtccttcccgtggattctgaacgtacttaatttaaaagcctttgatttttacaaagtgattgaaagttttatcaaagtggaagccaacttgacaagagaaatgataaaacatttagaaagatgtgagcatcgaatcatggaatcccttgcatggctttcagtaagtgattagctaaataaccgaaggtattcatgcgtaagtgacctgttagcgagcagttgtttatttaatgaatcacctgtgttcagcgcaggactcaagtggaatattggaatggcctgagtgtgggtgggtgtgagttcctgagtgtgagtgcaggtctgtgagctgctgcttgttctgctgtgaacaggccagctggcctgctgagcaacttttcatcaaagtcggcgctttaaagtcggagtcttgagtgttgaggtagtttatttaaaatccaagtgttattgttcataatataaatgtttacacttcgctgggcgtggtggtgcacgcctttaacccaagcactcaggaggcagaggcaggaggattttggagttcgaggccggcctggtctacaaagtgagttccaggacagccagggctatacagagaaaccctgtctcgaaaaaacctaaataaataaataaataaatgcttacacttttcaacaaaattaaaagattatatacatttttctgttttatctgtttgatcattttgttttagtcataaagataataatctgaagtccacagtattatttaatggtagatactgttttttatatcattataggagtggaaatctttatgtgccatgggcagttagttatagagcatgcaagctacttttatcttaataaaggcaataaatcctatatattcccctaaagtgctgttatattcttcaagtctactttactaggtaagaccttgtggtttaccagattttcagattttaaaataataattcaaaccatgttgcataataagaatatttattttgaacattgatatgaaatgaaagaaatttcaagttttggaggatcttcggtttggaattttttgattaggaatactcagccagtgaaagtctatgaaaatatttttattttttatatgttgttaatgtctgattttcaaattataaaatcatgagattgatagtagataactttaagctgagtcatgatattgtgtattttcctgtaagaatgattgctattatattggaaaatgcatcacatggatatacttaagctttaacagaccttaaaaagctgagatttgggctggagagatggctcagcggttcagagtacttccagaggtcttgagttcaattcccagcactcacatggtgactcacagccatctgtaatgggacaaagacagaaacggtgtgtccacatacataaaataaacaaatccatctttttaaaactgaagttttggtgcctgagaaattaagagcactggtccagaattttttagttcaattctcagcaaccacatgatggctcacagtatctgtaatgaaatctcgtgccctcttctggggtacaggtataggggggggatgaggaggggggaggggaagggcgagggaggaaaacatatagagggtccgtatctccaacccaaatttcagttttttaaggtctgtgaaagctcacgtatatccatgtgatatattttctaattttccaataaaatggcaatcattcttacaggaaaaatatacaatatcatgtttatatgacatgacttatctcagttatccactattaatttcataattctataatttaatttcaggtgacaattagatgagtttttcattaactgagtacaactatgtaatgaatactcaggtcaagacctacagcaacttttgattctgtatcattcatatacatacatatatatatatatatatgcatgtacatatatatatatatatatatatatacacacacatgtgtatatgtgtatatatatgtgtgtgtgtaggtgtagtgctaaaacctgatgagaatgtactcacattatattgttgatggtaggtgggatcaaatgaagtactaattattttcatctctcccctaaaatatatgtgcatgtgttcatgtactggggattgaacccagaccagatagtgtcttccttggtcagctccatcctgtgcttgcagcttccctcacatggtgtcccatggatcctctggtctccatggcaacttaggcttagctttcatatcttcatatattattagcctatcagagcctccttgcaactgaagaccaagtgctcaaaacatgagaatatggaagacattttaagtcaaagcagatatgttatgactccaaaatatttaaggagttgtccatttttaatatggattctaaaaaaagatttgtttatttttcctttatccatattaatgtttctttgcatgcatgcatgcatatttatataccacatgcatgcctattagatcccccaaaactggactcatagatggttctgagccaccatgtgggtgctagggataaaaatcagatcatcagcaagagcaacacatactcctgactgctgagcccaagagttttcagtttaattcctacagtcacgttggtttctgccagagcatgaatgggttttctctgcctttgactcactgtgtttcaatatttcgctttgcttcttgtcagaacatttatctgtggccatacttcctttacaggctcactatgtttaatgcctacaatgtctaaagtcatttattgactttgtatcttattagatgacttattagatataaaccacttaagacagtgtatggggcctggtgatagcagatgcagcagttaattatagaaggattagtaagggacagaggtggtcactttacaatgatatccaggtttctggcttgtgtaactcagtggtagtgtcatttaagaaaatagatagtctgggttgtatgtaattttctttaggataaactgcaatttattatattgagtttaaaacaattttaggccattcaaattgaggtcaattgtatgtatgagttgagattaggaaagaatctcaggctaggaatatgaatgtgaaagctaccagacatatataataaacattaccaatctttactgccaaattatcttatgctggccagtttggtaagtactttctgaatgttactacagttttaaaaattgatcactgcattctgatagtagtctaccaagtggtaatattctagatgaggaaatgaatacctagagaagcttgttatatttccccagaccatacaagctaagtggcagaggttccgtttgaatcctgatgtgctttgtccaaggctgagtacctatttagaaaataggtaatatcaattaaggagataatgtaatttggggaaagaaggctacagatagaaggccagggagctctaagatcaaaaggatatacaggaaagaaaatattccaactacaaaagaaagtgaaattgaacactgagagaggagttaaaagcatgagtgggagagtgtatggtctcaaggagtgcatgcctacttcagacacggtagaagcatccagaaggattgagaactctagcagcaaggaagtccatagtaagaatagagaggactagtaaatggagtagtcacagtgagctaagagtacagagagcagaagtggcacaccactatggcaatgccaacccaggaaagactgtcttttaaaactgaagagagagaccagggtgtggtggtgcatgcctttaatcccagcacttgggaggcagaggtaggcaaatttctgagttcaaggccaacctggtctacagagtgagttccaggacagccagggctaacttgaaaaacaaaacaaaccaaacaaacaaacaagaaacctgaagagagaggatgtaatgttatgggaaaaaaaccaactacaacaacaactacagtgttttctattgctaggaagtggtagtgcaaatggttgttttatgttgctcatgattttgtgaaaagacaggctttgggaatagcttacagggtacttgctgtctgaccctgtggtacagcagtctgggccagtagctctgccgctgagatcccttcactgctgggcctaggtgttactgaccctctcacacgtgattcttcctggctctgcatcccaccccattagcctctggtctaatacgagtgctgtgtttcctcagagcatctggttttagagtaggcacactttgacatagaagctggccgccaaaaggcttctaagaggaccacatctggaaattgcatgctggtcaaaacagtcacagtgcttgccaacttgaggggatggggaaacagatgccacctcctgtttaaagagaatcaaggtcacatttcagaagagcatgtgggttgcaaaatactgttgtggcaaatgggaaaagtgggaaacactgcaagtaagtctgccctggcaggaaattgaggaggtctccaattaatagcttttcttttttatttatttatttgataaaaatggctggggtggagaggctgaagtggcactgaaagtttgagggtgcttacgattggcaggtgttactatgggacttgatagagagagtggagtggactggcgaaggacaaaagaattgccctgcacaattccaggccattttgagggcaaaaacgaattctctgcagttgtaccactgctctgtatgatggcattctttcctcagaatcatcttgcaagattagaaaaggtagttattaggtgcagtcaggccttggagtacagctatggaggtgcagtagagcaacagtgcagccagggattggagggtgtttgccagtgagtttagggtcaagactggaagttgtacctgcatggagcctaatgaagtatagatttatatcagcagaaatgtttggtgacatttgaagtgacgacgtgattgacagaaaaatgaaaagtttcagtgtaatattaagaaacaggcatttttatattcacacaaatgatctcaggagagagcagactgaataggaatggagatgaagactctgcaaagaagagattcaggaactaagagactgagagggtcagagccacccaggcaggacgtgtgtagcaaggagcaatgtgaacaaggaactaagatttctgtgcagaggggcctaggtgggcagaggctaaaggcctggaaaaattaaacttgtaatgttctttgtctgagttgctaatctctatgaaaaatgctctgtctggtgatacattgtgcaacagctgtctcacgtaggaaacgtgtttcagctttcttccgttaatagcgatatggctctctctccctttatttagtttgtaacttatctgtgtcattttcttcaagtgaatgcgtatcgccctaaggcagtgcatcattggatcttgatctgggtttttattgtcatcagttggataataatctttctttgagacatttgaaatatttcatttctctgtctctcatcttcctctttcctttttgtcccttcccccactcctctattctctctgatttttgtttgttgtgtgtttgtttttttttggttcttttgaggcagagtctcctgtaacctgtttgtgctgcagtcattgttcagaacagtctttctgccttgtatcccagcttctgggattataagcatgccaccatgctcagcttctagaagttttacatcagtgtgattagtgatatggctggaattcaattctcctggtgctgtcttcttagctgtctctttgttcattttcctccttttggccttcttctgcattgaatattttaatccattttatcttctctgtaggcttactacttagactccttcgttttattttttaattagtggtattaatttaagatttataacatgtgaccttaatatctcagtctacctttgaatattattttacaactttctgtgtagtgtaaggatctagcagccaggtatacaggacacagtaccttactctggaggcaaagcaggaaaattacttccatctaggagttcaaggccagcctgggcagcagagtaaaactttgtcttaaaaacaaaataaataacgaattaactaacataaaaataaacaaacaaacaaaaggaagggtggtggataagaatgggaaagagaaacatttgagcagaatacttaccatttgtctcccagctttggggctgttactgtaatacatattatctcaccagaagttataaaagcagtgcactggtgtaagctctgctgtagcgcatccgttctcttccctccatccgccttccttcctttaagccctggatggcctacaactctataagccaggctgacctcaatttcacagcgatccacctgcctttgcctccagagtgttgggattaaaaaagcatgaaggaccatgctaagcccattgcttgtcttttagagaaagagagagaataagatataaataaaaaataaaaaatgtgagccgggtgtggtagctcacgcctttaatcccagcactcgggaggcagaggcaggtggatttctgagttggaggccaacctggtctacaaagtgagttccaggacagccagggctacacagagaaaccctgtctgggggggggggggggagtatttttatttatttacatgtttttctttctggtgttctttatttttcatagagatttagattttcatctgatttattttccttctttctccaagaactttttattcattcatttaaatttttttgggttcacatctatctgtaaggactatttcaacttttgtgtggctggaaaaacaggtcacttcatgcttggaagctatttgactaagcaaagaaatctaggttacagctttcttttcctgtttaaacaagctgctgtactgtctgggtttgcctcccttctgaagtcactgtggtgtttctctgctggggaagatttcctctttctggctccctgtaagattttccccctattgttggttctcatccgttttcccatagcatgcctttatcttgtctctgctttgggtgtgtggaagtgtaggatgtatcgctcttggacagccaggcccttaagcacaggttagggtgttcgtattgacctctctgccttctcttttgaggtccctcttttatgtgtatgttaagttgcttgtggctgttgccacacccctcctcctcttttaaaggatgcttgtgtgaggtagttcattttagaggtttctatagctgtaccttcaagcttattggtatttttcttctgaagtatttaatctgctcttaattttatgtgcatactagacactatatttttaactctagaaatttttatttagattccttttatatccctttaacagatttatgctcctttgccttcttggacacatggaacataggtgtttataactttttaatcatctaactgcttactctaatgtctattctttttagatgtgttcctattgactgattctctcctttctaacagccacttggtttttttgcctcttggtgatttgttttttgttttgtttttcgagacggggtttctctgtgtagccctggctgtcctggaactcactctgtagaccaggctggcctcaaactcagagatccatctgcctctgcctcccaagtgctaggattaaaggcgtgcaccaccactgcctggcagtgatattttactagacgttaaatattgtgaattttgccttactggttcctggatattttcatattcttaataatattcttgagttgtgctttgggacacatttaaattgtaagtagcttaattgttttgtactccctcccctccctccagctttttctttttctttttctcttcttttttctttttttgtttgtttctttctgattccagaaactttttctaatttcccccactatccaagaggtgatcttgtaagtactttacctgctgctgcctgtagatggatcataagctcgtctactgtggcaggtaggaagcagtttggactccagcagtgcctctgctcccccagggcttcttcgtctttagtcctggggagttatctcatgggtgtggactgctgtgccccagctgaagtgggtctccacagacctgctcagctctgttgtgtgaatcctgtcccctcagtgctgttgacttgtgtttgttgggagccagtgggtttccattcccatcattgtctgtcggtgtttcggctaggatactttccctgcagtgggctgcagcatgctgtctcatgggactctcgtgggcctttgtcctgctgctcaccatttgagaactgtttttttgttttgttttgttttgttttgttttgttttgatttatttatttatttatttatttatttatttatttatttatttcagttttgtagttgtttaaaaccacaaaatctggttcttgttctccagcagggctgtcagtttctaagtgaaaggcttcatgattggtgagatccatataactatgatgtcgaagtccctgaggactgtttaggacagtgtttctgtgggggctgttctggagtacagctgactctgtggagacaccgaagtgctagtagttcattatttcctcttaatactatctagaaaaccacaagaaagttgtgtctgtaaatactgacagacgtggctgactcagtcaccaaacacaagggagtttgcttatgcagctaatttgattactatgttcttatacattagttttgatcactatactcttacatataaaggttaaacatttttcttgtcagttctttccccagatattacatgaagcacagtattatacaccagtactatggtagtaagtgactcagcctgtttgagtcctgatttggtagcaaactcacaaacagatttttgagatgttttggtatcttttgaaaagtcagtgttgacaggaagtgaacacaaaagggagaaaagcctgtggctctgtaaaagccaaggaaggagccaaagaaagaacctgtattgtctggttccgtggtgaatcattaacctctggtgcactgggcacaaaggttgcgtgcctgcctgtgctattggctgtgaaacaatacgctggctttttttttttttttttctttttaagttacagtttacaaagaattgtgccttacaggaaaacaattgaattgtgagataatgattacttgacttagtaacttttaaaactgtgggttaggacaatgacacagcgcaggccatgttgacagttacacaagaaccaggggactggaatgtgatttttttctaccatgtgatttttttttcttaaaatcaattctttctgaaaacatatcttaccatgatccattttctctttaatatcacacctctattttccacaattcactgttatggtcttgggtaacttgggagacttgacttcacagtcaaagtgaaaaatattttattttgttcagaatacattgttgatactggctgaaatagggctcagggatattctaggttgtgtgtctctgacaaaaagaattacttcatagtttctaaattatttaagaaaagccctttttttttcccaagacaataccgggccctcattttcctcttcttctttacttcctttctccttctttctgcatatcagccatttggaaagaactgcagttgcccaagtgaaagaaacaaaacatgagaaatagccccaagcctccaaggaacttgtgatctagtagagaagtgaattacagtgctgtgctgagctatggcaaaaaaaaaaaggaaaaaaggaaggaggaaagagggagggaaggaaggaagatgacagaccagtaagagtcaaactagtgagcacacatggatgagagactgcttacaacagatttgggaatgtgcagcgatcgaggatatgaaggtggccctaacagttacctaaaacccagcattcaaaagctgcagcagcagtttgttttctgagttctaggcaggcctaggtcacagaaggagaccctatattcacaaactaatgcacaaagcaacccctctgcaaattactcctgatgaagatgaaaagccagccatgagtaaaaaggaggtattttatacaagggaagacagcagacaattttctgcagtagctttgtgtgctagtggggtgggagggttcttggaacagtctgtgcctccttctctcacaaagcctgctttagtacttttgctctcacgctgacgatgccattgcagacatgattatgttagtgcactggaggactcattcactaaagattgctacaggcttttgtgtttgcttttttagttgtattagattatatgtgtgagtgttttgcttatgtgtgtatatatataccacttgtgtgcctcatgcctgtagagatcaaaagaaaacatcaagtcctctggaactggaggttcataggtgctaggaactgaactgggttttctacaagaacatccagtgctctaaccattgacccatctctccagccccaaatgttacactttttaaaccagtacttgtcctcttttctcacaagcgggtacttatttctcagtgttttggtatcttactgttgcttgaattttgggagtcaaaacctatgctctggaatcttaagaaagctacctgtctccaataaacaaggaataagtaatagtaaaatacagagaaagataaaattactctctgtggtacgttggcaagaggagcaaatggaagtcacatccgtctgtggactcctgaaatgaggtctaagaggcatgtgtaacttggacgtctttttcaaggtgtggtcccactcatcaacttgcctctattctctgctttcagaactatgtgaaaatatagttcctcctcttactgccaccaaggattcagcctttcccttcctttggcatggaattcctaagaaaattttaatttgagattcattgtttcattagtttgatagtcagagaaagacctgagtgtctgtctttagaatatctcttttgccaagacagttatattaccaacctataagaagtcgcctttacagctaggtatagtgaatcatatctagggagacaggggcaggagggtctttttgagtttaaggcctccctggtctacatagtgaattctagggcagacagctatatagtgagacctccatccctttaaaaaaaaaaaaaaaagacagaaaatgtaaaaagaagttgcctttagcttgctcttctgaatcactaattaaatcactaatgtacatgtccttcatactctaaggctcgaagcataactgtgtgatagcatattcttccatggtaagggctattttctcagtagtgcatttcacactttaatgtacacaggaatcatctagagatctttgaaaatgcacattcttctcaggggtgtctgggtggcacagtctttttaaaatacactttttattgaggactttttacaatgtatttttatcatattttacttctattcccaacatactcttgctgttcattcttagatcattctggttttttgagagagggtttctctttgtagccctggctgtcccggaattcaatctgtagaccagactagcctcatactcagagatctgcttgcctctgcctcccaagtgctgggattaaagctactaccacaactgccaggctcacctgccctctctcccccctccctcctcccccctcccttcctttctctcttccctttctcccccctctctttctctttctttctttttataaatcttttaaaaacatactttttattaattgagactttttttaacaatgtatttttatcatattttacttccattcctaccccacttctcccagatctactagatctactctctacctctttgctctttccaaaattgtcttcctacttatcctgatcccgtaaaataacctgttgagtctattttatgctgcccgtatactcctgggtatggaaccatccactggaccatgaacggctggcctatcagaggctaaatccctggagatggtagaccctcctttcccaggagccatcaactgtcaccagctccatagggactcatgagccctttttcactctaaagtagcaagatacttgatgattgattttagatgaacttatattcttaaagggcttttaggtaaaattctctattggttgtttaaagacaaagaaaaatgtactcatgactctagttttcaaatgaagaaagagacatttaatattagtgagaagaatcagatgtttttattaatcacctcagtgttctatctgttgaggtatgggaattgtcccacaaaccactccgacacagacctcagtcaaacagggctggtttattgaatgcacaccccaagactgatcaatcagggacaaagtctagaccagggagctgagctgcagtgacaaggcagaatcctatagagcttgaaagcctgaaatccacaaatgtctgcgtcaggttattccaccaatcaggatttagagacagggaatttccttagatacatgtctttgttataaattatcctgttctcattggttggagtatgaaactgtggtgggggacttgccttgtctagcactcatgtcttaacttgccaacggggatgtgcatgtctctctctgtcacataggttgtcagttctcaaggaggtcttggggacttaaacttactcaccccctactcaaaatggaagttttaatccaactggcttcttatgtagctgcagaggtctctcatataggggtccatcccaggacagcttaaaggcaagaccccataagagctcacacacaaatgcaggaagtgctactgggtgggtggttcagacccaagcttattgtggctaactagacaaagcagttctaattgacttctactgtgattagtttccaagaacaccaaagcacagaacaaaacagaatatacaatcaactccagcatgagaaagtttcctagtaatagcacatgaggaagttaccttataacattagtaacagtacaaaatgtctggctagataggcaacaggtacctaggacagttaccgttggacaatgtttgcctaatgtaactgtcatattaatcctgagttgatgggaagtagtcttaccattctctaaatgtgggactagttcaagaagattctaacgcccaggccaccctgttggcatttgaaaccagatttgtttgcttctagatcccatgatgatttccagtaaagtgctctgctgctctaccaggtcatttctgttaagttggtcacagtatttttattgccatgatgatatatatttagacacatgatgtgacaaagcacagtatacctactaaaaccaaagagagtactagggagaattcaaatatatagatatgcagaagaaatacaaataaaatgaggatagtagcatactgaataatttcttatctaaataattattcattgagatgtaaatattcaggcacttaaaaagaactaaaacagaagctcaatttaataattgtcttcataattgcataaggtcaataaagaaatcagtgtgtttatattttacacacacacacacacatacacacacacacacacacacacacacacacacacacacaccagaaagcctgaaggagagaagatacgtgtaaatcagtagaaggcttcttacaagtgctgtgaaaagccttaagcccctgctgcagacctgactatggttttgaacataaaatcttttccacatctaagtgttgcttacgcgatttctaataattaatcctaagcctatgcttttctccgtgtgtttgtttcctttaagtcactggcactgaggaattgttggagttcactgtggagaaatctctgtaatccaccctgtcctttccccaccacaccattcaaacagtatacagtacccatccttttactttgtgcattggctcaaaatgctaaacaaattaaattttatttttaaaaaatccaaggcagggtgtggtagccctcagaaggcagggacaggcaaaatttaagagttcaagaccagcctggtcaccatagtgagtttcaagccaactaaagttacatagtgagatcctgtcttaaaaactaaacatcagtcagctgatcagtcaatctagctttttaagaataattttaacaacgtgtagaaacttggttagtgaagcagtgctcgttcctttggaatcttcctgattatcatatatagaccagcatcaaaatgactcccacttctgcatgaaatgtttgatataggagcaataagagggaatgtgtgtaagcactgtaaaaaggttcttattgtgtaaagttatttacttcttgcagctgtattgaaatagaatcccatttttgtaggtgaaaagaaccaaagcacagagtaatcaggaaacacccctgaggctctggctgcagtttgtccccaacttctgtgctgcttttccatgtgactagttagatggttgtcatttgggtcgacgcagtgggtttgcctcttagtctgttgctgtgctgtcccagcacaggcacgtgggctgtggtcgctggatctcatttactcctcatggaagcctcgaagagtagcactgctgtcgctaggctatacataaggaaacctgagattcagacattgtcagatatcatgcctttgtatatttctaagtaaattatgacttacaatattgaattttctgctctaaaagtggagatacaccaagcttcaggagctgttatgagggataataatcacttatgcaaaggatattgagaaacatcacacttaattgtgatttcccttgctttgttctctttcctcacctatacaatgatttaagaccagagaactgagggcacagtagtctgggattgttcatcctggctcactcccctttttgagaacttttccctttgcctcctctgccctgtgactttctccaagtagtaaatattcaggagggaaaaggtctttgagccccactttgttggatgtgactactcttggctgctaagtggcagttggagtttattatattgctttgcttatgattcatgttagtaattaccccatggcaatgctagttcaccattcaagtacagacaggacaagagacagcaactgtagaaaggctaagaagtatcttctgtcctttacctgtggaatggaagtacaccagctctaatttagaagatgaacagggatcgttgacataagagaatacagtcctgacatctccagtttcagcttgtgatttcctaactagtatagtgaagatagaattctagatgtgcaagaaaaagagaaatgaatgaaatactcatcttaactgggtagcatctggatttttctaggtttctccagcagagtaagacaactccgagtgccgggcataaggcggttgtcctttagtcatctgaagctactgactgcattttgtaaaacagcacagcttttctctttcctaagcacttatgccctggtgctccctctgggccagcactgtagagtcacttcagcatgtgtatttatagccctctcatgtgtgctctttaaacttactttattggcttttaatattttataattttgctcaagatcaccaaatatcaaaagtcgttagtttgtttttgattttcgtcttttcctgtgttgctataagtgatagatttaagacatatgggccagagatacaggccatgggtaaaggtacttagctccaagcctgacagcttaagttcagtcctcagtccttgtaacttctataagtgtgtgctggtgtctgcgtgctctccctacttcccagcacaagaagacaaataaacctaattttaaaagtttatttttaaagcaatgttaatgaaatgtagaacagaaattttatttctaactcttctgggtttttaagaattattattgctagccaggcgtggtggcgcacgccttcacgcctttaatcccagcactcgggaggcagaggcaggcggatttctgagttggaggccagtctggtctacaaagtgggttcaggacagccagggctacacagagaaaccctgtctcaaaaaacaaaaaaacaaaaacaaaattattattgctacattttaggtggcttttttgttatttgtttgtgtattaccattcactaaaatataacagagaagctagacatggttgtgtatatctgtaacctaagcactcggaaggcaaagacagaagggtactgaattcaagaccagcctctgctgtgtagtacaaggtagaaggcagcttaacatgcctagtaccccaggttcctttctttcagaaaaaggaaaacaaaaaacaagagaattatatataatagaatttccctttaagattttattatgctctcttatgatttctttcaaaaacatctaatagataattgtttttaagtcacttttatttttggaattaaaatgctttgtcatttttatcattatgctcatagcatattttagggtaatttttctgggatttttttccttttcatactaagaaatactagttttaaaattcattgttttcattttgttttgtttcttttctgtaaacattgaaatgagaacagcccagagaggattgggtataggagtcactggattcatttgttccttagaatagctgttacattgtctttccagatgggatatttgtagcgttgtgctgtgcgtatgagacaccaccaggctcatgtgacttcatagtttaacaggttgatctgaagcaaacttttccacagttcaattcaaatggaaggcgaccgattcctgttcttggaaaatgctgaagattgctctgacatgcaaatatgttctctctgcaacctgcttttgcaacctcctcctcctcctcttctacatcctcctcctcttcctccttcccttcctctcctcttccttctcctctggctccttcctctgttttttaaaaccaacatattttgttgttgttgtttttctcttcagtagctaaaattttactgaactatgtgttctagtctctttactcggagacgtcctaaagaccagcacataaaatatagcccaattttgatccatccattagctgactgtgagcatccacttctgtgtttgctaggccccggcatagtctcacaagagacagctacatctgggtcctttcgataaaatcttgctagtgtatggttggagaagtagctcttattaaaaatattattttgaagattatgttgttcagaatgaaaagatttatgaaagaagcctttgttgtttttcgctgtagtaaaggtgtttattattagtgtgacttcccatgtgtaacttatactgtacagtgcctttcctctctctcccatctcctccagtatccttccctcccctttctcttgttgtttctatccagctaaccttttatatacttatttcttaaaatgatttttctagttcaaactaacaaacttctgagcacaaatctttacttcctctattctcaggacattgtagaacaacagaaatgtactctcacactaggactcacatagacgggacaaacgcagcagagctgagactgtcaagaggaaaagaacaaagaaagtagagggattaattcattttatgaggataaaaactaaatgagggtgttttgatgggtgtaacagaatagaacagatcataatacaaagaacacacacagcaaagtgctttcagggagatgggagcttcagcctcgaagcaaatacaggaattgtcattgccagaattctctagagtaccaactggtatgtatcaaaattatctgagacttataaaaacacaggttacagattgttaggtacaaccccaaagtttctgggttggagttcaagaatttgtgattctaccatgttggtggatggtggtggtgggtgtctgcaaacatgaagttcctggacccttgcctcagagacccatgccagtctgtcaggaacttgcaagtgtgtctgctcctcttcgggtaaatcagaggtatgcagcttggattgaagcctagtattaattattgtgcagtgcataatctatacacatgtaagcaattctgtctaactgtgggaattgtcctcataaacccattgcaagctgtgaatatcataagtcaaaaatgcctttgatgccattaacccacagagtaacttgtttggcctgtcatgaagtggctgccaggaagcttgtaactctgttgctgccttgtactgaagagatatcatggaacatattactaactgggaaaagagaattcagtttgaagtacagtttccacataatgtatactactttcatgctgtattaaaaagtaagtgagcatcctgtaagtcagggaccatctatacatgcctgaccagctaaccttcaattttttgatgggttctttttttgttttggttttggttttggttttggtttggttttggtttttttgagacagggtttctctgtatagccctggctgtcctggaactcactttgtagaccaggctggcctcgaactcagaaattcgcctgcttctgcttcccacgtgttgggtttaaaggcgtgtgccaccaccgcccagctcaaccttcaaattttgtatgcacataaacacccaggcatgcagtttcctattgatgtcaaatggaaaatctgagcaggaacagctaccctgagacttctatagcagatctgagtgtgctaggaatgcagaggtaatttttcctgggaaggaaaatacaagaaacttctgtgctattggattaggttacgttacttcttatcttcgtatcaaggagtacttggttcattttctctctattcttctctccaagaaagatcagtgtgtgtgtgtggggggggggggtgggagggggtaatcagggaaagaatataataataataaataataataacggaggaaattttctacatctgttgataacatagggcttcactcagaaaagacccacttggtatgctaagcatgatgagtatacatttggtcatatcacagttagttaaggagaatgttaaaattatttatggagaataaaatgcagatcaccattgcagttgtcattcagaacactgaatatttgacagtctcgtattctttatctgtgtgtatgtacgtgtgtgtgtgtgtgtgtgtgtgtgtgtgtgagagagagagagagagaatgagaatagggtaattattagaaccaaatgaattaatactcagtgtaggtactactcaaacaaatagataaggggaggagtttttctggagttacctaacaattttttaaataattggcctgttgtgataatttttcttttattaaaaaaaaaaagttttcttttggaaagaaggctcagaggttaagagaacacactgcttttccagagaacccaaggtcagttcacagtatccatggttggtgcttagaatcacctgtaactgcagctttaggggatctaaactaagcgagtgcatgcgtgcgcccgcgcaaacacacacacacacacacacacacagagttaacaatactaaaaatccatctttgaaaaatagcagatgagtaaaaatggtaagataaaataaaaatttaagagttcatacttgtatgaatataagtgtctctagaaaatactgctgattgagccatattgtcagtcaccaagtaattgtcaattcaaatatgttctatacccataagtttcttgattattccccttgaattttgaacatttcagaagtcatgttaccaatgggtaatttagttttcaggctagttcaaacaggttattttatgattactttgaaatgttgtccttgtgtaagaactttttataacatgctttccattgaacaactaaatttatagtgaaaaatagtgggtcttatcttccttccatctggagttggatggcctgtaagcattaaagtttagttgctgagaaactagcaaagattcttctaggcattaataatttaatatatgtcaaaaaattacgttcattagggttctaccacatataaccaaatgcattttctgtagctgtttcatccacaaattagtctttctgcattggaagtatgaactctgcttcattttctgttttctgtttcctggtcgagtggccaatttctctaatgatcagtgcttataattaggatttatacttcaaattcattgttactatttcaaatgtaaatattaaggcttgttcagaaccttgatagtatcttgattttttttccccctatggaaagacaatgaacagcatacatattaagtttggagccagtttttagggtgccataaagctgtcttccatgacaatactctgatcttcctttctttgaagaaaggcagtgtaaaaagaaggcttctaccatctgtccctttatgaagatgttgaaaactgtttgaggaggagcaggaatggcaggattgatactgtcattttaaagtaataaaaggttacagtctcagtgttttcatgtatgtttgtgagtaagggggaaatagaaaaccctaaaatacgtaacttacctcacattttgttactcaaaaaggaaaataacatacattttgttgtgatactcttttgtctagataggtaagatttacccagtattttaaatttctttttcggtagtgttggtattaaacctagggtcttcacatataggtaagctctgtacaccggctgtatcacctgcccttaatatttgatcaacatgagaaaattacaactttttaatctattgtgacactttgttaagaatcttaccaaagttgcccagtggtggtgcatacgtttgatgctagcacccaggaggcagaggcaggtagatctcttgagttcaagggcagcctgatctacagagcaagttccaaggcagcaacgactacacaaagaaaccctgtcttgaaaaaacaaaaaatttaaagaattttacaaaacttttgactcatgtttgttgttcagacaagggcaataagatcttctccactgagtctagtagtgacggttatttgatgactgcctttctaggactttaaagtaagacacatgccttgagattcctccttagggttttctcatgaaccctgcacatagaaagttcggagaaatgcagaactccatgatcctttcctcttgatcagtggactgctcactgcttttcaactctacagtgtatatctaagactgctacatgcatctcattcttttggagtgacatcaagtacaggaactatagggcaactgaagtaaacttcacagtgtgtgtatgtgtgtggaacatatacatctcttaggatatgcttatttttcattagtttgctttttgttacaggtttattttcatttagctttacctataaaaaaacatgggtattgaaagaaaacatccatgtatgtgctatttattacaaagagacttatttaagatagaaaatgactatgctttgtcaaaaatcattgcagcccaaactcagaaaaaagtaaatttatgtattataaaatatatgttcgccaggtgtggtggcacatgcctttaatcccagcacttgggaggcagaggcaggtggatttctgagttcgaggccagcctggtctacaaagcgagctccaggacagccagggctatacagagaaaccgtgtctcaaaaaacaaaacaaacaaacaaacaaacaaacatatatatatgtgtgtatatatatatatatgtatatatgtatatatatgtatacatatatatatatacatacataaacacacatatacatacatatgtgtgtgtgtgtgtgtgtgtgtgttcatgctgtattcagacttgaaagattaacttgttttaccatacaggctaactgaattcaaatgtatatcatttttctaaaattaaaactttgcaaaatgccttaaattagaagaggatgtgttggaaaatgaaagttttgatgtagttggtatttttctgtctcaaagccatgcctttgtctgttttgtataatgaaaatataattgtgcttagtaatttgtctttctagatttgttgctctctatgtaaagaactatgtctttactttatacgtttaacatttttaaaggttttttttccacttgaaataacattttcaggcactctgtagttgatctaaagtgagagaggaaaagaagtaaaaaaaaaaatcttagctatgtatcacattctaaaaactcaggcacttcactgtcctggtgatttctagaccaacattcttgaaaatacaaggtttttattgtactttcaaaataatttacctagcaagataacatttcattagtttctttatgctaagtttttatactatatatcattttgaaattgggtgttgcagccagaatataaatcaaaatagtaatttcaaaatatactatatagttagataccttttcttttttatgagttgcctaaaaagataaaatgtcatgcagaaaactgcagtagtctcttggaggaaatgctctaaaactgtgtgactagttcaaactggttttcttcactgtttacagtttaaggcatgataagtacttttaatctaaaataaaatataagtgaaatctacttagtaaactattccgtaaacaacatctcggttcagtataaaaccatttaacagatttctgattaaatcatttcatgatatacaaaattttaaacgtacagatatatcacattatttaaatcataattgcttttagaccttaactttatggagttttttttttttaatgaggaaaaaacacgttaaagtggttcaagaaagtaaaatggcgtgcatacaagaatagaatatattttaatgtttaacacatcagacacaaacttcctttaaaaatattttctgttggagccggagagatagttcccaagaacacagttttcacagttgaacacggagcagtcccagtggcttagtcaggcagcttatattgcagattcattatcaaatatcttattttttaaggtctgtaggttgtgttggataaaattctcagtgccctgaacttcagagaacctggagtcacttcttctaaccgaccagtttttcatttttattgagttctgaattgtgtctgaggtgaagtagtaaacaatagggtcaaagcagcagttggaaacagcgatgcagagagtgatcgggtacatggtcctcactgccgccaccacagagcagttaacaaaggtctgtgtcctcatgagcgagtacaaaatgaggttgatgttgtagggcacaaaacagaaacagaagatgaccaagtggacaaaaatcatttttaaaaccttagttttgttcattttgcttctacttaatgtaacaggtttatttaaagttcttagcaccatactagaacaagttacgttcaaaatgagagggataaaaaagcccactatttcaatgaaaatcacaatcctggagagataagttttccatgtggccgctggaaagttctcaaagcaggcttctgaggtattgttcccctgagagtgggtcgactgaaagaaaactgcaggcgcacttcctcccatcactgtgaaccacacagcaatgcaaacgatctttgcatttcgtttcgttcttaaagtctttgacttaaatgggtagacaattgccagaaatcgatctacactgatacaggttaagaacagaatgcttccatacatattggtgtaaaacagcattactgaaatcttacagagtagatctccaaatggccaattccgtgttgcaaagtaaaaaatccgaaatggcaaagtaaagacgaaaagtaaatctgacattgccaggttaatcatgtacgttgtagtttcatttctcactttgagggcacagatgaaaatgtatatcgcaacacagttggatatcagcccaagcacgaagaccatgctgaacatgcacccgtacagagtgtacttaaaggagtcgtcataagggcactgggagccattggagcttaccattgtcaggcagtgcagcttacaggaggccttttgtccgcagcgcttgatcgatcgcctttgctattcagatgtggtcacagcagcagccagtttatttgcaaagtatttgtttcttttcctgttcttacaaatactttcttctcttaactcttcaaaggaaacatgaaatgtgttccgtaaaagtttctagtagattattcaggaaaatagtctgattttctggtcgagaaaatccatgagtctggagtttagttaactgacagaaaatgcagtcaaggaagccaacccataaagctgaaagtgtaaggaaaaactgttccaagtcggaccagaccagtccgcgtggaaacttgtgcttcagccgccagggtccaaaccagctttacttcagtcacaaacactcgccgtgcgtccgtccgcccgtcgtcctcgggtacttcttccttctttttattctcaaactttgtatttctacattgattccggacggcgataggcagtcgtttaagggatcccagataaattcctaagcatgttcgcgcttgctgaatggagaggcctttcggaggttgccagctgtattgtgagatgggctgtctctgaagtgagcaagaaagccttcccagatttgtaatatgacatcacaggaagaagaggctgggtttggacaaaggaaggcttcaacccagttgtttgcagttcctttaatctgataatgtgtctgctgggaatgtacctaggaggcttgcaaatggtcactggctgcccagctgagttgggtgttaactctttttatgccaaaatgctttccggggattctgacaacttctccaaagtggtttgatttgctttagttagtaataagtaagagaaagaaagaaacataaggtagattctttctcttctattgctcttgtagttgggatattgccttctttaaagaaataaaatgcagatgggtgtatatatgtttataaattgaaatgtaggcgatatgagtggcacattaaagaactgtttgtgcctgaaggcagaaccttaagagtttatataaagcctttgactgaggcaggcagtcctgcttctcttagtatctggtgttttttaattgctctccagcatttaacttaattggcatgattgtgagtagctttaatcctggatctctttagtttttgataaataatgttctaacatttttctttgaaactaattttctagagctagttcaattttaatacaccaaagactacattaagtatgccccccccccggaggattataactcagtagtgagaatagtactccaaaacttttacttttagtacagtgtcagtcttttgcccacaacttaatataagcatagtgggaaagtgtgctttgtaaaacgggctccccccttctgagttaattgaaataacttacagcagagaatctcagttctactgtttgtctaaatgtagtttccatgattttattctcctttcctccgtctctcccttcagtttcttttacatgttggctgtgtgttggggtatattccagatctactttcatctctaaatttgaagctgaaacccttcatttggggtcagtgaaggcatttcagagcaagtttctctatagacaccttagtttacatattaagatgtatacttaagagcatgtatcatgtgttctataccttttaaatttgattacttttgatggtgaattataatctttttattgttttgattaggaagtcatctatgatcaaataatacagtcttataggcggtaaagattgagggtctgaacttctttgctttggttttggtgtggaaaacagatgcaaatgtgttcctattggaagatgggaactttgagtgcagtaatgaaaaaagggacacttaataacattttcttctccatgaagaaacttttctgttaatagttattttaggaaaaatataaaatttgagtgatccacttttaagtttccttattgtcattttaaaaaacgatttattatgtatacagtgttttgcttgcatgtacacctacagttcagaagagggcaccagatctcactatagatggttatgagcaccatgtggttgctgggaactgaactcaggaccttaggaaaaacagccaatgtgcttaacctctgagctatcttgccagcccccttattgtcatttttacaaattataatcgttttatgtcctggtactgtccatgtttactttcattgtgaaaacatgcatgaatgtgatatacatgcatatatgcaggccagcacttatacacataaaaataaataggtctttaaaataaataagtaaaatatactgtcagctgatttttaggatgttgtgatatgtagattataccttagtgaaaaagagttgtagaggaaagtctgtctaaaagggttactaatttgctgggcgtggtagtacatgcctttaatccttatacctaggtgggcatgctggaaagatgtcttagcattttggagtacttcctgttctttcaaagggcccaggtttgattgtcagcacccaatggcagctcagtcctgtctgtaactccagtcccaggatatccagtacccacgtctgactctgcaggcactgcgtgcactcagtgcacagacatacaagaaggcaaaacactcatacacaggggggaaaaaaacttacaaaaggtttttactttaagatttgcaggttggaacagtgttggagctccatgtaggaggccctgtgctcagactccagcatcccagcaagtgattaagtgaaactctaacaccattctaaacaaatccattctaaacattattcagtttaaatgtaataagtgttaactaaaataaaatcttaaataataatttatttacacagtggtaaaataaaaacgatatggtagtctgagacacaaaggaaggtttatgatggcaggaatctgatacattttattttagaactgtgtatgtgttgcctttatgtaataagagtatccgggaaagtctcctttcagctctgaaatgcactatggatcttcacatgtgtatccatgtgtgtgctttcctgttgacaaaaatacttagttgcgaaaggacatttgttattagctttgttttaggaaaagcatcaaatgtcaaactacaattctagctaagcatattatcagttggtagattaactatatatggttcagtgcagagtaaagtttaccattttagtgcacaggatctgactccagggcccttgaaatctccttccttgggccctggttttatcctacctttctggaactctgagacaccatgactcagagcacacaagaagcagatttgaaggaggatttcaagccttgctagctattctccaaaactatctgctattctccaaaacaaatccctgaaacacttgaagggttttctctatagaaaaatctagaaggaatctagactgtcttttactagtgtagattctttatgcatgaataaagcatgtgctgtaggcaataaaaagagactatacatctttttctaagggggtcggggagtaggaaaatgcagtgcaaagagctcccagcagagaactctgcttgtccttttcagtccttttcctttgctcctgtggggactctggcttcttggctgtaaaagaaaggaattaggctctacaaagttcccttcctgctttttatttgcttcagattccttgaattctttgaatgtttaaggtgtcacgtttgctttctcactctttggtatcaggaagtcacttttatccttactgtttaagaattttgaaactagcctggacaagacatgtgtaccacagaggggaagagggaacagagaggaagaaatgtgtgtaagagacagaatgaatgggccaagtcaaagttccttattacacccagtaaatcagcaggactctattcttacagggaaaggcagactcattccagcactcctaatcccagccagttaatttggtgaggccctggtagaaccacaggaagtctgaagcagatgtggggggaggagcagaaccaagagatagcagtaagggccctggctttaagagagttatgacccctctgcaccaccagcctccccgccctacccccacaccccagaccttgagactatgaggtctctgggggggagaaacagtctggtggtttgtgtctataatttcagcaccccactggctaaggtaggaagagagtgtttgaaagcagcctagggggctatataatcagttcaaggaactacacaggcgatcattttgtctcagaaaacaaaggagattctccaagcatgtcttgaaagctctagagccagagttcacaaaaatgagtccttttgtagtcccattagtataatccaaatacttttcacatctgaatatacagaaaattatttgttctttgaggaatactaaataatatagtcccaccctaaattcttatcagaacagtacagggaatgctttgggacataagggtttaatttgattatgaaattctagtaaatgataacagaatgggttgctttcaaaagtcttccaactactttggatgaagtaagaaatagtggaaagaccaattaaactagattcctattggcctggtttttaatctttggtattgtcttagtcagggtttctattcctgcacaaacatcatgaccaagaagcaagttggggaggaaagggtttattcggcttacacttccatgctgctgttcatcatcaaaggaagtaaggactggaactcaagcaggtcagggagcaggagctgatgcagaggccatggagggatgttctttactggcttgcttcacctggcttgctcagcctgctctcttatagaacccaagactaccagcccagagatggtcccacccacaaggggcctttcccccttgatcactaattgagaaaatgccttacagttagatctcatggaggcatttcctcaactgaagctcctttctctgtgataactccagctgtgtcaagttgacacaaaactagccagtacaggtattaaaaacctaacctttattaagtaatttaatttctgttatagttgtaaaaagttgtaaaaaggcaatattgaattagatctctagaataatttttaccttagccttctgttttaaaatttcaaaaaaaaattacaattgaagaaacttgaacttagagttatgatgtcttaggattgcacagtggggggaggataacaagcccttactttataagtactgaacccagttccttatacatgtttgtcaagtgaaaaaaatacacgctgtctgtgcataatggaaagaaatctaatcttaaaataaaaggatttttggttcttaaatttggacttttgccttggataaaatctatcctaaccatgccctcctgtcttaatagatggtttttaaaaacaaaatgaagtgaaataaattttggttgtaaaacacacacacacacacacacacacacacacacacacacacacaagcatgcacagcaagtaacaaacaaaaaatctagtatagatgcagtaagccacagtattctaatctttcagatacaggtaaagttgtgagatgacatagagcaatgggtttttctctcattactttttagtgagcaggtaagagttcctgtgcttcatgtatgccttaagtgatgccatgtttacagtttgttagttctgatcatgggttacagaagctggtcttgcagtagacagagacttgccttttgagaaggattatgtatttgaattactgagcacctcacacattggactagttagagctctctaatgttgtaatagaacttcatcctagaacctaggacagtggtggaactcttggctagccagtttggtagcttggatccgatcatcactaaaaggctggagacatggccaagcagttagtagtacttgctacttttccaacaacaccctagttcagttcccagcacctacgtcagttgcctcacattcacttgtaactccggctccaaggacctaataccttctgacttcggtgggcacagtcacatataaataaaaataaaatctacaaaaagggaaacaaataaaaataaggcactaaaagctacgagttatctaaagtgtgaagtttttaaggaaagatacaggtttaaccagatggttttgttattcaccatgcaatggaaaaaagggaaaaaaattatgttttatataatattcaaaaataatttttcttttaaaatattttaaagattataattataacaaattataatataaaacaaaaaagcagagagggtctaaataagcacgttactttatccttaacttaaaagtttttagtactcaagtatagaatttttatctttaaaagtttttacctccaaaaatggaagtgagtgaatattgcatttttaaatagatgacatgtttttaagatgaattacatgagctctattgcagatataattaaaaccagaaatataatttgactttaggcatgtgggctcttaatccagttagccccagggaaagaggctctctctttacagctaggagcactccaaggtctagatgtagatgtgtggtgaggctctgagtcactggtcatcccaagtcacagcaaaaggcccaggagcacttttattagtctgacactacaattactttaatcaacagattccaattcttaggaaacgtgagggtttcctatcaatagcagatgttgccagcactgcctcaggtggctagaaacaaaggagcggaaggagagatgctgtcagagcctgaccttttgtttttgtttcagttaaacagaggtggaccctttgacctgaccaataaaggttgctgggttgttgtcctgatcacaaacataggaaaacaggacatgtactttaaaagtctttcctgccggggtaagggtgttgctcagtgtccaaggccccatccccagcaccacaaaataacaaaacaaaaaaaataacctttcctgcttatgttctctccatctgttcactgattttgtttattcaacatcagtattgactcagtgccagctgcttttccaggctctgggaacagcactgaataaaacaaaaaacctgtatttattggttttgagtctgtattgggggtggggtcagcaagtaagcattttgtggacatgtgaaaaacactctcactgctccctgaagaaagctcagaaacggaccaaggactttgctgacggggaagtctcaacagatgtgaaataaaactggcttatgcatatctcaggggattaactttagctggcctatcactgaaaggctgttctaatttatatttttcagttttctctcataaattcatcgtttctctcctaaagattttcacagcaattggaaatttctagtacaagtttgttttgttttcttttgagaaggggtttttctgtagtgggccaggctgcccttgaactcagatgcacctacccctgcctcctaagtgctaggattaaaggtggcacaacacccctggctggaaatttcttttcttttcttttcttttgtttttttgtttttttgtttttttttttttctgagacaagctttctctgtgtagttcaggctgttcttgaatttacactgtagatcaggctggcctcaaacttggagatttgcctctgagctgggactaaaggcctacaccaccactgcccatcggaagatcattgatagcacctccacttgatacattcagcatgtctacttccgagttctgttttgcatgacatctgataaatgaagaaaggtccttacattgttcatcaaactgttaatagttcaaagaagtgaattccaggacagtcaaggctatgtagagaccctctccccttaccatcaccctacaaatcaccccatgttaatagtttcattacaagtcagatctctcatgacttctccctgtttagtcattaagtttttctcttttgctctttggtgatttggctatactctattgccctaagatactccattgtgttctatgtacaatttccctgacaccagcgtcatctgtagcatttattaactgtattttgtcccagctatgcttgaatgaacactcaggaacttttttcttcctttaatctttgttttagataatttatttttatgttcattggtgttttacctgcatgtatgtatgtctgtgtgagggtgtcagatcttggagttccagacagttgtgagttgacatgtgggtgctgagaactgaacccaggtcccctggaagaatagtcagtgctcttaacctctgatccattgctctagcccaacgctcaggattttatatcagtatcctccatgtcctttctccatgataacgtgatagtctaattttatatcaaccttttgattctgtttgccttttagaaacaacccctggcctgccctcctgtgttctgattccctggccacgctgagctacctgagcctgtgactacctttctctgatccactgagttgcttagtgtgatatcttccgttgcatgtttgcttagcgtgatgtcttccattgcatgtttgcttttccctaagaatgaatttttttaaaaatttactttgtatatgcgtgtatattataaatgtgtttaaatacaagcacatgtgcctcagttcatataaggggataaggtttggaaggaaacacttttttgtatatgatttttaaaaaccacccctcccttcctctcttcctccttcccttccttccttcctttctttggaaacaaagtcattctacatagccctggctgtcttagaacttcttacatagacctggctgggctcaaacacacagaggttcttctgcctctaatgcatcttttaaactgtctcttaccatgaatttctcaaagtgatttttttttttttttttttttttttttttggtttttcgagacagggtttctctgtatagccctggctgtcctggagctcactttgtagaccaggctggcctcgaactcagaaatccgcctgcctctgcctcccgagtgctgggattaaaggcgtgcgccaccacgcccggctcaaagtgatttttaactacaatttttttctaaacaatatgagaagtgaatgagttaatatatgaggtgaaaatgcatgttaattagggctcagtacctattgtagatatgtccagaatgttgcctgtgaaatattttcatctgtagactggcataaaaatttatacttacataaatttatggttatatagtcatatgcttttcttttttggggttttttggttttgtttggtttggtttggtttggttttttgttttttgtttttttgtttttttttttttttttgagacagggtttctctgtatagtcttggctgtcctggaactcactctgtagaccaggctggcctcaaacttagaaatctgcctgcctctgcctcccaagtgctgggattaaaggcgtgcacaaccactgccctgcatgcttttctttatatgaatgcacatttagatacttttggaaagtaggaaggtatgctttgttgtctcaaaagagttaaaaatcattccgattcactatgaactcagtaaaataaacagtctgggatcagaagtggtaaaagctaaggaaaatgtacaatttaaaggagagtattggattctgtttccctgctttgtaatatagaaagggcttctcaggccctagagagatagcttagtagttaagaacatgtattgttcttatagaagacccaagttcaattcccagaattcatatcagacagctcaaactgcttataactctgcctccagaggatgcctctgacctcaggcccagatacatgcatatatgcacataagtaaataatagtattttttttttaaaaaaaagaaaagaagaaaagaaaagaagagaaaaaaggaagggcttttcagggagcacttcatggtatcactggagatgaatctgacaagaagttttgccactagatgagccttaaatttaagagtgtcataaaaaaattgagtggccttaaataaaacaattaacaattactagtgagtaacatggaatctggtgatgatgtaatttaaaaaattttaaaagtaagtgtgtgtgtgtatgtgtgtgtagagcatgttgacaccaaacatatgctctacctttgaattccacctctaggtgaattcagttttgttaaacttttgtctatattaagtttcttttgcgtgtgtgcctttgcccaaaggaaccaaagaatagatgggataaaacaagatactatcagtaactatgctgtatgcagatagtctaagaacgacccaattaaaatcttaacagaacaggaactggaaagatggctaagtggttaagagcacttatagctctcccagaggacccacatagtggttcagttcttggcacccacatagtggtttacagtaatccataactccagttcaaggggataatatgcctttttctgaattctgtggacacctggcaccacacatggttctgatacatacatgcaagcaaaatactaatatacataaaataagtctaaaacaatcttgtcatagtagataaaaagcaaagctactttatgcagtccacaggaagcagacacagatatgctaaaggaatgaaccatgagtttagaagctgaatgaagccagcatccctaaggacaattgtcaaggtggagagagcagagagcaggggattgaagacatggctaccctcacagtactgtcagagctggttagtggtcagggaatgagggttcgtgctcgtgtttagacatgttagagatgagacgtttgtcatatattcgcatggaaatctttagtatccaatttgaaatgtgggcctggaatctgaaagagtactttagccctaaatgcatatctggaaatatatagctatggttaaagccacacagcagctctagtagtatatagattgacagagcatctagcattaaatgacaagagaaataaatggaaaagaactagcagaaaggccaacaccagaagttttctattttctatcctagtttctgtttgtgaggcaaaacagttttagaacttggcttagggtagaacaaaaacatttcctgtaatgtagatccaataatattccttaaaacacccagcaaacaatagcaattcctaccatcacttccccattgttagtgtttctaccagcactggagacttcacttttacttaggcaatcaggtctcttttaggagcattttgtttgaatagtgttgacatactttaatctctggaggagtttgtgcttgctttagaaatgcatgctaattatggaaagtcatttagaatgcacttagagcttccatttttctgacagtattgtttatttgatgagagtcacactaactttactgacagtgagaatctggtttccttcacaggattaggtaccaaagcaacgaatgtgtagaggacaattatgctgacagttagtttagccagataagtaatgtcatgatgcaacttgcctgatctggagagagctgctccctgagtgctgggtagcaacagtgctgcagagaaaaagaccagtgtcttacatcttccttcatagtgtttttaaaaatcaaaatttacctgtattagttattggctgaggtattagttatctattggcaattaaataattaaataatttaattaaataattaaatttattatcatatgaatttctgaaggtcaggaagcaccatagctgtgtggttttggctcctatattctcgtgagagatcgtgaagttgccaggcagcttcacagttagcttatggctttactggaatgggagaattggctttgaggttttctcatggctgatggcattggctgatggccagaggctttactgcttagccgtggcctctccatagctgcttggtatatggcagcttgttccccctactccagaagcaagatatgtgaaggcggaaactgtcagtttctaataagctaaccttagacgtcacatgctgtcactgttgccatatgccatggttacacagactaatcctggcacagttcagggagtgtgatctgtataatacacaggtaaagaatcactgttagagctctttgttgaccctggaagccatctgtgaaggttgtaggctttgtcagctagacagcaaatttgtcatcagctctcttatttgtgctttgctgtattcaacttattttacaatgtatctatgttatttgctaatattctaaaagtattactgaatattcatcatatatcagaccccggaattttattttgaagatccttttagagtcttatttatgctttgttcatcacctccttagatatccttaagtaagtttgttaccatattatacaatctgtgttttagctttgtggaactgatcatttcttccttttaaaaaaaaaaagatttattttaatatactatagttgtcttcagatgcaccagaagagggtatctgatctcattacggacggttgtgagccaccaggaccttcagaagagcagtcagtgctcttaaccactgagccatctctccagccctgatcatttctttcttaagggctatgtgctgggcgttgtgttagaatcatggcttgtgtctggacagaccataccaggctaatgcagttccacgtggctggtttattgtggaggcagaaacaaagggggtagcagagacaaaggaggaaaagagagagaagaaaaaggtgcataggccaggaagggtctgccttttatttaggctgtgatgtaaacatttgaaggtaaaggtgggaagtggactctgggaatggatacaattgccatggcaacagatgcactgcacggatccctgtcccctgtgggtgactttactgggttcagaggtgatctgccaagcctgttgctaataccaacaccaggtaccatttaaagcactttatacatattgtctcatttgtcatagcttggcttcatcaccaaaggttcataggttagaatcttggttctcagcatgcctgcatagttgtcatgagaccttttagctagaagtttgtcacaagtgagcctggcctggcctggcctctcctagtgctctggagagtgcttcctggcttaccatggaattccttcctctttcataggagtccctctaccctgaggtgagaacagctgtgtcacttactaggcctagcagtttactcttagctaatttgcatcttttgtaaaagatacagtatcttctcctagagttttataggaaataaaacaatgtaagtaaaacagtcatgccttacagttggtgcattgggaagagttactgatggttgattatgtgcaaattctgtacctatgttaggttttttaaatctctgacaaagtaccagagaaaatcaacctaaaggagtaagggttactttgactcatggtttaaaaggttgcatctccattattttgaatcttgttggacagagtatcaaggccataaatacataacacaggaagctgtgctatgctgaccaggaagcagagggaaaaaggggccaggattgcaatagccctttcaagatcacacctttagttacctcacttcctcccactaggccacaccccctaaacattttatcatcttccaatagtgccacaggctggagactaagctttgaacatgaacatttgggacataacccagatccaaatgtgacagtaccaaagcttttgtttagagtatcttatatggtaggggcttccattaatgtgttatttgtcttgccattttcagatgatggattgatgagattctgagaggtagaactgcaggtagggcagataacaggacagaaatatggttttaaaagctgcacaacaggcgaagagaggacagagaggacagagagcatagcttgtatcctagcagagtcactaagagcacaggttttagaatccagtagccttgggttcaaaccgattactagtcatgtgcatgtatgctaactttcatgcctctgattttttacctgtaaaatgcatagagtaatattatctatgttatagacatataaggattaagtgaaggaatgtatataaaatagcatgaaacctcacatgtagtagatgtattcttattaaatatgagagaatcatgaaggtagacttctattaatgaaagaaataagcctgattcctttgtgttattaaccatagtcatcaaagtattttgtgagttaacatgatctgctgtaaaagaatttatgattgaccagattcaatattaattctatgctttactttaacaaaaaagaaccatcatttcaaattaatgatatgtcgatacatagtttgttttgttttgtcaaggggaagtagagacatctctcaagctatgttttgtttacatctgctcctcaaaagagggcattggatcccatagacagatgtgagccaccatgtggatgctgtgaattgaactcaagacctctggaagagcagccagtgctcttaaccactgaaccatccctattctattcttaataaacagaagtcttaaaaacatagttatcatagaaagaaattatatataactttaaactctaatctgtattgctaagattatttgtaatatttcaaagaaatagtcaaagtttataattaaaaagtgggaaagatactgagctgtggtagtatgcacctttaatcctagcattcaggaggcagaggcaggtggatctctgagtttgaggccagcctggtctaagagcaagttctaggacagccagggctacacagagaaaccctgtctcgaacctccctcaccaaccccctaaaaaaatggtgaagaagactcttacagtcattctaagcataatctaaacttccaaggtctgaccttaaaagtaatgattcagttgtcagaattcctgttaaaatatcaaagtctgttagtgcaacaaataaaatactgagactgggggcttacaaaccacaggcacatagattttaacagtaatttaatttcagagaaactacatggtttataaaatcctgtgaactccatgtatctaggaagtaaagcaacagacacccaggccaatgagatgaatgttccggtgtgttaactagagtctgtgttgtgtcattgagtcacacctctagaccatagcgcgggtttttaagttttatttatttactgagattgggccttacttcaccgtataacctgggctgacctggaacttcttagcccaggatagctcagattctgtccttcttccttactctcctgagtgcttggattacagatgtgtgctaccatacccagcttgctctattttcgtttagtaacaatactgtactagaaggaaactattgttaaaaacttggcctctaagagtagtttgatgtagcatttaccattgtaggagtgtgtgtgtgtgtgtgtgtgtgtgtgtgtgtgtgtgtgtgtgtacatgcgtagggtacttggtagattcccaaggcagaaatctggtgattttcattttctggcctagagcgcatttaagaggcagggattctttgtgctcatttaatcattggatgtttgtcttagcctatttgtaaatcttaatcatagcattattgatggacagttcatgtctcctcatttcagcagtgcaagcatatttatccctggcttctgaactgcccttctgtgcttcctcattcacttacaactttctcttccctttcttcaaaatgtggccaagcatcctttactttcatcacatcctaacttcctttcaagaccgtttatgccttgttccctttttaatgtctgcttctcacactgtatcagttccccttaaagtattaattcccctccactatgagtctttactcattttgcagatatttgccgttatttcagagcactttctgaatttgtaatcacaaggttagttcttgcaagatcactgtctgtctcctcccactagactacagaaagctgacaggtaggaagcatgtctgtttgctggccactgtcatacgggctccacacgtgcatgccttagttcagagcctgatggtttgctgttgagaaggatttctttttactcgccgtcacacggaatactttgtcgtattacttggtgctttactctcatgaaagcgtttgagtcttgttggacagagtatcatgctcatattttgtggctatgatgcatattattatttggctagtattgtgtggagaggattgtaagaaagaagattcgggtttttgtttttctgttttgttttttgaggcagtgtttcactgtataggtgtaactaatcttaaactcaaggtaaactcctggctggcctagaactcacagagatccatctccctctgttgagattaaaggagtgcaccaccacatgagccatatccgtactttaaagccgggcatggtggcgcacgcctttaatcccagcacttgggaggcagagggcaggcagatttctgagttcgaggccagcctggtctacagagtaagttccaggacagccagggctacacagagaaaccctgtctcaaaaaaccaatatatatatatatatatatatatatatatatatatacatacacacatacatacacacacatacatacatacacacacacccatatatgtatacatacatacgtacaaatacatacatatatatatgtatatatatgtatatatttatccttactttaaaatagaattaatatcaaggaatttggaggactttaatcttctcactctattaatttattcaataaatgtttatttagcccctactatttgcaaagcagttttaaacactagaaataactattgtgaactggtaaaaacccatgcttttctgaatcttgaattttaatagagatagttaataagcaaggaaacacatatagtgacaagtcatgaccagtggccagtgctgtaagattggaacagttgtgcgtgagatggattgggagttaaaccctcttaacaagatgtttggagaagcttcactctggaggtgctgtttgagcaaatgtcaataataatgtaggttgagccttgggatgttctggggaaagaatatccgagacaaagaaggagcaagcacagagggcaggagaaaggggcgtgggctttggttgttgcatggttgagaatgattggttcctgttatgcagagatataaagtgacgatgctgagtgaaggacaaatagacatgtgtactctggatggatagttaactcggcttctgtttacatttgaaagatatgttattcttcggaaatggcatttataaagactataaccatagtatcatcaaatacttatactttgtgttaaacacgaagtgtctaaattcttatctttgtatcatctgaattcacaatactgtgatttaaataatcttaaccaaatatctctacttttcaaagtagaactttaagaaaagtgaaccttgggctggagagatggctcagcgggattaagagcactgactgctcttccgagggtcctgtgttcaaatcccagcaaccacatagtagctcacaaccattcataatgagatctgatgtcctcttctgatgctgtctgaagacagctacagtatacttagatataataataaataaatccttaaagagagaaaagaaagaaaagcgaaccttgctgggtgtggtggtacacaccattaatcccagcattcaagaggcagagacagaaagatatctgagttggtggacaaactggtgtatataacaagtttcaggccaggccaggttgtatagtgagacactgtctcaaaagcaaacagaactggagaggtggctcagctattagcagcatttgctgctcttacagaacacctggctttggctctcagcacctatattgtagctaataaccatcagtaactccagtctctgaggatccaataatgtcttctggccttcacaggcattatgtacatgtggtatataggatacatgtaggcaaaaatatacatatatataaaatttatgaaacttttaaataaaacaagaaaacctagttccttatgttttttgaaattaggtgaatgaaattaagatgggtaagaaaacataccatctgggtatgtattacttagatatgagtaacttgctattcaaaaggactattcaatagcttaatttactgggcttttgtaatcatggttctttgtatacctgttcttattctgaataatgacatggagacttatatttatttataaaagctttggtcccaaaagtaggtttgtttcccaactaattcatagctcagttatcccatttataacaatctaagttctgttgcatgggttgggagttacctctcatttctccctgacctgacttttcccctgtgttctggtggcacctggctccccgagttcctctttctgcccagatgttccaccttactattctgtctttactataggtcatacgctttttattttcaccaatcggacggcgccttaggcaggcaaggaaagacaaagacacatcttcacaaagtatacaaaaacatcactccaacaggttttctttttatatttcttttctgaaatgtttctttcaagatactttttgtttgttttactttgtcgctttcatagtagaaacttgcctgaaagacttgattgtcattcatgtgtaaatcactaaaagttagctggagactgtgtttatacaggagggcttttgtgtggtgacttgcatgaattgaatttcattataaagcctttggtttgctaatatctatagttctgttctcttagcatatcttgatgcttatcttttcatacctggagggtatggtcatagtttgaagcaccctaggctgtggatacaggaagcagtctgggatatggaacattagtgatcataatgtttcccttatgctgccttccttagtagcttcttcttagatactgtctagagacttcaggacagccagttatgttttatattcaccaaatctctctctctctctctctctctctctctctctctctctctctctctctctctctctctctctctctctctctctttaatcactataggtaggaaaagaagaggaaaatgccttgtttagcttagctttaggtggacttctgtaatcttcctgttgctaatttccctttagcctcactgcccaaggtatctggtagcctggctttcagaccttagaggataaagagttcatgtgaggactggaaagatgtttctgtggttaatagcactgtctgttcctccaactcccatgtggcacataactacctgtaaccccagttcaaagacatgataccctttctggctttcgtaggtactttgtgcacatggaacatatacatgcagataaaaaagatatacacataaaatcaaataattaaaaaaaaaagttcatttgacttgttgcttttctttactgttaggcttccagctaccattttatcatagtgagtaggttagcacttaactcatgtcttccactttcagggttttatatctggtatcccctgttcattctcgttactcagtagttcatgactttttttttcgtgacagggtctctctgtgtagccctggctgtcctggaactcactttgtagaccaggctggcctcaaactcagaaatccgcctgcctcttcccgagtgctgggattaaaggcgtgcgccaccaccgcccggcagtttatgacttcttatgttgaccatccttcactggcattgcttttttctttttaagagtgaatttaatgtaattaattgtggctttattattgtgtatgtgttcagaatttgttgtctttttcattgcaatttctatttcttaagatttattttatttttatttatgcatatacatgtgtgtctatgtgtctgcatgcatgtatgtacatgtgcaaatgcccacagaggtaagaaaagggtgttgggtcccttggagcagaagttacaggtgattgtgagctactttatatgggtgttaggaactgactggggtcctctgctctgtaagagcagcacctccttataatcactgagtcatttctccaacctcaggtttctggtttctgccagtgtcaaagtctcccttaacaacacaagggatcactgtaatttcttatggtatgctaactcataaaaggagatataaaaatgtttccattttctcaatttagaaagagctcaactaaaaggaagacatcttttctttgaagttttgataaaaattttctggttaaaaaaaggcttttctttatgtagcaattttaaattatggttcgaatttttgtttttattttattttgttttgttttgttttccagataaggtttctttgtgtagattaacagtgccagctctgtagaccagggtagctttgaattcagagatctgcctgcctgtgactggaattaaaagtgtgtgtcaccattgcccagctctgattcgattttttagtaatgacaagactactcaaattatattatttttccaaagcttttattgttcttttggaagtagagtatacagctttattcaggctaagaaggcattctacctctggcctattttccagcctaaattcaaaactttctatatccaaacatgatgctaacccatgtaatatatcatagacaaaaaatgtaactaaaatgttgataaaattatagtccaccatgtgtataagttatatttgaaacataaatgaaccatgtgcttaaactttggttttatcaccaatatatcttaatatacatataagtgaatattcaaaaaaaaatcaaaagccaagatgcatgttggaggaacacttgaggtcatttattttcctggttttgtatgtgcatgcacacagtatcagcactgtcgagtaagaactccaaatggagtaaaggatctcgcgctgccgaagttaatgctccttagccctgtctgtcacagagggagggcaacagtgcttcctagtcttctaatggttgctcggagactcactgcttctgtctgctaacctaggcctaggcctggaagctaatctagacctagaatgttttcagcctctgagacttactgctgaatatactcacccttccttgttctttccaaactctagatggctggttcagagttgctgttttggctcaaaccttcctccaagctgtttcaatttggcatctctgactgaattgctctatgtggcctcatactaactttggcaatgtgttctgatcttctggctcctgctccttttccagcttgttctgtcttcacccctgactactttctccattctctctctctctctctctctctctgcatggctccctccagtagcttctttttcctctctcttgagagttaggcgtatcctattctgtcaacctatctctgatttgttactttgtctgccactcaattagacatcactttcaaacttccttctccaaactacctttaccttcattgtttgggattaaaggtgtgtatgaaggctgtctgtattctggtcagcagggctaaaggtgtgtgggaagggatgagccacaccacactagaaatcattttttaacacaatcccaggttcacagtgtggtcagatatcctgcaacaacaaagcatggttttcatatgtactcagtaaagccatacctgctgatgttgttataatgccattttcttttatccaggattcacctttatttgatctcattaagcagtccaaggatggagaaggacctgataaccttgaacctgcttgtcctctcagcctgcctctccagggtaaccatactgcagcagatatgtaagtaaaggcaccgtgctttcattcaaactgcagagatactctggccataagggaagctcaaagcgctatatagaaattgtaggactgaaattttgcttaagatactattttttcttttaagtgttaggaatctaagacacatgacccaagtaaggtcaaataaagaagtacaaagctactgaatcacatggtgttggtgtagcggggaattaatcgttcatgacaaagctgatgctgctttagataggtccgaatgatcagataggactttagcatgagaattggaaaagcaagaggaaatatcccaagagtccgaacttacttgtttctgaaacagccagaaagcaggagagattttcagagaatatgtatcagaccatttggggagaggcacagagtaagtgtggagtaatggactattacacatcgctagtgtggagtggtgatgctgagagaagaaacagctgacatttagtcagggttccctgtatttggggcatttacataggtacgtcagattcacatttttccctagagttcataccagcctcgtaaggtagaagatactgtatcagcaccagttacctgtaaagtagcaatgagggaaacaagggagcttgcttaagatgcacataaatgaacccaagtagtcagatcacagtacatgctctcttagccctctagctttgtcctttcatagaaacgtgctccatgtttctacctgattcagtgaggaaatacagcattctgtgataaaccattttcctgtgatatcatttccatggtaacttccacccaaagtatttctgacccacagagactgtgtattcatgcatgagtttgtttgttaggtaatattttcacataagtcagctttatatgttcctgtaattcaggaaatggttatttgtaaagtgctaggttaacagtaccagttactgatatgattagatggcctggtccttttcccttataggactttgcatctcacaggaaggaagcagtgaacacatagactagtatgagtttagtttagaggactcatgcaacagtgaaaccaatgaaatgagaggaggggagacccaggagatgacgtcatagtttgactggagacctggaaggcaacgtaatgctgaccagacaaaacttttcctcttttgggaaaatgcctatattatggactagaaagaaacccagggtgggtggctcacagtcagagcagtaagtgtaaggctgacgcagaagcagcacactggagctagaggctctaaatgcatagatgttataaggtagtgggaaaccattcacacacaaatgcaactgtgaataatctgtattaagagactatctagttgctatttgaaatatgggagggcttgagggctaggagatgtcaagtcaagaaaatggaaagaaaatttcaaagactttatagtttaaataagggatgcagggactggagagatggctcagtggttaagagcactgactgctcttccagaggtcctgagttcaattcccagcaaccacatggtggctcacaaccatgtataatgggatctgatgccctcttctgttgtgtctgaggatagctacagtatattcatatacacaaaataaataattctttaaaataaataataagggatataggtatcttggactatcataaacattaaaggtggaaaagaagggtctggaatgtattttgagatagaaatagcaggttttatattgacttgatttatagcacatttgaggaagtggacaaattgagaaattttttttaaatgtatttatttttattctttaatccttttttacagtccagacttcatcctcttcctggcctgcttctcccccctaccccaaccactccccaccccatacatccttcaccacccaacctccatctccaagaggatgtccctcaccccccatcccaccaggtctccctggggcctccagtgtcttgagtgttaggtgcatcttcccagactgaacccagaccaggcagtcctctgctgtatatgtatcaggggcctcatatcagtttgtggctcgttgtctgatggatctcaaggatccaggtcagttgagactactggtctatccatggggccaccctcctccttcttctagctttctcctaattcaaccacaggggttcctggcttctgtccattgattgggtgcaaatatctgcatctgactctttcagctgcttgttggtcccctcagagggcagccatgctaggcccttgtctgcaagcataccacagcatcagtaacagtgtcagggcccagtttgggtcggtcacactggacctcttttctctcatgctcttctccatttttgtccctgtagttctttcacataggaacaattctgagttagagcttttgtttttttatttatttattattattattattattattattattattattattattattattttggtttttcaagactgggtttctctgtatagccctggctgtcctggaactcactttgtagaccaggctggcctcgaactcagaaatctgcctgcctctgcctcccgagtgctgggattaaaggtgtgtgccaccatgcccggcgagtcagagcttttgactgtggaatggcaaccccatccctccacttgatgccctgtttttctactggaggtggactctacgagttctctctccccactgttggacatttcatccaaggtccctttgaatcctgagagtctctcacttcccaggtctccggtacactctagagggttctcctccctcctccttcccagggttacctgtttccgttctttttgctggccctcagggcttcagtcttgtttcccccagtacctgatcatgttccctgtccccttttctaccaaggtccctctctctcctcctcccataactgttttcttctccctcccaagtgggattgaggcatcctcaattaagtccttgggcttgttagccttcttgagtcctgtgggttgtgtcctgggtattctgtataacaggttttatattgatttgatttgcagcacatttgaggaactggacaaattgagaaattttaaaattgcactcctaggctctttacattaacacaccagatgtgatgtagtgacatttgtttgagatgagaaagactaggtgaaggaatgcagagttctgctttagccatagaaggtgtgaggatcaggtagtactatccatttcataattggatatttgcatctagaactcaagggagacctgcttttgtacaagttaagtaattttacagttgtcagttatgaaaggaaaggaaagtcagggacattggggtttagaaagttagcatatttttcctgttaagctagcttttccagtttgtatttaagtagctaactcctggaatttggtatagaatattaatcaaatagttaaaatatgtctgaatacatgagtacaattgaacacaatttagggttgggtgtgaaacgaacacttatcttctgtatgtatatctaggtatctttctcctctaagatctccaaagaaaagaacttccactacacgtgtaaattctgctgcaaatacagagacacaagcagcctcagccttccatactcagaagccattgaaatctacctcccttgccctgttttacaaaaaaggtcagtaaaagattcctctcaagagctcagactcatggactaggttaagttgtggctccagtacttaagatatgtgacactaagcatatcacttgatatctctatgccttggtttctttgcttataaatgaaaaaaaaaaataatataccctacaataatattaacttacagggattaggggacaattaaatgcatataaaatgctttaaacaggggttaaaccgggcattgatggcacacgcctttaatcccagcactcaggaggcagaggcaggtggatttctgagtttgaggccagtctggtctacaaagcgagttccaggacagctagggctacacagagaaacatcgtctcgaaaacaaaaacaaaaacaaaaacaaaaaacaaaaaacaaaaaccaatcccttttcaagtatagcctgtggggataaattgttagctttgaagagttctgtttatgcaagtctttaaaggaacagcttgaaccatgagtaaatgtataaaattcagattccttctctcagaagttgtatttgtagtggtactcttaaactaaatttctgtcacatcattttgcaccagtacagtttataattttcaagtttatgttccactgatatttatataaaaatgcatggtaagagcttttcttttaggattgggaaagagaataatcacttgcaattccattatttaaaaataatgtctctaatattgttttttaggtttttttttttttcttttttggtttttcgagacaatgtttctctatataaccctggctgtcctggaactcactctgtagaccaggctggcctcgaactcagaaatccgcctgcctctgcctcccaagtgctgggattaaaggcgtgtgccaccaccatcctcccggctctaaaattgttaatggaaatttccaacacctatgctgaataattaccgacagaaccaaaggaaatcgtattttgtctgtctgatttcacaagatcatatgacctttcccttctgccttggtttcataatttaatagctaattcagcaagtattactgagccttgtgtatggaatgctgctaatactaggggtcatttatttaaggaaaacagccttggaggttaggctattgtttaaatgctacttacaatagtataaaggaatttaatgtttcaaaaaaaaatcccctcataattgagaatggacagtaagcaggccctttcaccttctgtctgcagtgtaccgtctagcatatctccgactaaatacactctgtgcacgccttctgtctgaccacccagagctagagcacatcatctggactctgtttcagcatacattgcaaaatgagtatgagctcatgagagaccgacatttggaccaggtaagaaaagcagtcacttccccatcgtttcttcctgctcatagttgactgtgtgctatatatcacattcaagtgaccatctacattagcttagtagtatatattaccatacattgtataacatacatagagttccttgttgaataccatttatattttttatatagcttttacaaattagaggtatatattttaataactatttaatgacacaaacatttaaccttttctgtattgtgataagctagatttcattttactgtggaaatgacatgagccagagaccagccagctatctaaccaggagatatggtgtatgcctgtaatcacaactattcttgagaggctgactcacaaatttgaggacttgccagcactacatgttaagttcaagaccactctggccacttagtgagactctgtctcaaaattcaataataaaaaagctggtgttgtagttcagtggtgaagcatttgcctgtcatacacagagcactggtgctctgatcctagtaacaaaaaatgatttacagccgggtggtggtggtgcacgcctttaatcccagcactcgggaggcagagacaggcggatttctgagttcgaggccagcctggtctacaaagtgagttccaggacaaccagggctacacagagaaaccctgtcttgaaacaaacaaacaaacaaacaaacaaaaacaacaacaacaaaaaaagatttacaaagaatcagagactccaaaacaggaatgtggggaggggaaggaaagtggggcttataaacagaataattcctcctagcttcctttttcttcttaaaggggataaaaaacatttagaggagtgtgtgcagtttatcaaagcatacatttttaaatgtatagttcagtgatttagtatatttgtagagttgtaaaactactaacacaatctattttatttaaaccattttctcacaccaaagagaaactctgttgtctctaagagtcctcaacaacataaatctactttctttttctgtagatttgtcgaatctgaacattttatgtaaatagaatcatatgtaatttcatatttagggtgtgtgtgtgtgtgtgtgtgtgcgcgcgcgcgcacgtgtgtgcaggtgtgcagggtagggtcctgactgagttctatgaccttgcaaatcctaggcaaatgttcttccactgaacttcgtccccagccttgagtgtggatggcttctttatagagcacaggttcaaggttcatctgtgttgtagtttctgtcacatactacattatgtttataattcatcagttgatagaaactggattatttcttctttgatgtattatgaataatgtcaatattcatatataaggtttgtaaaacatgtttttatttttctatgtatatgtaagtaaaatttctgggtcatatgttaaatctttaacctttttgagaaatggcagggatattttctaaaatggctttaccaatttatgttttatttttaaagatttattatttttaagtgtgtgtgggagggtgtttctatgtgtaggtacatgcatgtttacagtatctgtgaaggccagagacattgggtcccctggggctggatcataggcatatgtagctggtagctaatgatagcgaacatctgctttagagaagtgtgtgttaaaatcctttctgaaaagacagcaagagtcttcctcactgagcgtggcggtgtgcaaacagacctcaaactcacagagctctgcctaagtctgcccctcagttctggaattaaaggcacagccaccacaacaggcggcaatgatttaaaaaaaaaatatgttctgtatatatctttttctatgaaatatgtgttttgaaaatgttttatcctctgagaaacttcaggtcatctttggtttgttttttgttttgttttttgcttcttttttttttgttgttgttggtggtgatggttggttgttttggctactggtattttgatgtatgaacaaaaacattgtcaagtttggaggcatcaagacctcatttttcccaagagctttgtgctcttagttttctgtttcagtttcaatccactttgacttagttttgcaagagggcaggggaggacttctccctccagttgttccagcacaggagccccacccccctctttcctctcactctttctccttggtgtgaatccagggcctcttactttgtggcaaacacttcactgagctatgcccattcccacaccatctcttgaaatgcatcctttttttttattattattctttttctttttctctgttgacagctgttgaaagtctattgatttttttttttttttagtgtacacatgtttattcctgagactcatttccagtctgttatctatgtagctattttggtgagaatacactgtcttagttactatagcattccaattttttggaataaagagacacaattgtactttgttctttttgcaagatcaatttaactgtcctgaaacttaaatttccatgtgagttttaggactgacttgtcattttctctgaagattttgaaagaaagttcacgggctaatgtgtcagtttgggggatgtcacatgtagcatgaagtcttcaatccatacggaggatgcggctccttcccatccttccaggctttaatttctttcaataatagtttatagttttcagaatacaagtcttacatttatttttttaaagatttatttacttattataagtaagtacactgtagccgtcttcagatactccactccacaaaagggaatcagatctcattacagatggttgtgagtcatcatatggttgctgggatttgaactcaggaccttcagaagagcagttggtgctcttaactgctgagccatctctccagccccttacatttattttattaactatactcctatgtattctattctctttaataataaaggaaattatttttatttcattgttttgttgatctgtgtgatttttgtatcagcaaagtattagcttcatacagatagttgggaacttctaatttcagaagaactttttaagaattgatattgatattgagtctttttcttcttggaattttgctgaattcaccaatgaggtcccataggtatggggatttgtgtgtgtgtgtgtgtgtgtgtgtgaacacttactgtttagtaattcaaaattagcttttttacttttcagtcgatattggcatctgcataacttgaggaacttagtgtcatcttagttcttttagtggtgcataattttcataatattctcatataatcctcttatttcagtaagactggtaatgttcccaacaagaatgatattttaaacaaaaacataattataacttaacatgtatttggatgtataagctgcagtacactgtgtttttaaatagatagctattattttatgttcctgccactttctataaaagggaaacccagattcctagagattttttttttttgcaattccgagttttatgagtgaaacgtgaagatattaaagtagaagaagactatcagttggtctgtcgtcatcagtggcgctcggtgggaagctcagtcatcacacactgagcaggggtggggatagaaacctttgctcagagcagatggaagcaaaaatggtacagaaatgaccaacacttgaactagaccaaaaaagccgttttaaaaattgatatttaaggccccagggaatcattttcaaatcttagttttacattttaaatgttgttttattgaaagataccatatagaaaatccatttatcataaggatatgttctgatgaaaattgagcaacaaaacagatccagcctacattcagatcacagatcacaacaccatgagcaatgtaaggtctgtcagcagcactttcttactccctagattattacatgtcacttcagttgatagcttgaaacttttcacacagccttaaaacagtattcatcatacaattagcttgttctaagagtttcaatacttttgatatatactaaagaactgaagccaaagtcagggtactttacaaacttggtagtcagtcatgagtaattgagttagctgcttgcattttgttctgtaaatacaaatgttttgattaaataccttatgtagacttttgaacagctcagaataaggggaaaactcagaagaaattaaatttccttcttttaataatacttaaaagagccaggtgaggtagtatggtccctcatgcctctgtcactcgcttgctagattatgatgtgctctatgtatggcatctgcaaggtgaagaacatcgacctcaagttcaaaatcatcgtcactgcctacaaggatcttcctcacgctgcccaggaggtaggtagccgctcatggtaagactgaaaaataaatcagtattcatagtttacttcagttgttaaatagagatcatatatccttatttacttctttagtgttggttaattatttgtaactgaagtataattataaaactatggcaaactatgaaatccaaatcttcataaatagtactatatttgtatataataataactggggtatttgaaataaactttgacataacatatagtttttatttttccgcaggaaaagatactataagtcagtccttataaagacctagtaaaatttcccagtgcaagcccattttatacctctaaattcttctcccacagatgctatcatggtaaaacacacatagtctgacacacattttacactatcctggaatgcagcaatgaatcctgggttattgtttcagtctgtcattgtattcttggaaagtgatacaaaccagtttagtttgcattatatatttggagttattttctaaattggttatatacatattgtttaacagaggcactccataagatgtctttagttttacctgatgaacatttatacaagtgggacctggtgtcccagacctgtaattctcattcagaataagtgagaagaagatgtcacgaagtatgaggttgcatagctagaccctgcttattaaacaaaaacttgtttgtaaaaatctacttaaaaaatctgtttctactacgaaaaatctgtttcttgcaggagagtggtgtacatgttctaaaccctttagatgaggggttgaaagctgctacgggccagtgaatgttgtctgtatagtagtgctgatggtgctgggttttggttagcacagcctaactcccttgtagaatggccagcattctgtcggtggctgccaggccccttctctggatcaccttggtgacatttcactttaaatagggtacctataatttcagtctaagggagccttggttagattattgttttctgtataaaatgtgttttttaaataaaactaaatacaattattttaaaataaaagttaaagagaagttcttaaatttatttaacatgttttttttccttagacctttaaacgtgttttgatcagagaagaggagtttgattccattatagtattctataactccgttttcatgcagagactaaaaacaaatattttacagtatgcctccaccagggtatgttgaaaatattctttaattggataaatctaataacaatataatggatcctaccaaaatactacatcgatgattttttttcttttgttttgggtctagcctcctaccttgtcaccaatacctcacattcctcgaagcccttacaagttttctagttcacccttacggattcctggaggtaacatctatatatcacccctaaagagtccttataaaatttcagaaggtctgccaacacccacaaaaatgactccgagatcaaggttggtgtttcctttttaagggaatgctgaaaacagtaatactgcacttggcaattttgatttaaacatgaaaatgtaaagctttttaaaattcaaaatgggataggctgttgaatgtctgatttctttatgtgcatttagtgaatgtgtgaaaagggtttttttggggggtggggggcaaagaaaaggtgtgtgcctggatgggcttgtgtatcactcgtgcttgcctagctgctgaggtctcttctgtgtatagcttaagaaccgatatccacgtgtgcctcaaaacactaatagtttcataagccatcaaagtagaacattttaggttaacatgtttgtttgtttgaaacagggtctcactatgtagccgttggctggcctggaacttgctaagtagaacaggcagggtacatactcagagatccacctgcctctacctcctgactgctgagattaaaggtgtatgccatcacacccagaatctttattaaaaatttactgtaagctccatggattatagtgttttgcttgttatgaaaatggagtcattagggctggcagcatgtaccacccatgaaagtactcgccacagaactaatgacctgagtttgagtcctggatagaagaagcagagaaccagcttacaaaagttgttctctgattctgagacacttgctcacactcacacacacagatcattcacacacagaaatagaaataaggatatacgctttggagtctggctttgaagcccttcactggactacttaggtgttatcataggctacttgaaactggctggatgtttataaagcagaagtcccattaactagtatagttaatgccatctcagcagccgttttcagtacctgtagtttgtacctggtgggcaagaaaagtaaatgagaagaagcactttattagcttcttagaagctacccgagtagtacagtaattacatgagaaatgcacacttgtgaatacattttcaaactttgtagaaaaacatgaagtaaaacataactggaaatacggtgaaaggctgctgtgtgtgtccagatccctctctgtatgatgtgctttgtaactgattatctgtgtacaggtgtcctcagctcactgtgtaacatgctaagatgtaacaccatgtcttcttaggtaaatgtacagagtcccatgctgccacatgacttggcagtgtatactctggaagtttctgatggtgataaataatccatattatgattataatgatggctgtttgctgatcttaatcaaaatcagttctgtattgctattctttgttcccattaatttattaatttatttaccatacattctgattgctaccctcccctcttcccagttcctacctccccagttgctaatcttatttttttttcctctaagaagctttatctttcaatatgtaacccagggtagcttcaaactcactgcttcagtttctcaagtacaggaaggaaacaacaagcccagcgtgcattggtgctaattttagccagggaaaaggtcacactattaagcatcccaatgggcacatcactggtaaagcgttagagaactgtggcattctgttcatgcagcatgcttaggtactctgattaatcaaatgtgcgtgggaggatgtcacttaaccaaagagatggaagacaggacaatctacatagctactacttctttattgagctacatatagaaatgctttttcaccttaattatcaaaaatataaattataactaagattaagtctggtaacatagacctataatctcagctgcttaggaggctacacctgctggccaactcggtgagaccctgtcttaaactaaaaggtcaaagttttgggatgtagcttagcgatagagttctagcttaacacatttgacaaggccctagtttcaaccccttgtaatgtggctgaaatgaagacaaatggaataagtatctcacataacaaatagcatttactaaataccaatataaatactaattaaaatgtgattatttctttataagcatacattataaagttatatttcttgggatgagcggggctcgcatgccatggcacacatgggtaggacagagaacagctttgtagagactgttgtctctgaacacctttatgtgggtttctgtgatagctagaacccaggttgctaggtatgtggagcagttgcctatatttgctaagccatctcaccagcccttttttattgttgttttgttttatatttattttatctatgtggggccatgcatgctactgtgaatgtgtgtggttagagcacaacttgctggagtcactctctcctgccatgagtttgagggactaaacccaagttaccaggcttggccacaagtgcttttacctgctgagccatcttactggtcttttaagttttatttattggcctaagtttgtatcaaatgtaacttaaattagaatgaagttacatttgttgatttatgaggaactaagtaaagataatcttaagtttttctaaaaatcctctttaaatgtggaccatggcagaattatgctctgcaaacacagagttcttgttgcaaatctaagagctagggtgtagcttagtagtagaatgcatcactagcatattgaggctttcagcaccaaaacaaacaacaaacaaacaaacaaacaacctcttcctggttatgtcttaatcatactagcattggcccaacaaccccctgatgggtatcaggtgttggtggttgcaggggcagggagcctttgatatgtggtggctgagagtgtgcacctatgttcatctcggcatgtctgcacggtctgtgtctagttctcacaactaactcacattttatcttaacttgacagaatcttggtctcaattggtgaatcatttggggtgagtatttttttatgaacagtggtgtcatggaatgttatataaaatataccggacagtatgatgcaagagctatgtgcccctgtatcatcctttatttagtgttctgttgttaaacatcttgtgtggacatcagtgacttatattgcaactaaaaaagaaatagaagattttcataatttgagattaaaggcactgttgcctagataggtcctttaggctgtctcaggttattttcaaatcaggtttaactttgaataatattcataattgggaaacttgcaagttttttctaaacatttctctgagattatgtaatatacatgtaaatagtcatttgtatacacacataaagtgtttttatgttcccagtactcccaaagtgaaacataaattctccaactgtatgcatagctgctgtcatccagttcagtctgacagattacccagcagtctttggatcccactggctccagggctcaggtcattaacttcgcccaggtcgtaagtggcaagttcctgggttgcactaattttctaaccaaactggccaacagtcagggaatccctgtaatatctttcttttccagtttgaccatttgctagaatactcataaaactttggaaaatagtttactgaccatagcagtttattacaaaagatacagatgagcagccggatgaagagacacatagggtgatgtccactggggcttctggcccgctcctgtggagtccgcatctccagagctctcctaagcctaatgctaaaggattggattttgtacaaatagttgattaactaaatgtctacccactttccctactctgaaggttaggaaccgtggttgaaaattcccagcttctaaccagggcttgtctttctgactccatactgatactaagggcctatcaggagtctctttattagaacaaaagatggccctatcttccttatcacttgggaagttccaagggttttaggagcaggaatagaagacaaagacctcatatctttctatgtggtaacatgtatgtgtacaatctcatagaaatgtttacagaagtttgaagtgaggtcctctgaaatgaagcacaatagcctctgcagcatgactctggcactggcctcctcccacacccccgcgctctaacactccttcctgtacttactcaccccacctcccactgccttctgctccctctcggtgctagtctttctctgatcaataaggacctgaggtaaatgtgcttgctgcataagcccaggggcctgagtttgaccccaagaatccacatgaaaggtggcaggagaaaactgactcctaaagtttgtcctctgctgttggcatgtgcaccacagtacacatactgttatattcacacacagcgtgcacacatatataacaacaataaatacaattttttaaataattggtttcatgatgaaccaagcacagtggtttataatctcagaagactgaggtagaaggatcaagaatttgtgactacttggaaatgaaaaatcagttctctctaatagtctctctgaggatacaaactatactttcagggcaggtcctgtacccagcagtagataatttacacaaaacaaactcagtggcaactttggaagttcctttttgtctcctagggctgtttttctttgtgtgtgttacagctttcagtttgtgtgttgagggattcttgcgtgtaccaacccgtgccctgcatccatatgcccacctcatgctttttctttggccctttttcttctgtgtatttgttttgtcatattttagttgttttattttatttattattattctttagatgcctgtttgttttctaacaaaagacagaaggggtataaattccagtgggagagaaaaatggagggaaactcagtgggagaggggaaactgatcaaaatatattgtatgaacaacatctagtttcaaaaagagaaaaaaataaaaaagagtttgtggcaaacctgagctacatggtgatttgtaggcccgcatgggctatatagcattaatgttgttttaggtgaaaacaaaagagggaaagaaaagggaaacagaggaagagaggagaaagagagggaacagctgtgtgcacaccctagagcactggctagttctgagccctcctaacaccgaggccctttcctggtgtgctggccccaaccagaaccttagttttgttgctacatcatactgtaattttgatattgttatgaattataacaaataattttggagatagagttttgccaaaggggtcttgacccacaggttaaaaagcactgctctagcggttggttggagtttatatgctaaataaaatgtaaaagttcattttacaaatcctcagtgctgtgacagctgattgaagacgggctgtagctgctgggctttacaaaggagctgtgggaccattcgtttacacctcacgcaaggcagctcacacaggtcatcacacttttgcttactgcagcctgtgaaacaatggagacactattcatccgcatagtaataaggccctgggacttagcttctgccatgttgaatatgtactctacatatattttcattaaattaagctgatcctatctaatgcaccaatcagttcatgtttaagttctatctgaaagtctaacttcatttgttggcttaactaacatgtaatacacatgcctgagacagtcatgaaatggaagctaagagacagactgtttccacatacttatctactgggtgagattgggtggtgtgcctgttctggcatgtcttaccaaggtcacatgtctagtaatattgcctggactaaaattgtgaagtctttgaatatttaagttaaaaacctttataaattagcaacatttcaacaatgccatccatgatgagtgatggttagtgatatatcaacatcccatgactcaatccacctcagggagtatatcagtcacggctcctatggccttccttcttgctatgtaatcctctaaatcacagctttttttaaaaaaggtttttggttttttgtttttttgtttttttgttttttttttttgttttttgttttaatttcagttctagaaataggatccacctttactacttctgagaagtcctggtttcaagcgttgagtgccagcaaggccataggcttagccagtgcttgacagcgcagggatagcacagaatcagagctgcttggatagatgggagaatcagctgcttgcatagatgggagaatcagctgcttgcatagatgggaggattcaggaggaatgggtgtttaatgaaggcagaattggcatccttatgctaattgtttttaaatctgtcacttagtccagtaaggcagagaattaaaatgaagagattacttttgcctaacttttggtgcatctcaaaataaaatttgtagctgctgacttcaaaatgtggctatttaatggtttaaaataagaactctgtaatttacagacatctgaaaagttccagaaaataaaccagatggtgtgtaatagtgacagagtgctcaaaagaagtgctgaaggcggcaacccccccaaaccactgaaaaagctgcgctttgacatcgagggagccgatgaagcagatgggaggtaggaaccatggagatgcttgctccaggtagctgagcagagcacagagccactgtcagccccgtcctgagtcccctcaggccttgtcctgccagtttaccactttgtgagaacaactaaagagactagatgtgggagaaggtagcctatgcctttaatcccaacacttgggaggcagatgaggcccctctctgggagatcaaaggcagccacagctatatagtgagaccttgtctggaaaaacaagagaaaacaacatactaagtgtaaagtggtacagtggaaagcaacatgcaaatctgccatctataaattcatgacgacttagacattacaagtctaagcatggacttacacagctattgatacaaatttgttagttttaacattaaattaaaaaactcttagaaaatactaaattatgctctataaaaaccactaaaaatatataagatcataaatttgtgatatctttttttagatcacttagaagcttttgaaattaaaccaaaataatagcatgtaattgaaagcaacagagttactaggaagttgcatgcatgcttttaaaatgtgtttttttttccccccaatctgcagtaaacatctcccagcggagtccaaattccaacagaaactggcagaaatgagtaagttcccctctcttactttgcaaacagggaagcagcatttgatttcactgaagaaagccttttgactctgaaggaatccacacattattccttcaagtggcacagttatttatgcatttacaaactagtagttcaaacaggagtatacaatttacctcacacattggtagactaagtgtgtttcacaaagtgtgggtcagcacactttgaatagtcttaagctgatgttgatctgtactttaaaatattactttttgaaattttgtacatgtatgcagtatgatttgatggcattctcccctcactggccaccttctctcttcttccaggcacctccccttaaactgcactcccagccttatctcctcttccttttccatagccactgagtccagtcagtgctggtggtatgcagacaactttagggccacccatggagcacacacaaaccaccaggggcttgttaaacttccttactctccaggctttgagacagttctaaacagaggtttccattactggaagtcagatttgtggaaattgggatcaggtctgtcagtgtgacagcaatttagaatggtggggtgaggggttgtcactgagtagcagagtgtttgctgcctaatgtgcacaaggtcttgagttaagttctcagcactgcaacagacaggctatatatacaatcaatcaataaaatgaatgttatttttggaatagtatgacaaatttaatttcaccctaagctattatgagactaaaaaattaagtagatggaaggaagcggtatttgctaagtgttctggttgtcttaggcacatagctgtggtagtaagagtagctgctgcaagacccagtaataggcaaagaaagggacttagaaaaagtagaagtgtttagaagcttgtgggggccactgccagtgaaggtgatgaggacttacaggcaggtactggacatgcatggcagctgccagagaaagcacacagcagagctgtacttcttctgcatacttttaaagccctttcccttaagtgtgtcgtttgaacctaaattaaatatgctaaccacttaaaatactagttatatgaattaatacatctctattatatctcttcaagttttgtgtgccccaaccccaccccaccccacaggaccccatgtgcagacatggtgggctgcctgcccctggtccacttactttcccagagtcctcagcactattaatattcttgttgcttttccagcttccactcgaacacgaatgcaaaagcagagaatgaatgagagcaaggatgtctcaaacaaggaggaaaagtgaggacctcagggccctggaccctcagccctggggacaccagactcctggctcatggttgtgactagttcccaggttctgctcatgttagagatataaaatgtgcaggtacaagctgaatatttgtgtgggtgattcgtaagccacttcaatgttgtaatcaatggtagagaattgatagcacacaggattgagaatcttgtgcagatcatgccatttaaaatatgaaagcaagttgtttgcatttccaacatgagcctgctgccctcagaagtgagggcctctgcaggggtcctgaccccctacatctggctgactactttgcctttcctcatggcacatgtgtgatgtttgctcttggttttattaatttatatgtattttttaatttaacgtgaatacccttagaaaatgtgtcttgtcttccaaatgcaagttgattgactgtccacattcaaccaaattatcttgaatcttctactgaaacagattgttacaaactgggaaaaagtactaatttctacacattggactattttaatattagaatctaatgtgccgtgtgtttgtttcacatattttacttttgaaatacaagcaaaaaaagtataatcatatgatactgtcttactactgacacagatttcatacctcagaccctctaagaaccgattcttttattcacccaacacatgctttgaactgaagactattgataatactccgaggttgtttttttctttcaatcattcagatcactgaatttataagtacccatgtagtacttgaaagtcaagtttggccacaactgtgcttaagaggaccctagtacagtacaacccaagtgcactttttaatgtttctgggtcctgaagaatcaagatacaaattaattgtgatttacaagcagactgttaactatagaagccttcagtttttttccctcatagacgtgtctaattacatctcaacagtttactctgttcttctacatctggggatgtttgtgttctctctggaatggtacatcttccagggtcttttgaacttgcagttatctattttttaagccaatctggtctaataactctggcttcttcaaagccacaccatttctagtccagctgtgcagaaacttcagatgaaaacagctgcattgaaaatagaggcactcccttcaccccccacctaaaggtgtatttaaattatcttgtgggattaacttatttagagatggtataatttaaaataggggatatttaaggtagcatcagctagcatttaagaaaatcactttttctaaactccatactttttgaaaagaaatctggtcttgttaggaaacaaatttctattttgtcctcaatttagtttcagttttactagtttgatagttatctcaataacaaaagcaatagacagcttcccccatttcttcattaagttttgcatgatcatcacacagattagttaggttttaggtcaagggcttaccatacttctaggtcttttgctagtgagttcaagttagaattagtgacagaatcataggaattttcagagatcctgcttcgagatttcttaaagctgcagacactgcactattggttttgtttttttgtaccggttgaaactatacattcaaattgctatgttcctattttctataatagtttgtctattttaaaataaactagttgttcagagccttactggtgtgatatgatctctgagttaagtgttttctgcatctgagctttctcctcacatcttttccattctgatgaccgacagatttacagaaatatactttttatgcattcatatggtatgtattatatattaatatattctgttctcttgtgtctccttttttatgaaatgaatttgtctaaaaagctgtatgctttgtgaggccctcccagaaacaggaaaaaggagacactaaaaacttgaaagcaacgtatacagcagggaatagaaagactgggaagagacagtaggcggctgtttagctggcagctgccggctgcagggccttcccacatttgaacattacttcgttgataaacagcaaatctaaccacacatgaaaataactgagaggaggccatgtgcagtagtgagttcagtgaagactggttggctttagaacaagagatgtctgtagggcctccgccaggcagggatacaaaaacataagatcagacaggaccacacaaatctgactgtggtacaaatgcttgtgatccaagttctcagcagctgaggccggagggtataagtgggaagccagcttgggttacatagaagatgtcaaaaagaggtggagaggagagagtggcagacagggtgggaaatgtttacaaaagatacatctgagaaagaactgttacctaacatatacaaagaactcttaaagttcaacagaatcacaagttcatttaaaaatgagccaaagacctgtccaggtatgtagtctcccctcccccagcctgaaacctgcttgctcggggtggagcttcctgctcattcgttctgccacgcccactgctggaacctgcggagccacacccgtgcacctttctactggaccagagattattcggcgggaatcgggtcccctcccccttccttcataactagtgtcgcaacaataaaatttgagctttgatcagtatgaaattgccttagctccgtttcttcttttgccccgtctagattcctctcttacagctcgagcggccttctcagtcgaaccgttcacgttgcgagctgctggcggccgcaacattttggcgccggaactgggacctgaagaatggcagagagatgctaagaggaacgctgcattggagctccacaggaaaggatcttcgtatcggacatcggagcaacggacaggtacacatgctagcgctagcttaaaatttcagttttgtaaagtgttgctaaggatgcggtaggatacgaattaagcttgaatcagtgctaacccaacgctggttctgcttgggtcagcagcgtgttaatcggaactagaaacggaaacaggcaggttagccgcagctttttaggaagctgcttaggtggaagaagaaagggtttaaagtcatggatcaggcggttgccaatagttttcaggagttgtttcaggccagaggagtaaggctcgaagtacaattagtaaaaaattttttaggtaagatagatagctgttgcccatggttcaaggaagaagaaacactagattgtggaacctgggagaaagttggtgaggccttaaaaatcactcaggcagataattttaccctaggcctctgggcgctcgtaaatgatgcaataaaagatgccacttccccagggctaagttgcccccaggcggagcttgtggtatctcaggaggagtgcctgtcagagagggcctcctcagaaaaagatcttcttaactcaaaaattgataaatgtggaaactcggatgaaaaactgatttttaacaaaaatcactcagatagaggagctgcccattaccttaatgagaattggtcctcttgtgaatctcccgctccacctgtagtccccacttcgggaggtgccactcatagggacacacgactaagcgagttagagtttgagattaagcttcagaggctgactaatgagcttcgggaactaaaaaagatgtcagaagcggagaagagtaactcttctgtagttcaccaggtgccgctagaaaaggttgtgagtcaggctcgtgggaaaggacagaatatgtctaatacgctagcctttccggtggtcgaggtagttgatcaacaagatactaggggcagacattaccagaccttagatttcaagttgataaaagagttaaaggcggctgttgtgcaatatggcccttcagccccgttcactcaagcattactggacacagttgtggagtcacacttaacccctttagattggaagactctttctaaggctaccctgtcaggaggagattttttgctttgggattctgaatggcgagacgccagtaaaaaaactgctgcttctaacgctcaggctggtaactcagactgggatagcaacatgcttttaggagagggcccttatgagggacagacaaatcagattgattttcccgttgcagtgtacgcgcaaattgcgacggccgcacgccgtgcttggggaaggttgccagtcaaaggagagattggtggaagtttagctagcattcggcagagttctgatgaaccatatcaggattttgtggacaggcttttgatttcagctagtagaattcttggaagtccggacacgggaagtcctttcgttatgcaattggcttatgagaatgctaatgcaatttgccgagctgcgattcaaccgcataagggaacgacagatttggcgggatatgtccgcctttgcgcagacatcgggccttcctgcgagaccttgcagggaacccacgcgcaggcaatgttctcaaggaaacgagggaaaaatgtatgctttaagtgtggaggtttagatcattttagaattgattgtcctcagaacaagggtgccgaggttagacaaacaggccgtggcccaggaatatgtccccggtgtggaaagggccgccactgggcgaaagattgtaagcataaaacgagggttttgagccgcccggtgccgggaaacgaggaaaggggtcagccccaggccccgagttactcaaagaagacagcttatggggctataaatctgctgcccagccaacaagatcagttcttgagcttgtcaggtcaaacccaggaaatgcaagactggacctctgttccactgtccatgtagcattaaccccagaagtgggagtccaaactctgcctaccggagtttttggaccactacctgtaggaacctgtggttttctcttaggacgaagcagttctattgtagaaggcctgcagatttatccaggtgttataagtaatgattatgagggagaaattaaaatcatagccgcttgccctcgtggtgctataactatacccgctaatcagaaaattgctcaacttactttgatccctttgcgctggtcactatctaaattctttgaaaatgaagaaggacagaataactttgactcccttggcgtaaattgggtgaaatctatcactaatcagagacctaaccttaaattgattcttgatggaaaaagctttgaaggattaatagataccggggccgatgtaacgataattagagggcaggactggccctcaaactggcccctgtctgtttccttgactcaccttcaaggaattggttatgccagtaacccaaaacgtagttccaaattgctaacctggagagatgaggatggaaaatcaggaaatattcagccgtatgttatgccaaatttgcctgtaaccctgtggggaagagatctgttgtcacagatgggcgttatcctgtgcagttctaaggagatggtgactgaacagacgttcaggcagggacccctgcctgatcgtggactaataaagaagggacagaaaattaagacctttgaggatcttaaaccccactctaacgtgagaggtttacagtattttcagtagcggccactgtcttgcctgcatcccacgccgaaaaaattcaatggcgtaatgatattccggtatgggtagatcagtggtccttgcctaaagagaaaatagaggccgcttctttgctagtgcaggagcagttagaagcaggacatttggtggagtctcactctccctggaatacacccattttcattatcaggaagaaatcgggaaaatggagactattgcaggatttaagaaaggttaatgaaaccatggtacttatgggaactttacaaccggggcttccctccccagtagccattcctaagggatattataagattgttatagatttgaaagattgtttctttaccatccctttgcatccaaaggattgtgagagatttgcttttagtgttccttctgtaaatttcaaggaacccatgaaaagatatcattggacagttctcccgcagggcatggctaatagtcccaccttatgtcaaaggtttgtggcaaaggcaattcagcctgttagacaacaatggccaaatatttacatcatccatttcacagatgatgtcctgatggcgggaaaggacccccaagatttgcttttgtgttatggagacttacaaaaggccctggctgataagggattacaaattgcttctgaaaagatacaaactcaggatccttataattatttgggttttagactcactgatcaagctgtttttccccagaaaattgttattcgtagagataacttaaggaccttaaatgattttcaaaaattgttaggtgatataaattggcttcgcccttatctaaagcttactacaggggagttgaaacctttatttgatattcttaaagggagttctgatcccacttcccctagatccctaacctcagaagggttgctggccttacagctagtggaaaaggctattgaagaacagtttgtcacttacatagattactccctgccgctgcacctgttaatttttaatacgactcatgtgcctacgggattgctatggcaaaaatttcctataatgtggatacattcgaggatttctcccaaacgtaatatcttgccatatcacgaagcagtggctcagatgattatcactggaagaaggcaggcattgacttattttggaaaggagccagatatcattgtccagccttacagcgtgagtcaggacacttggctgaaacagcatagtacagattggttgcttgcacaattagggtttgaaggaactctagatagccactacccccaagataggttgataaaattcttaaatgtgcatgatatgatatttcctaagatgacttccttacagcctttaaataatgctctgttgatttttactgatggctcctctaaagggcgagctggatatcttattagtaatcaacaggttatcgtagagactcctggtctctcggctcagctcgccgaattaacagcagtactgaaggtttttcagtctgtgcatgaggcttttaatatttttactgacagtttatatgttgctcagtcagtacccttactggaaacctgtggtacgtttaacttcaatacgccgtcaggatctttattttcagaattacaaaacatcattctcgcccggaaaaatccgttttatattggccacatacggtctcactctggtcttcctggacctctggcagagggtaatgatcgcattgacagagctctaataggagaagccttagtttcagatcgggttgctttggcccaacgtgatcacgaaaggtttcatctttctagccataccctaaggctccgacataagatcacaaaggagcaagcgagaatgatcgtaaaacaatgtcctaaatgtattactttatctccagtgcctcatctaggagttaatcctagaggccttatgcctaatcatatttggcaaatggatataacccattatgcagaatttggaaaactaaaatatatacatgtttgcattgatacttgttcaggatttctttttgcttctctgcatacaggagaagcttcaaaaaacgtaattgatcattgcctacaagcatttaatgccatgggattgcctaaacttattaagacagacaatgggccatcttattccagtaaaaactttatttcattctgtaaagaattcggtattaatcataaaactgaaattccttacaaccccatgggacaaggaatagttgaacgtgctcatcgcaccttaaaaaattggctttttaagacaaaagagggtcagctatatcccccaaggtcaccaaaggcccaccttgccttcactttatttgtcctaaatttcttgcacaccgatatcaagggccagtctgcagcggatcgccactggcatccagttacttctaattcttatgcattggtaaaatggaaggaccccctgactaatgaatggaagggtccagatccagttctaatttggggtaggggctcagtttgtgttttttcacgagatgaagatggagcgcggtggctgccagagagattaattcgtcagataaacacagattctgactcttctggtaagtatcattctaaagactaaaattccttttgtgcttaaaattcagctgagagcaacagctctcaaagctgtttgtgttctccagctactctctgaaccagctcccgacaggaggccggagactagcctcagctttacaatttgcatttaaataaagtacctagacttccccgaaagaagttctgctttcctactttctcactgtctttcaagattttgtctttcaagcaggtaaatcaacattcccgaggcggaccagcggatgtgcatccccgcccccctagagcacacaggcggcagctgttacccccagtctcaggacatttccagcatgtggctttcagtctgagttaaaaatttaggtttacctagagggctagaagagtagatttttctatatcaataaagattggtttttattttggtagacaggcttagccccttagctgacctctggcttttcacccttgctgttactgcaaggtgtccttagctcaataggctgtggaaaaaacagggatgaggaggaacgacttccagctcctattttacccacaaatcgtggtgttattaacgacataattcttgcttaggctttgctaattctgaggttgataattctcctttaggagctgcacagcactcaaaactgtgcatactggtttgtgattgtacaaattcagtatgggcaccgcttggtgcagagatacttactgcaagggaaggtccagcttgaccatttctgagtttcctgtgagataaacccggtttaaaagaggttggtatcatattttggttaaaaataaaaaatattctccggctctaccttgcctccccaaaagataccgagagccacatgtgtgggttttacccacgggaagaatcgggtccatgtccacccaagccaaggttaaaagcccactcatctacggatgagaaaatcatttaatcacctcagttaagcgttgccttatttaacttaattaataggggggagagagattggagacgtactattgaaagggcaagcccttcactgcctcccacccaaataaaaaagccaattggccttgtactacaagagccggtcactccttctccctgtttcccacctatcttccaaaaatgcggagaaattcaacttagtgctattttcacatcgttcagtcaaacttagccagagttccaacgccctacttaaaattcaactagaaagttacctaccaagtactaattagcattataaagtcagagtctgcagctccaggcctttcagttgtttactagaaaggacagtcttaagccagatacagtttaccataagaaaggttaaagaatcccagtgaagcaagttttttctttagccctagattccaggcagaactattgagcatagataattttcccccctcaggccagctttttccttttttttttattttgttaataatagggaggagatgtagtctcccctcccccagcctgaaacctgcttgctcggggtggagcttcctgctcattcgttctgccacgcccactgctggaacctgcggagccacacccgtgcacctttctactggaccagagattattcggcgggaatcgggtcccctcccccttccttcataactagtgtcgcaacaataaaatttgagctttgatcagtatgaaattgccttagctccgtttcttcttttgccccgtctagattcctctcttacagctcgagcggccttctcagtcgaaccgttcacgttgcgagctgctggcggccgcaacacaggtagatcaccaaagaagcagcagatgtcaagtaagtgcatgcagtaacagtgcaggccatgcattatccaggggatgcacagggtgttcagccgcagcgctgcacaccagctggacaccaccaaaggctgggacaacagaactctcctccattgctagtgagaagacttcttatcagtgacttacgaaactaaacacaaccttaccctaagatcacagtcatgcgccgccttgtgatttactaaaaggaactgagaatatgtctacacaaaacctatacagctctttgaccacttcctcacaattgccaaaccctggaagcaaccaagatacctttaaataggtgaatggataaacttgtaagtccagagagtagaactgttactcagcactgaaaaaagctactaagccatggaaagagaatggaacaacctttagcatctatcactacataaaagaaggtagtgtgaagaatctgcatgccaagatttcagtggtgttttggaaaaggtaaaactgaagacagaagaagaacagtgaggggatggagagggctcagcagtcaagaggacttgttgctcttggggggaccttggttcaattccatatggtatggttcacaaccatccagaactctagttccagggactccagccctatcttcttccctctgcaggtaataggcacatatgtgttgcacttaacagttatggggaaaaaatatttctacatatatgttttaaaaaggccagtggtggtcaaaggttgaggagggaggagaatggataggtagaccacagctattccatgtgatattggaacaatggagatgagccagtgtatttgtctaaacccacagaaggtatagtaccaagagggaaacttacaatctagccctcatgggataaggttgggtgaaggttttcatcaactggagcaagtgtgccactcgggaggagatgctgaatctgtcagggtaacacatgttggtgaagtaggagacagaggaacatagctataccatctcagtttttatgcaaaattataaaactctgcaaaaattttatggctttaaaacaagtaactaccctggttttatatcaacctgacacaagtttgagttacttcagaagagggacttgaaactgagaaaatacctaaaattggcctataggttagtctgtcagactgtttcttaatcactggtatgagagggcccaggccagtgtgtgtggtaccgcttgtgggtaggtagtgttgggttgtataagaaagcaggctctgtaagccatggagagaaagacagtaagcagcaatcctccatggcctctacttaagatcctgccctgagaattaagctgaaataaagctctccttcccaagtttgttttggtcaaggtaccacagcaatagtaactgtaatgactatatttagtcagtttgactacatctggagtgaactacaatccagaaacggagggcaaatttttgcttggtttgaagtaggtgaatacacttctagtccagacctttaagatataaggaactgaatcttaagactgaagggcacaggcctttaatttgaatcttaagatgcaaatacatgcctttaatccaaaccttgatttgggaagacatacccttaaatatgggccataccttctgctagaaatctatataaggcagaaggaaactgttgctctttgcctacttgcccttgtcttgctaggacatccatcctttcactggcattggagcctacctctttgggattccagtatatacagaagaccagctaagacatccagccttgtgggactgagcaactactagattcttggactttccattcacagctagccattgttggattggctagactgcagcctataagctatttcagtaaatcccctaagtatctatctttaatttttttcaaaacctatttctaatgaaggttcttaaacaccttaacctctcttgtagttcactgtgactcaccaaaggtagtagaaaagaaaggatacaggggaggtggacctgtttagaattggttctttggagcaactcccatctgtgttatctggaaatcagcactttagttcacaggttagcagcggcagctagatccacttgcagacacttcatggatacaccagcagtccagttcaatagagtcaggatagcaaagaagaatcagtagctgtggcactacctagcagagacaaccagggctcagccttggcatgagtcagcagcaggagagaccagcaggaatgccaggagttgttcttggttatgcctctctcagggaatcaaagatcagcgaagactggagactaacaagcattgcacagcaagcactctataagcaagccaagctcagcttcctccactgtctgtaaagtcctttttataatccctccaaacatcacgtatcttctgcatgtcttgcctcagtacatgtgtctatctcagctgacatcactctgtcaatcagcccaagtctgaggaagtggcaacaaaagtagcagcacatcacctgatgttttttttgtttgtttgtttgttttttggttttttttttttttttttttggtgcacatggagtcctgacaaatgcagctcaactacaaaatgtaaggaggaccaataccaatacatgcttgttagtgacgaatccttcatgtgtcctttcatgtttgccttagcagaacatcctttctcccgtgtttgcttcagctaaacattccttcaggagtctgccttagcctttcacttgtgtccatttcagctaaatgttcctttatgtgtttgccccagcagaacactatccaactgactttccaaagaaccctaaagttaccacttcaatccatccatccatccatccatccatccatccatccatccttccttccatatctatggagagaggggatggagggagagattgactcattcctaagttctgtgactgtggagaactcttaatactgtaattttaccaataaacaccaaggcaataaaattaataactggcctttaaaaaataggaaccatttatatcttagagtcaactttgctataagacatctgaatatctgcttttaataagtacagatcataaaagggatttttatccacctgtgagacaaaagtttgatactttgattttgttactcaacaatttaagaaggcagtttgttctatcaagttctttattatcaaataattatacatgagaataagatttctattttcaaaaagatttccttaacatagtatcatattgtgagacacttggtggaatccagtgctacattttgttcagtttgtttctcttttgctacacaatggcttgttttggtctagaaactcatttctccatcacaatgctacccatgaaatgtgttcctttctatctagtatttactagtgcctggttaagaaaccaaagctagctacaagaaaaacctataatcaatcttatatagagagaccctcaatataaagaaaagcaaagggctttatgcaattacataaggcataggattccagaagtaacattcaaagttaatgttttattttcaacaatgccattatgagaagttaatgcagaaagtagaaaatcaaaagtagcccttgggcctttgacaacgtagttgctaaggcattttatgaatgctaatatgctctaaattagctactgtttctcagaattacaaactaaaagaatatgaatatcagtaattac

SEQ ID NO: 72 - DNA, 154290 bp, Mus musculus
gtaattactgatattcatattcttttagtttgtaattctgagaaacagtagctaatttagagcatattagcattcataaaatgccttagcaactacgttgtcaaaggcccaagggctacttttgattttctactttctgcattaacttctcataatggcattgttgaaaataaaacattaactttgaatgttacttctggaatcctatgccttatgtaattgcataaagccctttgcttttctttatattgagggtctctctatataagattgattataggtttttcttgtagctagctttggtttcttaaccaggcactagtaaatactagatagaaaggaacacatttcatgggtagcattgtgatggagaaatgagtttctagaccaaaacaagccattgtgtagcaaaagagaaacaaactgaacaaaatgtagcactggattccaccaagtgtctcacaatatgatactatgttaaggaaatctttttgaaaatagaaatcttattctcatgtataattatttgataataaagaacttgatagaacaaactgccttcttaaattgttgagtaacaaaatcaaagtatcaaacttttgtctcacaggtggataaaaatcccttttatgatctgtacttattaaaagcagatattcagatgtcttatagcaaagttgactctaagatataaatggttcctattttttaaaggccagttattaattttattgccttggtgtttattggtaaaattacagtattaagagttctccacagtcacagaacttaggaatgagtcaatctctccctccatcccctctctccatagatatggaaggaaggatggatggatggatggatggatggatggatggatggattgaagtggtaactttagggttctttggaaagtcagttggatagtgttctgctggggcaaacacataaaggaacatttagctgaaatggacacaagtgaaaggctaaggcagactcctgaaggaatgtttagctgaagcaaacacgggagaaaggatgttctgctaaggcaaacatgaaaggacacatgaaggattcgtcactaacaagcatgtattggtattggtcctccttacattttgtagttgagctgcatttgtcaggactccatgtgcaccaaaaaaaaaaaaaaaaaaaaccaaaaaacaaacaaacaaacaaaaaaaacatcaggtgatgtgctgctacttttgttgccacttcctcagacttgggctgattgacagagtgatgtcagctgagatagacacatgtactgaggcaagacatgcagaagatacgtgatgtttggagggattataaaaaggactttacagacagtggaggaagctgagcttggcttgcttatagagtgcttgctgtgcaatgcttgttagtctccagtcttcgctgatctttgattccctgagagaggcataaccaagaacaactcctggcattcctgctggtctctcctgctgctgactcatgccaaggctgagccctggttgtctctgctaggtagtgccacagctactgattcttctttgctatcctgactctattgaactggactgctggtgtatccatgaagtgtctgcaagtggatctagctgccgctgctaacctgtgaactaaagtgctgatttccagataacacagatgggagttgctccaaagaaccaattctaaacaggtccacctcccctgtatcctttcttttctactacctttggtgagtcacagtgaactacaagagaggttaaggtgtttaagaaccttcattagaaataggttttgaaaaaaattaaagatagatacttaggggatttactgaaatagcttataggctgcagtctagccaatccaacaatggctagctgtgaatggaaagtccaagaatctagtagttgctcagtcccacaaggctggatgtcttagctggtcttctgtatatactggaatcccaaagaggtaggctccaatgccagtgaaaggatggatgtcctagcaagacaagggcaagtaggcaaagagcaacagtttccttctgccttatatagatttctagcagaaggtatggcccatatttaagggtatgtcttcccaaatcaaggtttggattaaaggcatgtatttgcatcttaagattcaaattaaaggcctgtgcccttcagtcttaagattcagttccttatatcttaaaggtctggactagaagtgtattcacctacttcaaaccaagcaaaaatttgccctccgtttctggattgtagttcactccagatgtagtcaaactgactaaatatagtcattacagttactattgctgtggtaccttgaccaaaacaaacttgggaaggagagctttatttcagcttaattctcagggcaggatcttaagtagaggccatggaggattgctgcttactgtctttctctccatggcttacagagcctgctttcttatacaacccaacactacctacccacaagcggtaccacacacactggcctgggccctctcataccagtgattaagaaacagtctgacagactaacctataggccaattttaggtattttctcagtttcaagtccctcttctgaagtaactcaaacttgtgtcaggttgatataaaaccagggtagttacttgttttaaagccataaaatttttgcagagttttataattttgcataaaaactgagatggtatagctatgttcctctgtctcctacttcaccaacatgtgttaccctgacagattcagcatctcctcccgagtggcacacttgctccagttgatgaaaaccttcacccaaccttatcccatgagggctagattgtaagtttccctcttggtactataccttctgtgggtttagacaaatacactggctcatctccattgttccaatatcacatggaatagctgtggtctacctatccattctcctccctcctcaacctttgaccaccactggcctttttaaaacatatatgtagaaatattttttccccataactgttaagtgcaacacatatgtgcctattacctgcagagggaagaagatagggctggagtccctggaactagagttctggatggttgtgaaccataccatatggaattgaaccaaggtccccccaagagcaacaagtcctcttgactgctgagccctctccatcccctcactgttcttcttctgtcttcagttttaccttttccaaaacaccactgaaatcttggcatgcagattcttcacactaccttcttttatgtagtgatagatgctaaaggttgttccattctctttccatggcttagtagcttttttcagtgctgagtaacagttctactctctggacttacaagtttatccattcacctatttaaaggtatcttggttgcttccagggtttggcaattgtgaggaagtggtcaaagagctgtataggttttgtgtagacatattctcagttccttttagtaaatcacaaggcggcgcatgactgtgatcttagggtaaggttgtgtttagtttcgtaagtcactgataagaagtcttctcactagcaatggaggagagttctgttgtcccagcctttggtggtgtccagctggtgtgcagcgctgcggctgaacaccctgtgcatcccctggataatgcatggcctgcactgttactgcatgcacttacttgacatctgctgcttctttggtgatctacctgtgttgcggccgccagcagctcgcaacgtgaacggttcgactgagaaggccgctcgagctgtaagagaggaatctagacggggcaaaagaagaaacggagctaaggcaatttcatactgatcaaagctcaaattttattgttgcgacactagttatgaaggaagggggaggggacccgattcccgccgaataatctctggtccagtagaaaggtgcacgggtgtggctccgcaggttccagcagtgggcgtggcagaacgaatgagcaggaagctccaccccgagcaagcaggtttcaggctgggggaggggagactacatctcctccctattattaacaaaataaaaaaaaaaggaaaaagctggcctgaggggggaaaattatctatgctcaatagttctgcctggaatctagggctaaagaaaaaacttgcttcactgggattctttaacctttcttatggtaaactgtatctggcttaagactgtcctttctagtaaacaactgaaaggcctggagctgcagactctgactttataatgctaattagtacttggtaggtaactttctagttgaattttaagtagggcgttggaactctggctaagtttgactgaacgatgtgaaaatagcactaagttgaatttctccgcatttttggaagataggtgggaaacagggagaaggagtgaccggctcttgtagtacaaggccaattggcttttttatttgggtgggaggcagtgaagggcttgccctttcaatagtacgtctccaatctctctcccccctattaattaagttaaataaggcaacgcttaactgaggtgattaaatgattttctcatccgtagatgagtgggcttttaaccttggcttgggtggacatggacccgattcttcccgtgggtaaaacccacacatgtggctctcggtatcttttggggaggcaaggtagagccggagaatattttttatttttaaccaaaatatgataccaacctcttttaaaccgggtttatctcacaggaaactcagaaatggtcaagctggaccttcccttgcagtaagtatctctgcaccaagcggtgcccatactgaatttgtacaatcacaaaccagtatgcacagttttgagtgctgtgcagctcctaaaggagaattatcaacctcagaattagcaaagcctaagcaagaattatgtcgttaataacaccacgatttgtgggtaaaataggagctggaagtcgttcctcctcatccctgttttttccacagcctattgagctaaggacaccttgcagtaacagcaagggtgaaaagccagaggtcagctaaggggctaagcctgtctaccaaaataaaaaccaatctttattgatatagaaaaatctactcttctagccctctaggtaaacctaaatttttaactcagactgaaagccacatgctggaaatgtcctgagactgggggtaacagctgccgcctgtgtgctctaggggggcggggatgcacatccgctggtccgcctcgggaatgttgatttacctgcttgaaagacaaaatcttgaaagacagtgagaaagtaggaaagcagaacttctttcggggaagtctaggtactttatttaaatgcaaattgtaaagctgaggctagtctccggcctcctgtcgggagctggttcagagagtagctggagaacacaaacagctttgagagctgttgctctcagctgaattttaagcacaaaaggaattttagtctttagaatgatacttaccagaagagtcagaatctgtgtttatctgacgaattaatctctctggcagccaccgcgctccatcttcatctcgtgaaaaaacacaaactgagcccctaccccaaattagaactggatctggacccttccattcattagtcagggggtccttccattttaccaatgcataagaattagaagtaactggatgccagtggcgatccgctgcagactggcccttgatatcggtgtgcaagaaatttaggacaaataaagtgaaggcaaggtgggcctttggtgaccttgggggatatagctgaccctcttttgtcttaaaaagccaattttttaaggtgcgatgagcacgttcaactattccttgtcccatggggttgtaaggaatttcagttttatgattaataccgaattctttacagaatgaaataaagtttttactggaataagatggcccattgtctgtcttaataagtttaggcaatcccatggcattaaatgcttgtaggcaatgatcaattacgttttttgaagcttctcctgtatgcagagaagcaaaaagaaatcctgaacaagtatcaatgcaaacatgtatatattttagttttccaaattctgcataatgggttatatccatttgccaaatatgattaggcataaggcctctaggattaactcctagatgaggcactggagataaagtaatacatttaggacattgttttacgatcattctcgcttgctcctttgtgatcttatgtcggagccttagggtatggctagaaagatgaaacctttcgtgatcacgttgggccaaagcaacccgatctgaaactaaggcttctcctattagagctctgtcaatgcgatcattaccctctgccagaggtccaggaagaccagagtgagaccgtatgtggccaatataaaacggatttttccgggcgagaatgatgttttgtaattctgaaaataaagatcctgacggcgtattgaagttaaacgtaccacaggtttccagtaagggtactgactgagcaacatataaactgtcagtaaaaatattaaaagcctcatgcacagactgaaaaaccttcagtactgctgttaattcggcgagctgagccgagagaccaggagtctctacgataacctgttgattactaataagatatccagctcgccctttagaggagccatcagtaaaaatcaacagagcattatttaaaggctgtaaggaagtcatcttaggaaatatcatatcatgcacatttaagaattttatcaacctatcttgggggtagtggctatctagagttccttcaaaccctaattgtgcaagcaaccaatctgtactatgctgtttcagccaagtgtcctgactcacgctgtaaggctggacaatgatatctggctcctttccaaaataagtcaatgcctgccttcttccagtgataatcatctgagccactgcttcgtgatatggcaagatattacgtttgggagaaatcctcgaatgtatccacattataggaaatttttgccatagcaatcccgtaggcacatgagtcgtattaaaaattaacaggtgcagcggcagggagtaatctatgtaagtgacaaactgttcttcaatagccttttccactagctgtaaggccagcaacccttctgaggttagggatctaggggaagtgggatcagaactccctttaagaatatcaaataaaggtttcaactcccctgtagtaagctttagataagggcgaagccaatttatatcacctaacaatttttgaaaatcatttaaggtccttaagttatctctacgaataacaattttctggggaaaaacagcttgatcagtgagtctaaaacccaaataattataaggatcctgagtttgtatcttttcagaagcaatttgtaatcccttatcagccagggccttttgtaagtctccataacacaaaagcaaatcttgggggtcctttcccgccatcaggacatcatctgtgaaatggatgatgtaaatatttggccattgttgtctaacaggctgaattgcctttgccacaaacctttgacataaggtgggactattagccatgccctgcgggagaactgtccaatgatatcttttcatgggttccttgaaatttacagaaggaacactaaaagcaaatctctcacaatcctttggatgcaaagggatggtaaagaaacaatctttcaaatctataacaatcttataatatcccttaggaatggctactggggagggaagccccggttgtaaagttcccataagtaccatggtttcattaacctttcttaaatcctgcaatagtctccattttcccgatttcttcctgataatgaaaatgggtgtattccagggagagtgagactccaccaaatgtcctgcttctaactgctcctgcactagcaaagaagcggcctctattttctctttaggcaaggaccactgatctacccataccggaatatcattacgccattgaattttttcggcgtgggatgcaggcaagacagtggccgctactgaaaatactgtaaacctctcacgttagagtggggtttaagatcctcaaaggtcttaattttctgtcccttctttattagtccacgatcaggcaggggtccctgcctgaacgtctgttcagtcaccatctccttagaactgcacaggataacgcccatctgtgacaacagatctcttccccacagggttacaggcaaatttggcataacatacggctgaatatttcctgattttccatcctcatctctccaggttagcaatttggaactacgttttgggttactggcataaccaattccttgaaggtgagtcaaggaaacagacaggggccagtttgagggccagtcctgccctctaattatcgttacatcggccccggtatctattaatccttcaaagctttttccatcaagaatcaatttaaggttaggtctctgattagtgatagatttcacccaatttacgccaagggagtcaaagttattctgtccttcttcattttcaaagaatttagatagtgaccagcgcaaagggatcaaagtaagttgagcaattttctgattagcgggtatagttatagcaccacgagggcaagcggctatgattttaatttctccctcataatcattacttataacacctggataaatctgcaggccttctacaatagaactgcttcgtcctaagagaaaaccacaggttcctacaggtagtggtccaaaaactccggtaggcagagtttggactcccacttctggggttaatgctacatggacagtggaacagaggtccagtcttgcatttcctgggtttgacctgacaagctcaagaactgatcttgttggctgggcagcagatttatagccccataagctgtcttctttgagtaactcggggcctggggctgacccctttcctcgtttcccggcaccgggcggctcaaaaccctcgttttatgcttacaatctttcgcccagtggcggccctttccacaccggggacatattcctgggccacggcctgtttgtctaacctcggcacccttgttctgaggacaatcaattctaaaatgatctaaacctccacacttaaagcatacatttttccctcgtttccttgagaacattgcctgcgcgtgggttccctgcaaggtctcgcaggaaggcccgatgtctgcgcaaaggcggacatatcccgccaaatctgtcgttcccttatgcggttgaatcgcagctcggcaaattgcattagcattctcataagccaattgcataacgaaaggacttcccgtgtccggacttccaagaattctactagctgaaatcaaaagcctgtccacaaaatcctgatatggttcatcagaactctgccgaatgctagctaaacttccaccaatctctcctttgactggcaaccttccccaagcacggcgtgcggccgtcgcaatttgcgcgtacactgcaacgggaaaatcaatctgatttgtctgtccctcataagggccctctcctaaaagcatgttgctatcccagtctgagttaccagcctgagcgttagaagcagcagtttttttactggcgtctcgccattcagaatcccaaagcaaaaaatctcctcctgacagggtagccttagaaagagtcttccaatctaaaggggttaagtgtgactccacaactgtgtccagtaatgcttgagtgaacggggctgaagggccatattgcacaacagccgcctttaactcttttatcaacttgaaatctaaggtctggtaatgtctgcccctagtatcttgttgatcaactacctcgaccaccggaaaggctagcgtattagacatattctgtcctttcccacgagcctgactcacaaccttttctagcggcacctggtgaactacagaagagttactcttctccgcttctgacatcttttttagttcccgaagctcattagtcagcctctgaagcttaatctcaaactctaactcgcttagtcgtgtgtccctatgagtggcacctcccgaagtggggactacaggtggagcgggagattcacaagaggaccaattctcattaaggtaatgggcagctcctctatctgagtgatttttgttaaaaatcagtttttcatccgagtttccacatttatcaatttttgagttaagaagatctttttctgaggaggccctctctgacaggcactcctcctgagataccacaagctccgcctgggggcaacttagccctggggaagtggcatcttttattgcatcatttacgagcgcccagaggcctagggtaaaattatctgcctgagtgatttttaaggcctcaccaactttctcccaggttccacaatctagtgtttcttcttccttgaaccatgggcaacagctatctatcttacctaaaaaattttttactaattgtacttcgagccttactcctctggcctgaaacaactcctgaaaactattggcaaccgcctgatccatgactttaaaccctttcttcttccacctaagcagcttcctaaaaagctgcggctaacctgcctgtttccgtttctagttccgattaacacgctgctgacccaagcagaaccagcgttgggttagcactgattcaagcttaattcgtatcctaccgcatccttagcaacactttacaaaactgaaattttaagctagcgctagcatgtgtacctgtccgttgctccgatgtccgatacgaagatcctttcctgtggagctccaatgcagcgttcctcttagcatctctctgccattcttcaggtcccagttccggcgccaaaatgttgcggccgccagcagctcgcaacgtgaacggttcgactgagaaggccgctcgagctgtaagagaggaatctagacggggcaaaagaagaaacggagctaaggcaatttcatactgatcaaagctcaaattttattgttgcgacactagttatgaaggaagggggaggggacccgattcccgccgaataatctctggtccagtagaaaggtgcacgggtgtggctccgcaggttccagcagtgggcgtggcagaacgaatgagcaggaagctccaccccgagcaagcaggtttcaggctgggggaggggagactacatacctggacaggtctttggctcatttttaaatgaacttgtgattctgttgaactttaagagttctttgtatatgttaggtaacagttctttctcagatgtatcttttgtaaacatttcccaccctgtctgccactctctcctctccacctctttttgacatcttctatgtaacccaagctggcttcccacttataccctccggcctcagctgctgagaacttggatcacaagcatttgtaccacagtcagatttgtgtggtcctgtctgatcttatgtttttgtatccctgcctggcggaggccctacagacatctcttgttctaaagccaaccagtcttcactgaactcactactgcacatggcctcctctcagttattttcatgtgtggttagatttgctgtttatcaacgaagtaatgttcaaatgtgggaaggccctgcagccggcagctgccagctaaacagccgcctactgtctcttcccagtctttctattccctgctgtatacgttgctttcaagtttttagtgtctcctttttcctgtttctgggagggcctcacaaagcatacagctttttagacaaattcatttcataaaaaaggagacacaagagaacagaatatattaatatataatacataccatatgaatgcataaaaagtatatttctgtaaatctgtcggtcatcagaatggaaaagatgtgaggagaaagctcagatgcagaaaacacttaactcagagatcatatcacaccagtaaggctctgaacaactagtttattttaaaatagacaaactattatagaaaataggaacatagcaatttgaatgtatagtttcaaccggtacaaaaaaacaaaaccaatagtgcagtgtctgcagctttaagaaatctcgaagcaggatctctgaaaattcctatgattctgtcactaattctaacttgaactcactagcaaaagacctagaagtatggtaagcccttgacctaaaacctaactaatctgtgtgatgatcatgcaaaacttaatgaagaaatgggggaagctgtctattgcttttgttattgagataactatcaaactagtaaaactgaaactaaattgaggacaaaatagaaatttgtttcctaacaagaccagatttcttttcaaaaagtatggagtttagaaaaagtgattttcttaaatgctagctgatgctaccttaaatatcccctattttaaattataccatctctaaataagttaatcccacaagataatttaaatacacctttaggtggggggtgaagggagtgcctctattttcaatgcagctgttttcatctgaagtttctgcacagctggactagaaatggtgtggctttgaagaagccagagttattagaccagattggcttaaaaaatagataactgcaagttcaaaagaccctggaagatgtaccattccagagagaacacaaacatccccagatgtagaagaacagagtaaactgttgagatgtaattagacacgtctatgagggaaaaaaactgaaggcttctatagttaacagtctgcttgtaaatcacaattaatttgtatcttgattcttcaggacccagaaacattaaaaagtgcacttgggttgtactgtactagggtcctcttaagcacagttgtggccaaacttgactttcaagtactacatgggtacttataaattcagtgatctgaatgattgaaagaaaaaaacaacctcggagtattatcaatagtcttcagttcaaagcatgtgttgggtgaataaaagaatcggttcttagagggtctgaggtatgaaatctgtgtcagtagtaagacagtatcatatgattatactttttttgcttgtatttcaaaagtaaaatatgtgaaacaaacacacggcacattagattctaatattaaaatagtccaatgtgtagaaattagtactttttcccagtttgtaacaatctgtttcagtagaagattcaagataatttggttgaatgtggacagtcaatcaacttgcatttggaagacaagacacattttctaagggtattcacgttaaattaaaaaatacatataaattaataaaaccaagagcaaacatcacacatgtgccatgaggaaaggcaaagtagtcagccagatgtagggggtcaggacccctgcagaggccctcacttctgagggcagcaggctcatgttggaaatgcaaacaacttgctttcatattttaaatggcatgatctgcacaagattctcaatcctgtgtgctatcaattctctaccattgattacaacattgaagtggcttacgaatcacccacacaaatattcagcttgtacctgcacattttatatctctaacatgagcagaacctgggaactagtcacaaccatgagccaggagtctggtgtccccagggctgagggtccagggccctgaggtcctcacttttcctccttgtttgagacatccttgctctcattcattctctgcttttgcattcgtgttcgagtggaagctggaaaagcaacaagaatattaatagtgctgaggactctgggaaagtaagtggaccaggggcaggcagcccaccatgtctgcacatggggtcctgtggggtggggtggggttggggcacacaaaacttgaagagatataatagagatgtattaattcatataactagtattttaagtggttagcatatttaatttaggttcaaacgacacacttaagggaaagggctttaaaagtatgcagaagaagtacagctctgctgtgtgctttctctggcagctgccatgcatgtccagtacctgcctgtaagtcctcatcaccttcactggcagtggcccccacaagcttctaaacacttctactttttctaagtccctttctttgcctattactgggtcttgcagcagctactcttactaccacagctatgtgcctaagacaaccagaacacttagcaaataccgcttccttccatctacttaattttttagtctcataatagcttagggtgaaattaaatttgtcatactattccaaaaataacattcattttattgattgattgtatatatagcctgtctgttgcagtgctgagaacttaactcaagaccttgtgcacattaggcagcaaacactctgctactcagtgacaacccctcaccccaccattctaaattgctgtcacactgacagacctgatcccaatttccacaaatctgacttccagtaatggaaacctctgtttagaactgtctcaaagcctggagagtaaggaagtttaacaagcccctggtggtttgtgtgtgctccatgggtggccctaaagttgtctgcataccaccagcactgactggactcagtggctatggaaaaggaagaggagataaggctgggagtgcagtttaaggggaggtgcctggaagaagagagaaggtggccagtgaggggagaatgccatcaaatcatactgcatacatgtacaaaatttcaaaaagtaatattttaaagtacagatcaacatcagcttaagactattcaaagtgtgctgacccacactttgtgaaacacacttagtctaccaatgtgtgaggtaaattgtatactcctgtttgaactactagtttgtaaatgcataaataactgtgccacttgaaggaataatgtgtggattccttcagagtcaaaaggctttcttcagtgaaatcaaatgctgcttccctgtttgcaaagtaagagaggggaacttactcatttctgccagtttctgttggaatttggactccgctgggagatgtttactgcagattggggggaaaaaaaaacacattttaaaagcatgcatgcaacttcctagtaactctgttgctttcaattacatgctattattttggtttaatttcaaaagcttctaagtgatctaaaaaaagatatcacaaatttatgatcttatatatttttagtggtttttatagagcataatttagtattttctaagagttttttaatttaatgttaaaactaacaaatttgtatcaatagctgtgtaagtccatgcttagacttgtaatgtctaagtcgtcatgaatttatagatggcagatttgcatgttgctttccactgtaccactttacacttagtatgttgttttctcttgtttttccagacaaggtctcactatatagctgtggctgcctttgatctcccagagaggggcctcatctgcctcccaagtgttgggattaaaggcataggctaccttctcccacatctagtctctttagttgttctcacaaagtggtaaactggcaggacaaggcctgaggggactcaggacggggctgacagtggctctgtgctctgctcagctacctggagcaagcatctccatggttcctacctcccatctgcttcatcggctccctcgatgtcaaagcgcagctttttcagtggtttgggggggttgccgccttcagcacttcttttgagcactctgtcactattacacaccatctggtttattttctggaacttttcagatgtctgtaaattacagagttcttattttaaaccattaaatagccacattttgaagtcagcagctacaaattttattttgagatgcaccaaaagttaggcaaaagtaatctcttcattttaattctctgccttactggactaagtgacagatttaaaaacaattagcataaggatgccaattctgccttcattaaacacccattcctcctgaatcctcccatctatgcaagcagctgattctcccatctatgcaagcagctgattctcccatctatccaagcagctctgattctgtgctatccctgcgctgtcaagcactggctaagcctatggccttgctggcactcaacgcttgaaaccaggacttctcagaagtagtaaaggtggatcctatttctagaactgaaattaaaacaaaaaacaaaaaaaaaaaacaaaaaaacaaaaaaacaaaaaaccaaaaaccttttttaaaaaaagctgtgatttagaggattacatagcaagaaggaaggccataggagccgtgactgatatactccctgaggtggattgagtcatgggatgttgatatatcactaaccatcactcatcatggatggcattgttgaaatgttgctaatttataaaggtttttaacttaaatattcaaagacttcacaattttagtccaggcaatattactagacatgtgaccttggtaagacatgccagaacaggcacaccacccaatctcacccagtagataagtatgtggaaacagtctgtctcttagcttccatttcatgactgtctcaggcatgtgtattacatgttagttaagccaacaaatgaagttagactttcagatagaacttaaacatgaactgattggtgcattagataggatcagcttaatttaatgaaaatatatgtagagtacatattcaacatggcagaagctaagtcccagggccttattactatgcggatgaatagtgtctccattgtttcacaggctgcagtaagcaaaagtgtgatgacctgtgtgagctgccttgcgtgaggtgtaaacgaatggtcccacagctcctttgtaaagcccagcagctacagcccgtcttcaatcagctgtcacagcactgaggatttgtaaaatgaacttttacattttatttagcatataaactccaaccaaccgctagagcagtgctttttaacctgtgggtcaagacccctttggcaaaactctatctccaaaattatttgttataattcataacaatatcaaaattacagtatgatgtagcaacaaaactaaggttctggttggggccagcacaccaggaaagggcctcggtgttaggagggctcagaactagccagtgctctagggtgtgcacacagctgttccctctctttctcctctcttcctctgtttcccttttctttccctcttttgttttcacctaaaacaacattaatgctatatagcccatgcgggcctacaaatcaccatgtagctcaggtttgccacaaactcttttttatttttttctctttttgaaactagatgttgttcatacaatatattttgatcagtttcccctctcccactgagtttccctccatttttctctcccactggaatttataccccttctgtcttttgttagaaaacaaacaggcatctaaagaataataataaataaaataaaacaactaaaatatgacaaaacaaatacacagaagaaaaagggccaaagaaaaagcatgaggtgggcatatggatgcagggcacgggttggtacacgcaagaatccctcaacacacaaactgaaagctgtaacacacacaaagaaaaacagccctaggagacaaaaaggaacttccaaagttgccactgagtttgttttgtgtaaattatctactgctgggtacaggacctgccctgaaagtatagtttgtatcctcagagagactattagagagaactgatttttcatttccaagtagtcacaaattcttgatccttctacctcagtcttctgagattataaaccactgtgcttggttcatcatgaaaccaattatttaaaaaattgtatttattgttgttatatatgtgtgcacgctgtgtgtgaatataacagtatgtgtactgtggtgcacatgccaacagcagaggacaaactttaggagtcagttttctcctgccacctttcatgtggattcttggggtcaaactcaggcccctgggcttatgcagcaagcacatttacctcaggtccttattgatcagagaaagactagcaccgagagggagcagaaggcagtgggaggtggggtgagtaagtacaggaaggagtgttagagcgcgggggtgtgggaggaggccagtgccagagtcatgctgcagaggctattgtgcttcatttcagaggacctcacttcaaacttctgtaaacatttctatgagattgtacacatacatgttaccacatagaaagatatgaggtctttgtcttctattcctgctcctaaaacccttggaacttcccaagtgataaggaagatagggccatcttttgttctaataaagagactcctgataggcccttagtatcagtatggagtcagaaagacaagccctggttagaagctgggaattttcaaccacggttcctaaccttcagagtagggaaagtgggtagacatttagttaatcaactatttgtacaaaatccaatcctttagcattaggcttaggagagctctggagatgcggactccacaggagcgggccagaagccccagtggacatcaccctatgtgtctcttcatccggctgctcatctgtatcttttgtaataaactgctatggtcagtaaactattttccaaagttttatgagtattctagcaaatggtcaaactggaaaagaaagatattacagggattccctgactgttggccagtttggttagaaaattagtgcaacccaggaacttgccacttacgacctgggcgaagttaatgacctgagccctggagccagtgggatccaaagactgctgggtaatctgtcagactgaactggatgacagcagctatgcatacagttggagaatttatgtttcactttgggagtactgggaacataaaaacactttatgtgtgtatacaaatgactatttacatgtatattacataatctcagagaaatgtttagaaaaaacttgcaagtttcccaattatgaatattattcaaagttaaacctgatttgaaaataacctgagacagcctaaaggacctatctaggcaacagtgcctttaatctcaaattatgaaaatcttctatttcttttttagttgcaatataagtcactgatgtccacacaagatgtttaacaacagaacactaaataaaggatgatacaggggcacatagctcttgcatcatactgtccggtatattttatataacattccatgacaccactgttcataaaaaaatactcaccccaaatgattcaccaattgagaccaagattctgtcaagttaagataaaatgtgagttagttgtgagaactagacacagaccgtgcagacatgccgagatgaacataggtgcacactctcagccaccacatatcaaaggctccctgcccctgcaaccaccaacacctgatacccatcagggggttgttgggccaatgctagtatgattaagacataaccaggaagaggttgtttgtttgtttgtttgttgtttgttttggtgctgaaagcctcaatatgctagtgatgcattctactactaagctacaccctagctcttagatttgcaacaagaactctgtgtttgcagagcataattctgccatggtccacatttaaagaggatttttagaaaaacttaagattatctttacttagttcctcataaatcaacaaatgtaacttcattctaatttaagttacatttgatacaaacttaggccaataaataaaacttaaaagaccagtaagatggctcagcaggtaaaagcacttgtggccaagcctggtaacttgggtttagtccctcaaactcatggcaggagagagtgactccagcaagttgtgctctaaccacacacattcacagtagcatgcatggccccacatagataaaataaatataaaacaaaacaacaataaaaaagggctggtgagatggcttagcaaatataggcaactgctccacatacctagcaacctgggttctagctatcacagaaacccacataaaggtgttcagagacaacagtctctacaaagctgttctctgtcctacccatgtgtgccatggcatgcgagccccgctcatcccaagaaatataactttataatgtatgcttataaagaaataatcacattttaattagtatttatattggtatttagtaaatgctatttgttatgtgagatacttattccatttgtcttcatttcagccacattacaaggggttgaaactagggccttgtcaaatgtgttaagctagaactctatcgctaagctacatcccaaaactttgaccttttagtttaagacagggtctcaccgagttggccagcaggtgtagcctcctaagcagctgagattataggtctatgttaccagacttaatcttagttataatttatatttttgataattaaggtgaaaaagcatttctatatgtagctcaataaagaagtagtagctatgtagattgtcctgtcttccatctctttggttaagtgacatcctcccacgcacatttgattaatcagagtacctaagcatgctgcatgaacagaatgccacagttctctaacgctttaccagtgatgtgcccattgggatgcttaatagtgtgaccttttccctggctaaaattagcaccaatgcacgctgggcttgttgtttccttcctgtacttgagaaactgaagcagtgagtttgaagctaccctgggttacatattgaaagataaagcttcttagaggaaaaaaaaataagattagcaactggggaggtaggaactgggaagaggggagggtagcaatcagaatgtatggtaaataaattaataaattaatgggaacaaagaatagcaatacagaactgattttgattaagatcagcaaacagccatcattataatcataatatggattatttatcaccatcagaaacttccagagtatacactgccaagtcatgtggcagcatgggactctgtacatttacctaagaagacatggtgttacatcttagcatgttacacagtgagctgaggacacctgtacacagataatcagttacaaagcacatcatacagagagggatctggacacacacagcagcctttcaccgtatttccagttatgttttacttcatgtttttctacaaagtttgaaaatgtattcacaagtgtgcatttctcatgtaattactgtactactcgggtagcttctaagaagctaataaagtgcttcttctcatttacttttcttgcccaccaggtacaaactacaggtactgaaaacggctgctgagatggcattaactatactagttaatgggacttctgctttataaacatccagccagtttcaagtagcctatgataacacctaagtagtccagtgaagggcttcaaagccagactccaaagcgtatatccttatttctatttctgtgtgtgaatgatctgtgtgtgtgagtgtgagcaagtgtctcagaatcagagaacaacttttgtaagctggttctctgcttcttctatccaggactcaaactcaggtcattagttctgtggcgagtactttcatgggtggtacatgctgccagccctaatgactccattttcataacaagcaaaacactataatccatggagcttacagtaaatttttaataaagattctgggtgtgatggcatacacctttaatctcagcagtcaggaggtagaggcaggtggatctctgagtatgtaccctgcctgttctacttagcaagttccaggccagccaacggctacatagtgagaccctgtttcaaacaaacaaacatgttaacctaaaatgttctactttgatggcttatgaaactattagtgttttgaggcacacgtggatatcggttcttaagctatacacagaagagacctcagcagctaggcaagcacgagtgatacacaagcccatccaggcacacaccttttctttgccccccaccccccaaaaaaacccttttcacacattcactaaatgcacataaagaaatcagacattcaacagcctatcccattttgaattttaaaaagctttacattttcatgtttaaatcaaaattgccaagtgcagtattactgttttcagcattcccttaaaaaggaaacaccaaccttgatctcggagtcatttttgtgggtgttggcagaccttctgaaattttataaggactctttaggggtgatatatagatgttacctccaggaatccgtaagggtgaactagaaaacttgtaagggcttcgaggaatgtgaggtattggtgacaaggtaggaggctagacccaaaacaaaagaaaaaaaatcatcgatgtagtattttggtaggatccattatattgttattagatttatccaattaaagaatattttcaacataccctggtggaggcatactgtaaaatatttgtttttagtctctgcatgaaaacggagttatagaatactataatggaatcaaactcctcttctctgatcaaaacacgtttaaaggtctaaggaaaaaaaacatgttaaataaatttaagaacttctctttaacttttattttaaaataattgtatttagttttatttaaaaaacacattttatacagaaaacaataatctaaccaaggctcccttagactgaaattataggtaccctatttaaagtgaaatgtcaccaaggtgatccagagaaggggcctggcagccaccgacagaatgctggccattctacaagggagttaggctgtgctaaccaaaacccagcaccatcagcactactatacagacaacattcactggcccgtagcagctttcaacccctcatctaaagggtttagaacatgtacaccactctcctgcaagaaacagatttttcgtagtagaaacagattttttaagtagatttttacaaacaagtttttgtttaataagcagggtctagctatgcaacctcatacttcgtgacatcttcttctcacttattctgaatgagaattacaggtctgggacaccaggtcccacttgtataaatgttcatcaggtaaaactaaagacatcttatggagtgcctctgttaaacaatatgtatataaccaatttagaaaataactccaaatatataatgcaaactaaactggtttgtatcactttccaagaatacaatgacagactgaaacaataacccaggattcattgctgcattccaggatagtgtaaaatgtgtgtcagactatgtgtgttttaccatgatagcatctgtgggagaagaatttagaggtataaaatgggcttgcactgggaaattttactaggtctttataaggactgacttatagtatcttttcctgcggaaaaataaaaactatatgttatgtcaaagtttatttcaaataccccagttattattatatacaaatatagtactatttatgaagatttggatttcatagtttgccatagttttataattatacttcagttacaaataattaaccaacactaaagaagtaaataaggatatatgatctctatttaacaactgaagtaaactatgaatactgatttatttttcagtcttaccatgagcggctacctacctcctgggcagcgtgaggaagatccttgtaggcagtgacgatgattttgaacttgaggtcgatgttcttcaccttgcagatgccatacatagagcacatcataatctagcaagcgagtgacagaggcatgagggaccatactacctcacctggctcttttaagtattattaaaagaaggaaatttaatttcttctgagttttccccttattctgagctgttcaaaagtctacataaggtatttaatcaaaacatttgtatttacagaacaaaatgcaagcagctaactcaattactcatgactgactaccaagtttgtaaagtaccctgactttggcttcagttctttagtatatatcaaaagtattgaaactcttagaacaagctaattgtatgatgaatactgttttaaggctgtgtgaaaagtttcaagctatcaactgaagtgacatgtaataatctagggagtaagaaagtgctgctgacagaccttacattgctcatggtgttgtgatctgtgatctgaatgtaggctggatctgttttgttgctcaattttcatcagaacatatccttatgataaatggattttctatatggtatctttcaataaaacaacatttaaaatgtaaaactaagatttgaaaatgattccctggggccttaaatatcaatttttaaaacggcttttttggtctagttcaagtgttggtcatttctgtaccatttttgcttccatctgctctgagcaaaggtttctatccccacccctgctcagtgtgtgatgactgagcttcccaccgagcgccactgatgacgacagaccaactgatagtcttcttctactttaatatcttcacgtttcactcataaaactcggaattgcaaaaaaaaaaaatctctaggaatctgggtttcccttttatagaaagtggcaggaacataaaataatagctatctatttaaaaacacagtgtactgcagcttatacatccaaatacatgttaagttataattatgtttttgtttaaaatatcattcttgttgggaacattaccagtcttactgaaataagaggattatatgagaatattatgaaaattatgcaccactaaaagaactaagatgacactaagttcctcaagttatgcagatgccaatatcgactgaaaagtaaaaaagctaattttgaattactaaacagtaagtgttcacacacacacacacacacacacacaaatccccatacctatgggacctcattggtgaattcagcaaaattccaagaagaaaaagactcaatatcaatatcaattcttaaaaagttcttctgaaattagaagttcccaactatctgtatgaagctaatactttgctgatacaaaaatcacacagatcaacaaaacaatgaaataaaaataatttcctttattattaaagagaatagaatacataggagtatagttaataaaataaatgtaaggggctggagagatggctcagcagttaagagcaccaactgctcttctgaaggtcctgagttcaaatcccagcaaccatatgatgactcacaaccatctgtaatgagatctgattcccttttgtggagtggagtatctgaagacggctacagtgtacttacttataataagtaaataaatctttaaaaaaataaatgtaagacttgtattctgaaaactataaactattattgaaagaaattaaagcctggaaggatgggaaggagccgcatcctccgtatggattgaagacttcatgctacatgtgacatcccccaaactgacacattagcccgtgaactttctttcaaaatcttcagagaaaatgacaagtcagtcctaaaactcacatggaaatttaagtttcaggacagttaaattgatcttgcaaaaagaacaaagtacaattgtgtctctttattccaaaaaattggaatgctatagtaactaagacagtgtattctcaccaaaatagctacatagataacagactggaaatgagtctcaggaataaacatgtgtacactaaaaaaaaaaaaaaatcaatagactttcaacagctgtcaacagagaaaaagaaaaagaataataataaaaaaaaaggatgcatttcaagagatggtgtgggaatgggcatagctcagtgaagtgtttgccacaaagtaagaggccctggattcacaccaaggagaaagagtgagaggaaagaggggggtggggctcctgtgctggaacaactggagggagaagtcctcccctgccctcttgcaaaactaagtcaaagtggattgaaactgaaacagaaaactaagagcacaaagctcttgggaaaaatgaggtcttgatgcctccaaacttgacaatgtttttgttcatacatcaaaataccagtagccaaaacaaccaaccatcaccaccaacaacaacaaaaaaaaaagaagcaaaaaacaaaacaaaaaacaaaccaaagatgacctgaagtttctcagaggataaaacattttcaaaacacatatttcatagaaaaagatatatacagaacatattttttttttaaatcattgccgcctgttgtggtggctgtgcctttaattccagaactgaggggcagacttaggcagagctctgtgagtttgaggtctgtttgcacaccgccacgctcagtgaggaagactcttgctgtcttttcagaaaggattttaacacacacttctctaaagcagatgttcgctatcattagctaccagctacatatgcctatgatccagccccaggggacccaatgtctctggccttcacagatactgtaaacatgcatgtacctacacatagaaacaccctcccacacacacttaaaaataataaatctttaaaaataaaacataaattggtaaagccattttagaaaatatccctgccatttctcaaaaaggttaaagatttaacatatgacccagaaattttacttacatatacatagaaaaataaaaacatgttttacaaaccttatatatgaatattgacattattcataatacatcaaagaagaaataatccagtttctatcaactgatgaattataaacataatgtagtatgtgacagaaactacaacacagatgaaccttgaacctgtgctctataaagaagccatccacactcaaggctggggacgaagttcagtggaagaacatttgcctaggatttgcaaggtcatagaactcagtcaggaccctaccctgcacacctgcacacacgtgcgcgcgcgcgcacacacacacacacacacacaccctaaatatgaaattacatatgattctatttacataaaatgttcagattcgacaaatctacagaaaaagaaagtagatttatgttgttgaggactcttagagacaacagagtttctctttggtgtgagaaaatggtttaaataaaatagattgtgttagtagttttacaactctacaaatatactaaatcactgaactatacatttaaaaatgtatgctttgataaactgcacacactcctctaaatgttttttatcccctttaagaagaaaaaggaagctaggaggaattattctgtttataagccccactttccttcccctccccacattcctgttttggagtctctgattctttgtaaatctttttttgttgttgttgtttttgtttgtttgtttgtttgtttgtttcaagacagggtttctctgtgtagccctggttgtcctggaactcactttgtagaccaggctggcctcgaactcagaaatccgcctgtctctgcctcccgagtgctgggattaaaggcgtgcaccaccaccacccggctgtaaatcattttttgttactaggatcagagcaccagtgctctgtgtatgacaggcaaatgcttcaccactgaactacaacaccagcttttttattattgaattttgagacagagtctcactaagtggccagagtggtcttgaacttaacatgtagtgctggcaagtcctcaaatttgtgagtcagcctctcaagaatagttgtgattacaggcatacaccatatctcctggttagatagctggctggtctctggctcatgtcatttccacagtaaaatgaaatctagcttatcacaatacagaaaaggttaaatgtttgtgtcattaaatagttattaaaatatatacctctaatttgtaaaagctatataaaaaatataaatggtattcaacaaggaactctatgtatgttatacaatgtatggtaatatatactactaagctaatgtagatggtcacttgaatgtgatatatagcacacagtcaactatgagcaggaagaaacgatggggaagtgactgcttttcttacctggtccaaatgtcggtctctcatgagctcatactcattttgcaatgtatgctgaaacagagtccagatgatgtgctctagctctgggtggtcagacagaaggcgtgcacagagtgtatttagtcggagatatgctagacggtacactgcagacagaaggtgaaagggcctgcttactgtccattctcaattatgaggggatttttttttgaaacattaaattcctttatactattgtaagtagcatttaaacaatagcctaacctccaaggctgttttccttaaataaatgacccctagtattagcagcattccatacacaaggctcagtaatacttgctgaattagctattaaattatgaaaccaaggcagaagggaaaggtcatatgatcttgtgaaatcagacagacaaaatacgatttcctttggttctgtcggtaattattcagcataggtgttggaaatttccattaacaattttagagccgggaggatggtggtggcacacgcctttaatcccagcacttgggaggcagaggcaggcggatttctgagttcgaggccagcctggtctacagagtgagttccaggacagccagggttatatagagaaacattgtctcgaaaaaccaaaaaagaaaaaaaaaaaaacctaaaaaacaatattagagacattatttttaaataatggaattgcaagtgattattctctttcccaatcctaaaagaaaagctcttaccatgcatttttatataaatatcagtggaacataaacttgaaaattataaactgtactggtgcaaaatgatgtgacagaaatttagtttaagagtaccactacaaatacaacttctgagagaaggaatctgaattttatacatttactcatggttcaagctgttcctttaaagacttgcataaacagaactcttcaaagctaacaatttatccccacaggctatacttgaaaagggattggtttttgttttttgttttttgtttttgtttttgtttttgttttcgagacgatgtttctctgtgtagccctagctgtcctggaactcgctttgtagaccagactggcctcaaactcagaaatccacctgcctctgcctcctgagtgctgggattaaaggcgtgtgccatcaatgcccggtttaacccctgtttaaagcattttatatgcatttaattgtcccctaatccctgtaagttaatattattgtagggtatattatttttttttttcatttataagcaaagaaaccaaggcatagagatatcaagtgatatgcttagtgtcacatatcttaagtactggagccacaacttaacctagtccatgagtctgagctcttgagaggaatcttttactgaccttttttgtaaaacagggcaagggaggtagatttcaatggcttctgagtatggaaggctgaggctgcttgtgtctctgtatttgcagcagaatttacacgtgtagtggaagttcttttctttggagatcttagaggagaaagatacctagatatacatacagaagataagtgttcgtttcacacccaaccctaaattgtgttcaattgtactcatgtattcagacatattttaactatttgattaatattctataccaaattccaggagttagctacttaaatacaaactggaaaagctagcttaacaggaaaaatatgctaactttctaaaccccaatgtccctgactttcctttcctttcataactgacaactgtaaaattacttaacttgtacaaaagcaggtctcccttgagttctagatgcaaatatccaattatgaaatggatagtactacctgatcctcacaccttctatggctaaagcagaactctgcattccttcacctagtctttctcatctcaaacaaatgtcactacatcacatctggtgtgttaatgtaaagagcctaggagtgcaattttaaaatttctcaatttgtccagttcctcaaatgtgctgcaaatcaaatcaatataaaacctgttatacagaatacccaggacacaacccacaggactcaagaaggctaacaagcccaaggacttaattgaggatgcctcaatcccacttgggagggagaagaaaacagttatgggaggaggagagagagggaccttggtagaaaaggggacagggaacatgatcaggtactgggggaaacaagactgaagccctgagggccagcaaaaagaacggaaacaggtaaccctgggaaggaggagggaggagaaccctctagagtgtaccggagacctgggaagtgagagactctcaggattcaaagggaccttggatgaaatgtccaacagtggggagagagaactcgtagagtccacctccagtagaaaaacagggcatcaagtggagggatggggttgccattccacagtcaaaagctctgactcgccgggcatggtggcacacacctttaatcccagcactcgggaggcagaggcaggcagatttctgagttcgaggccagcctggtctacaaagtgagttccaggacagccagggctatacagagaaacccagtcttgaaaaaccaaaataataataataataataataataataataataataataataataaataaataaaaaaacaaaagctctaactcagaattgttcctatgtgaaagaactacagggacaaaaatggagaagagcatgagagaaaagaggtccagtgtgaccgacccaaactgggccctgacactgttactgatgctgtggtatgcttgcagacaagggcctagcatggctgccctctgaggggaccaacaagcagctgaaagagtcagatgcagatatttgcacccaatcaatggacagaagccaggaacccctgtggttgaattaggagaaagctagaagaaggaggagggtggccccatggatagaccagtagtctcaactgacctggatccttgagatccatcagacaacgagccacaaactgatatgaggcccctgatacatatacagcagaggactgcctggtctgggttcagtctgggaagatgcacctaacactcaagacactggaggccccagggagacctggtgggatggggggtgagggacatcctcttggagatggaggttgggtggtgaaggatgtatggggtggggagtggttggggtaggggggagaagcaggccaggaagaggatgaagtctggactgtaaaaaaggattaaagaataaaaataaatacatttaaaaaaaatttctcaatttgtccacttcctcaaatgtgctataaatcaagtcaatataaaacctgctatttctatctcaaaatacattccagacccttcttttccacctttaatgtttatgatagtccaagatacctatatcccttattatttattttaaagaattatttattttgtgtatatgaatatactgtagctatcctcagacacaacagaagagggcatcagatcccattatacatggttgtgagccaccatgtggttgctgggaattgaactcaggacctctggaagagcagtcagtgctcttaaccactgagccatctctccagtccctgcatcccttatttaaactataaagtctttgaaattttctttccattttcttgacttgacatctcctagccctcaagccctcccatatttcaaatagcaactagatagtctcttaatacagattattcacagttgcatttgtgtgtgaatggtttcccactaccttataacatctatgcatttagagcctctagctccagtgtgctgcttctgcgtcagccttacacttactgctctgactgtgagccacccaccctgggtttctttctagtccataatataggcattttcccaaaagaggaaaagttttgtctggtcagcattacgttgccttccaggtctccagtcaaactatgacgtcatctcctgggtctcccctcctctcatttcattggtttcactgttgcatgagtcctctaaactaaactcatactagtctatgtgttcactgcttccttcctgtgagatgcaaagtcctataagggaaaaggaccaggccatctaatcatatcagtaactggtactgttaacctagcactttacaaataaccatttcctgaattacaggaacatataaagctgacttatgtgaaaatattacctaacaaacaaactcatgcatgaatacacagtctctgtgggtcagaaatactttgggtggaagttaccatggaaatgatatcacaggaaaatggtttatcacagaatgctgtatttcctcactgaatcaggtagaaacatggagcacgtttctatgaaaggacaaagctagagggctaagagagcatgtactgtgatctgactacttgggttcatttatgtgcatcttaagcaagctcccttgtttccctcattgctactttacaggtaactggtgctgatacagtatcttctaccttacgaggctggtatgaactctagggaaaaatgtgaatctgacgtacctatgtaaatgccccaaatacagggaaccctgactaaatgtcagctgtttcttctctcagcatcaccactccacactagcgatgtgtaatagtccattactccacacttactctgtgcctctccccaaatggtctgatacatattctctgaaaatctctcctgctttctggctgtttcagaaacaagtaagttcggactcttgggatatttcctcttgcttttccaattctcatgctaaagtcctatctgatcattcggacctatctaaagcagcatcagctttgtcatgaacgattaattccccgctacaccaacaccatgtgattcagtagctttgtacttctttatttgaccttacttgggtcatgtgtcttagattcctaacacttaaaagaaaaaatagtatcttaagcaaaatttcagtcctacaatttctatatagcgctttgagcttcccttatggccagagtatctctgcagtttgaatgaaagcacggtgcctttacttacatatctgctgcagtatggttaccctggagaggcaggctgagaggacaagcaggttcaaggttatcaggtccttctccatccttggactgcttaatgagatcaaataaaggtgaatcctggataaaagaaaatggcattataacaacatcagcaggtatggctttactgagtacatatgaaaaccatgctttgttgttgcaggatatctgaccacactgtgaacctgggattgtgttaaaaaatgatttctagtgtggtgtggctcatcccttcccacacacctttagccctgctgaccagaatacagacagccttcatacacacctttaatcccaaacaatgaaggtaaaggtagtttggagaaggaagtttgaaagtgatgtctaattgagtggcagacaaagtaacaaatcagagataggttgacagaataggatacgcctaactctcaagagagaggaaaaagaagctactggagggagccatgcagagagagagagagagagagagagaatggagaaagtagtcaggggtgaagacagaacaagctggaaaaggagcaggagccagaagatcagaacacattgccaaagttagtatgaggccacatagagcaattcagtcagagatgccaaattgaaacagcttggaggaaggtttgagccaaaacagcaactctgaaccagccatctagagtttggaaagaacaaggaagggtgagtatattcagcagtaagtctcagaggctgaaaacattctaggtctagattagcttccaggcctaggcctaggttagcagacagaagcagtgagtctccgagcaaccattagaagactaggaagcactgttgccctccctctgtgacagacagggctaaggagcattaacttcggcagcgcgagatcctttactccatttggagttcttactcgacagtgctgatactgtgtgcatgcacatacaaaaccaggaaaataaatgacctcaagtgttcctccaacatgcatcttggcttttgatttttttttgaatattcacttatatgtatattaagatatattggtgataaaaccaaagtttaagcacatggttcatttatgtttcaaatataacttatacacatggtggactataattttatcaacattttagttacattttttgtctatgatatattacatgggttagcatcatgtttggatatagaaagttttgaatttaggctggaaaataggccagaggtagaatgccttcttagcctgaataaagctgtatactctacttccaaaagaacaataaaagctttggaaaaataatataatttgagtagtcttgtcattactaaaaaatcgaatcagagctgggcaatggtgacacacacttttaattccagtcacaggcaggcagatctctgaattcaaagctaccctggtctacagagctggcactgttaatctacacaaagaaaccttatctggaaaacaaaacaaaacaaaataaaataaaaacaaaaattcgaaccataatttaaaattgctacataaagaaaagcctttttttaaccagaaaatttttatcaaaacttcaaagaaaagatgtcttccttttagttgagctctttctaaattgagaaaatggaaacatttttatatctccttttatgagttagcataccataagaaattacagtgatcccttgtgttgttaagggagactttgacactggcagaaaccagaaacctgaggttggagaaatgactcagtgattataaggaggtgctgctcttacagagcagaggaccccagtcagttcctaacacccatataaagtagctcacaatcacctgtaacttctgctccaagggacccaacacccttttcttacctctgtgggcatttgcacatgtacatacatgcatgcagacacatagacacacatgtatatgcataaataaaaataaaataaatcttaagaaatagaaattgcaatgaaaaagacaacaaattctgaacacatacacaataataaagccacaattaattacattaaattcactcttaaaaagaaaaaagcaatgccagtgaaggatggtcaacataagaagtcataaactgccgggcggtggtggcgcacgcctttaatcccagcactcgggaagaggcaggcggatttctgagtttgaggccagcctggtctacaaagtgagttccaggacagccagggctacacagagagaccctgtcacgaaaaaaaaagtcatgaactactgagtaacgagaatgaacaggggataccagatataaaaccctgaaagtggaagacatgagttaagtgctaacctactcactatgataaaatggtagctggaagcctaacagtaaagaaaagcaacaagtcaaatgaacttttttttttaattatttgattttatgtgtatatcttttttatctgcatgtatatgttccatgtgcacaaagtacctacgaaagccagaaagggtatcatgtctttgaactggggttacaggtagttatgtgccacatgggagttggaggaacagacagtgctattaaccacagaaacatctttccagtcctcacatgaactctttatcctctaaggtctgaaagccaggctaccagataccttgggcagtgaggctaaagggaaattagcaacaggaagattacagaagtccacctaaagctaagctaaacaaggcattttcctcttcttttcctacctatagtgattaaagagagagagagagagagagagagagagagagagagagagagagagagagagagagagagagagagagagagagatttggtgaatataaaacataactggctgtcctgaagtctctagacagtatctaagaagaagctactaaggaaggcagcataagggaaacattatgatcactaatgttccatatcccagactgcttcctgtatccacagcctagggtgcttcaaactatgaccataccctccaggtatgaaaagataagcatcaagatatgctaagagaacagaactatagatattagcaaaccaaaggctttataatgaaattcaattcatgcaagtcaccacacaaaagccctcctgtataaacacagtctccagctaacttttagtgatttacacatgaatgacaatcaagtctttcaggcaagtttctactatgaaagcgacaaagtaaaacaaacaaaaagtatcttgaaagaaacatttcagaaaagaaatataaaaagaaaacctgttggagtgatgtttttgtatactttgtgaagatgtgtctttgtctttccttgcctgcctaaggcgccgtccgattggtgaaaataaaaagcgtatgacctatagtaaagacagaatagtaaggtggaacatctgggcagaaagaggaactcggggagccaggtgccaccagaacacaggggaaaagtcaggtcagggagaaatgagaggtaactcccaacccatgcaacagaacttagattgttataaatgggataactgagctatgaattagttgggaaacaaacctacttttgggaccaaagcttttataaataaatataagtctccatgtcattattcagaataagaacaggtatacaaagaaccatgattacaaaagcccagtaaattaagctattgaatagtccttttgaatagcaagttactcatatctaagtaatacatacccagatggtatgttttcttacccatcttaatttcattcacctaatttcaaaaaacataaggaactaggttttcttgttttatttaaaagtttcataaattttatatatatgtatatttttgcctacatgtatcctatataccacatgtacataatgcctgtgaaggccagaagacattattggatcctcagagactggagttactgatggttattagctacaatataggtgctgagagccaaagccaggtgttctgtaagagcagcaaatgctgctaatagctgagccacctctccagttctgtttgcttttgagacagtgtctcactatacaacctggcctggcctgaaacttgttatatacaccagtttgtccaccaactcagatatctttctgtctctgcctcttgaatgctgggattaatggtgtgtaccaccacacccagcaaggttcgcttttctttcttttctctctttaaggatttatttattattatatctaagtatactgtagctgtcttcagacagcatcagaagaggacatcagatctcattatgaatggttgtgagctactatgtggttgctgggatttgaacacaggaccctcggaagagcagtcagtgctcttaatcccgctgagccatctctccagcccaaggttcacttttcttaaagttctactttgaaaagtagagatatttggttaagattatttaaatcacagtattgtgaattcagatgatacaaagataagaatttagacacttcgtgtttaacacaaagtataagtatttgatgatactatggttatagtctttataaatgccatttccgaagaataacatatctttcaaatgtaaacagaagccgagttaactatccatccagagtacacatgtctatttgtccttcactcagcatcgtcactttatatctctgcataacaggaaccaatcattctcaaccatgcaacaaccaaagcccacgcccctttctcctgccctctgtgcttgctccttctttgtctcggatattctttccccagaacatcccaaggctcaacctacattattattgacatttgctcaaacagcacctccagagtgaagcttctccaaacatcttgttaagagggtttaactcccaatccatctcacgcacaactgttccaatcttacagcactggccactggtcatgacttgtcactatatgtgtttccttgcttattaactatctctattaaaattcaagattcagaaaagcatgggtttttaccagttcacaatagttatttctagtgtttaaaactgctttgcaaatagtaggggctaaataaacatttattgaataaattaatagagtgagaagattaaagtcctccaaattccttgatattaattctattttaaagtaaggataaatatatacatatatatacatatatatatgtatgtatttgtacgtatgtatgtatacatatatgggtgtgtgtgtatgtatgtatgtgtgtgtatgtatgtgtgtatgtatatatatatatatatatatatatatatatatatattggttttttgagacagggtttctctgtgtagccctggctgtcctggaacttactctgtagaccaggctggcctcgaactcagaaatctgcctgccctctgcctcccaagtgctgggattaaaggcgtgcgccaccatgcccggctttaaagtacggatatggctcatgtggtggtgcactcctttaatctcaacagagggagatggatctctgtgagttctaggccagccaggagtttaccttgagtttaagattagttacacctatacagtgaaacactgcctcaaaaaacaaaacagaaaaacaaaaacccgaatcttctttcttacaatcctctccacacaatactagccaaataataatatgcatcatagccacaaaatatgagcatgatactctgtccaacaagactcaaacgctttcatgagagtaaagcaccaagtaatacgacaaagtattccgtgtgacggcgagtaaaaagaaatccttctcaacagcaaaccatcaggctctgaactaaggcatgcacgtgtggagcccgtatgacagtggccagcaaacagacatgcttcctacctgtcagctttctgtagtctagtgggaggagacagacagtgatcttgcaagaactaaccttgtgattacaaattcagaaagtgctctgaaataacggcaaatatctgcaaaatgagtaaagactcatagtggaggggaattaatactttaaggggaactgatacagtgtgagaagcagacattaaaaagggaacaaggcataaacggtcttgaaaggaagttaggatgtgatgaaagtaaaggatgcttggccacattttgaagaaagggaagagaaagttgtaagtgaatgaggaagcacagaagggcagttcagaagccagggataaatatgcttgcactgctgaaatgaggagacatgaactgtccatcaataatgctatgattaagatttacaaataggctaagacaaacatccaatgattaaatgagcacaaagaatccctgcctcttaaatgcgctctaggccagaaaatgaaaatcaccagatttctgccttgggaatctaccaagtaccctacgcatgtacacacacacacacacacacacacacacacacacacacacacactcctacaatggtaaatgctacatcaaactactcttagaggccaagtttttaacaatagtttccttctagtacagtattgttactaaacgaaaatagagcaagctgggtatggtagcacacatctgtaatccaagcactcaggagagtaaggaagaaggacagaatctgagctatcctgggctaagaagttccaggtcagcccaggttatacggtgaagtaaggcccaatctcagtaaataaataaaacttaaaaacccgcgctatggtctagaggtgtgactcaatgacacaacacagactctagttaacacaccggaacattcatctcattggcctgggtgtctgttgctttacttcctagatacatggagttcacaggattttataaaccatgtagtttctctgaaattaaattactgttaaaatctatgtgcctgtggtttgtaagcccccagtctcagtattttatttgttgcactaacagactttgatattttaacaggaattctgacaactgaatcattacttttaaggtcagaccttggaagtttagattatgcttagaatgactgtaagagtcttcttcaccatttttttagggggttggtgagggaggttcgagacagggtttctctgtgtagccctggctgtcctagaacttgctcttagaccaggctggcctcaaactcagagatccacctgcctctgcctcctgaatgctaggattaaaggtgcatactaccacagctcagtatctttcccactttttaattataaactttgactatttctttgaaatattacaaataatcttagcaatacagattagagtttaaagttatatataatttctttctatgataactatgtttttaagacttctgtttattaagaatagaatagggatggttcagtggttaagagcactggctgctcttccagaggtcttgagttcaattcacagcatccacatggtggctcacatctgtctatgggatccaatgccctcttttgaggagcagatgtaaacaaaacatagcttgagagatgtctctacttccccttgacaaaacaaaacaaactatgtatcgacatatcattaatttgaaatgatggttcttttttgttaaagtaaagcatagaattaatattgaatctggtcaatcataaattcttttacagcagatcatgttaactcacaaaatactttgatgactatggttaataacacaaaggaatcaggcttatttctttcattaatagaagtctaccttcatgattctctcatatttaataagaatacatctactacatgtgaggtttcatgctattttatatacattccttcacttaatccttatatgtctataacatagataatattactctatgcattttacaggtaaaaaatcagaggcatgaaagttagcatacatgcacatgactagtaatcggtttgaacccaaggctactggattctaaaacctgtgctcttagtgactctgctaggatacaagctatgctctctgtcctctctgtcctctcttcgcctgttgtgcagcttttaaaaccatatttctgtcctgttatctgccctacctgcagttctacctctcagaatctcatcaatccatcatctgaaaatggcaagacaaataacacattaatggaagcccctaccatataagatactctaaacaaaagctttggtactgtcacatttggatctgggttatgtcccaaatgttcatgttcaaagcttagtctccagcctgtggcactattggaagatgataaaatgtttagggggtgtggcctagtgggaggaagtgaggtaactaaaggtgtgatcttgaaagggctattgcaatcctggcccctttttccctctgcttcctggtcagcatagcacagcttcctgtgttatgtatttatggccttgatactctgtccaacaagattcaaaataatggagatgcaaccttttaaaccatgagtcaaagtaacccttactcctttaggttgattttctctggtactttgtcagagatttaaaaaacctaacataggtacagaatttgcacataatcaaccatcagtaactcttcccaatgcaccaactgtaaggcatgactgttttacttacattgttttatttcctataaaactctaggagaagatactgtatcttttacaaaagatgcaaattagctaagagtaaactgctaggcctagtaagtgacacagctgttctcacctcagggtagagggactcctatgaaagaggaaggaattccatggtaagccaggaagcactctccagagcactaggagaggccaggccaggccaggctcacttgtgacaaacttctagctaaaaggtctcatgacaactatgcaggcatgctgagaaccaagattctaacctatgaacctttggtgatgaagccaagctatgacaaatgagacaatatgtataaagtgctttaaatggtacctggtgttggtattagcaacaggcttggcagatcacctctgaacccagtaaagtcacccacaggggacagggatccgtgcagtgcatctgttgccatggcaattgtatccattcccagagtccacttcccacctttaccttcaaatgtttacatcacagcctaaataaaaggcagacccttcctggcctatgcacctttttcttctctctcttttcctcctttgtctctgctaccccctttgtttctgcctccacaataaaccagccacgtggaactgcattagcctggtatggtctgtccagacacaagccatgattctaacacaacgcccagcacatagcccttaagaaagaaatgatcagggctggagagatggctcagtggttaagagcactgactgctcttctgaaggtcctggtggctcacaaccgtccgtaatgagatcagataccctcttctggtgcatctgaagacaactatagtatattaaaataaatctttttttttttaaaaggaagaaatgatcagttccacaaagctaaaacacagattgtataatatggtaacaaacttacttaaggatatctaaggaggtgatgaacaaagcataaataagactctaaaaggatcttcaaaataaaattccggggtctgatatatgatgaatattcagtaatacttttagaatattagcaaataacatagatacattgtaaaataagttgaatacagcaaagcacaaataagagagctgatgacaaatttgctgtctagctgacaaagcctacaaccttcacagatggcttccagggtcaacaaagagctctaacagtgattctttacctgtgtattatacagatcacactccctgaactgtgccaggattagtctgtgtaaccatggcatatggcaacagtgacagcatgtgacgtctaaggttagcttattagaaactgacagtttccgccttcacatatcttgcttctggagtagggggaacaagctgccatataccaagcagctatggagaggccacggctaagcagtaaagcctctggccatcagccaatgccatcagccatgagaaaacctcaaagccaattctcccattccagtaaagccataagctaactgtgaagctgcctggcaacttcacgatctctcacgagaatataggagccaaaaccacacagctatggtgcttcctgaccttcagaaattcatatgataataaatttaattatttaattaaattatttaattatttaattgccaatagataactaatacctcagccaataactaatacaggtaaattttgatttttaaaaacactatgaaggaagatgtaagacactggtctttttctctgcagcactgttgctacccagcactcagggagcagctctctccagatcaggcaagttgcatcatgacattacttatctggctaaactaactgtcagcataattgtcctctacacattcgttgctttggtacctaatcctgtgaaggaaaccagattctcactgtcagtaaagttagtgtgactctcatcaaataaacaatactgtcagaaaaatggaagctctaagtgcattctaaatgactttccataattagcatgcatttctaaagcaagcacaaactcctccagagattaaagtatgtcaacactattcaaacaaaatgctcctaaaagagacctgattgcctaagtaaaagtgaagtctccagtgctggtagaaacactaacaatggggaagtgatggtaggaattgctattgtttgctgggtgttttaaggaatattattggatctacattacaggaaatgtttttgttctaccctaagccaagttctaaaactgttttgcctcacaaacagaaactaggatagaaaatagaaaacttctggtgttggcctttctgctagttcttttccatttatttctcttgtcatttaatgctagatgctctgtcaatctatatactactagagctgctgtgtggctttaaccatagctatatatttccagatatgcatttagggctaaagtactctttcagattccaggcccacatttcaaattggatactaaagatttccatgcgaatatatgacaaacgtctcatctctaacatgtctaaacacgagcacgaaccctcattccctgaccactaaccagctctgacagtactgtgagggtagccatgtcttcaatcccctgctctctgctctctccaccttgacaattgtccttagggatgctggcttcattcagcttctaaactcatggttcattcctttagcatatctgtgtctgcttcctgtggactgcataaagtagctttgctttttatctactatgacaagattgttttagacttattttatgtatattagtattttgcttgcatgtatgtatcagaaccatgtgtggtgccaggtgtccacagaattcagaaaaaggcatattatccccttgaactggagttatggattactgtaaaccactatgtgggtgccaagaactgaaccactatgtgggtcctctgggagagctataagtgctcttaaccacttagccatctttccagttcctgttctgttaagattttaattgggtcgttcttagactatctgcatacagcatagttactgatagtatcttgttttatcccatctattctttggttcctttgggcaaaggcacacacgcaaaagaaacttaatatagacaaaagtttaacaaaactgaattcacctagaggtggaattcaaaggtagagcatatgtttggtgtcaacatgctctacacacacatacacacacacacttacttttaaaattttttaaattacatcatcaccagattccatgttactcactagtaattgttaattgttttatttaaggccactcaatttttttatgacactcttaaatttaaggctcatctagtggcaaaacttcttgtcagattcatctccagtgataccatgaagtgctccctgaaaagcccttccttttttctcttcttttcttttcttcttttcttttttttaaaaaaaaaatactattatttacttatgtgcatatatgcatgtatctgggcctgaggtcagaggcatcctctggaggcagagttataagcagtttgagctgtctgatatgaattctgggaattgaacttgggtcttctataagaacaatacatgttcttaactactaagctatctctctagggcctgagaagccctttctatattacaaagcagggaaacagaatccaatactctcctttaaattgtacattttccttagcttttaccacttctgatcccagactgtttattttactgagttcatagtgaatcggaatgatttttaactcttttgagacaacaaagcataccttcctactttccaaaagtatctaaatgtgcattcatataaagaaaagcatgcagggcagtggttgtgcacgcctttaatcccagcacttgggaggcagaggcaggcagatttctaagtttgaggccagcctggtctacagagtgagttccaggacagccaagactatacagagaaaccctgtctcaaaaaaaaaaaaaaaaacaaaaaaacaaaaaacaaaaaaccaaaccaaaccaaaccaaacaaaaccaaaaaaccccaaaaaagaaaagcatatgactatataaccataaatttatgtaagtataaatttttatgccagtctacagatgaaaatatttcacaggcaacattctggacatatctacaataggtactgagccctaattaacatgcattttcacctcatatattaactcattcacttctcatattgtttagaaaaaaattgtagttaaaaatcactttgagccgggcgtggtggcgcacgcctttaatcccagcactcgggaggcagaggcaggcggatttctgagttcgaggccagcctggtctacaaagtgagctccaggacagccagggctatacagagaaaccctgtctcgaaaaaccaaaaaaaaaaaaaaaaaaaaaaaaaaaaatcactttgagaaattcatggtaagagacagtttaaaagatgcattagaggcagaagaacctctgtgtgtttgagcccagccaggtctatgtaagaagttctaagacagccagggctatgtagaatgactttgtttccaaagaaaggaaggaaggaagggaaggaggaagagaggaagggaggggtggtttttaaaaatcatatacaaaaaagtgtttccttccaaaccttatccccttatatgaactgaggcacatgtgcttgtatttaaacacatttataatatacacgcatatacaaagtaaatttttaaaaaaattcattcttagggaaaagcaaacatgcaatggaagacatcacgctaagcaaacatgcaacggaagatatcacactaagcaactcagtggatcagagaaaggtagtcacaggctcaggtagctcagcgtggccagggaatcagaacacaggagggcaggccaggggttgtttctaaaaggcaaacagaatcaaaaggttgatataaaattagactatcacgttatcatggagaaaggacatggaggatactgatataaaatcctgagcgttgggctagagcaatggatcagaggttaagagcactgactattcttccaggggacctgggttcagttctcagcacccacatgtcaactcacaactgtctggaactccaagatctgacaccctcacacagacatacatacatgcaggtaaaacaccaatgaacataaaaataaattatctaaaacaaagattaaaggaagaaaaaagttcctgagtgttcattcaagcatagctgggacaaaatacagttaataaatgctacagatgacgctggtgtcagggaaattgtacatagaacacaatggagtatcttagggcaatagagtatagccaaatcaccaaagagcaaaagagaaaaacttaatgactaaacagggagaagtcatgagagatctgacttgtaatgaaactattaacatggggtgatttgtagggtgatggtaaggggagagggtctctacatagccttgactgtcctggaattcacttctttgaactattaacagtttgatgaacaatgtaaggacctttcttcatttatcagatgtcatgcaaaacagaactcggaagtagacatgctgaatgtatcaagtggaggtgctatcaatgatcttccgatgggcagtggtggtgtaggcctttagtcccagctcagaggcaaatctccaagtttgaggccagcctgatctacagtgtaaattcaagaacagcctgaactacacagagaaagcttgtctcagaaaaaaaaaaaaacaaaaaaacaaaaaaacaaaagaaaagaaaagaaaagaaatttccagccaggggtgttgtgccacctttaatcctagcacttaggaggcaggggtaggtgcatctgagttcaagggcagcctggcccactacagaaaaaccccttctcaaaagaaaacaaaacaaacttgtactagaaatttccaattgctgtgaaaatctttaggagagaaacgatgaatttatgagagaaaactgaaaaatataaattagaacagcctttcagtgataggccagctaaagttaatcccctgagatatgcataagccagttttatttcacatctgttgagacttccccgtcagcaaagtccttggtccgtttctgagctttcttcagggagcagtgagagtgtttttcacatgtccacaaaatgcttacttgctgaccccacccccaatacagactcaaaaccaataaatacaggttttttgttttattcagtgctgttcccagagcctggaaaagcagctggcactgagtcaatactgatgttgaataaacaaaatcagtgaacagatggagagaacataagcaggaaaggttattttttttgttttgttattttgtggtgctggggatggggccttggacactgagcaacacccttaccccggcaggaaagacttttaaagtacatgtcctgttttcctatgtttgtgatcaggacaacaacccagcaacctttattggtcaggtcaaagggtccacctctgtttaactgaaacaaaaacaaaaggtcaggctctgacagcatctctccttccgctcctttgtttctagccacctgaggcagtgctggcaacatctgctattgataggaaaccctcacgtttcctaagaattggaatctgttgattaaagtaattgtagtgtcagactaataaaagtgctcctgggccttttgctgtgacttgggatgaccagtgactcagagcctcaccacacatctacatctagaccttggagtgctcctagctgtaaagagagagcctctttccctggggctaactggattaagagcccacatgcctaaagtcaaattatatttctggttttaattatatctgcaatagagctcatgtaattcatcttaaaaacatgtcatctatttaaaaatgcaatattcactcacttccatttttggaggtaaaaacttttaaagataaaaattctatacttgagtactaaaaacttttaagttaaggataaagtaacgtgcttatttagaccctctctgcttttttgttttatattataatttgttataattataatctttaaaatattttaaaagaaaaattatttttgaatattatataaaacataatttttttcccttttttccattgcatggtgaataacaaaaccatctggttaaacctgtatctttccttaaaaacttcacactttagataactcgtagcttttagtgccttatttttatttgtttccctttttgtagattttatttttatttatatgtgactgtgcccaccgaagtcagaaggtattaggtccttggagccggagttacaagtgaatgtgaggcaactgacgtaggtgctgggaactgaactagggtgttgttggaaaagtagcaagtactactaactgcttggccatgtctccagccttttagtgatgatcggatccaagctaccaaactggctagccaagagttccaccactgtcctaggttctaggatgaagttctattacaacattagagagctctaactagtccaatgtgtgaggtgctcagtaattcaaatacataatccttctcaaaaggcaagtctctgtctactgcaagaccagcttctgtaacccatgatcagaactaacaaactgtaaacatggcatcacttaaggcatacatgaagcacaggaactcttacctgctcactaaaaagtaatgagagaaaaacccattgctctatgtcatctcacaactttacctgtatctgaaagattagaatactgtggcttactgcatctatactagattttttgtttgttacttgctgtgcatgcttgtgtgtgtgtgtgtgtgtgtgtgtgtgtgtgtgtgtgtgtgttttacaaccaaaatttatttcacttcattttgtttttaaaaaccatctattaagacaggagggcatggttaggatagattttatccaaggcaaaagtccaaatttaagaaccaaaaatccttttattttaagattagatttctttccattatgcacagacagcgtgtatttttttcacttgacaaacatgtataaggaactgggttcagtacttataaagtaagggcttgttatcctccccccactgtgcaatcctaagacatcataactctaagttcaagtttcttcaattgtaatttttttttgaaattttaaaacagaaggctaaggtaaaaattattctagagatctaattcaatattgcctttttacaactttttacaactataacagaaattaaattacttaataaaggttaggtttttaatacctgtactggctagttttgtgtcaacttgacacagctggagttatcacagagaaaggagcttcagttgaggaaatgcctccatgagatctaactgtaaggcattttctcaattagtgatcaagggggaaaggccccttgtgggtgggaccatctctgggctggtagtcttgggttctataagagagcaggctgagcaagccaggtgaagcaagccagtaaagaacatccctccatggcctctgcatcagctcctgctccctgacctgcttgagttccagtccttacttcctttgatgatgaacagcagcatggaagtgtaagccgaataaaccctttcctccccaacttgcttcttggtcatgatgtttgtgcaggaatagaaaccctgactaagacaataccaaagattaaaaaccaggccaataggaatctagtttaattggtctttccactatttcttacttcatccaaagtagttggaagacttttgaaagcaacccattctgttatcatttactagaatttcataatcaaattaaacccttatgtcccaaagcattccctgtactgttctgataagaatttagggtgggactatattatttagtattcctcaaagaacaaataattttctgtatattcagatgtgaaaagtatttggattatactaatgggactacaaaaggactcatttttgtgaactctggctctagagctttcaagacatgcttggagaatctcctttgttttctgagacaaaatgatcgcctgtgtagttccttgaactgattatatagccccctaggctgctttcaaacactctcttcctaccttagccagtggggtgctgaaattatagacacaaaccaccagactgtttctcccccccagagacctcatagtctcaaggtctggggtgtgggggtagggcggggaggctggtggtgcagaggggtcataactctcttaaagccagggcccttactgctatctcttggttctgctcctccccccacatctgcttcagacttcctgtggttctaccagggcctcaccaaattaactggctgggattaggagtgctggaatgagtctgcctttccctgtaagaatagagtcctgctgatttactgggtgtaataaggaactttgacttggcccattcattctgtctcttacacacatttcttcctctctgttccctcttcccctctgtggtacacatgtcttgtccaggctagtttcaaaattcttaaacagtaaggataaaagtgacttcctgataccaaagagtgagaaagcaaacgtgacaccttaaacattcaaagaattcaaggaatctgaagcaaataaaaagcaggaagggaactttgtagagcctaattcctttcttttacagccaagaagccagagtccccacaggagcaaaggaaaaggactgaaaaggacaagcagagttctctgctgggagctctttgcactgcattttcctactccccgacccccttagaaaaagatgtatagtctctttttattgcctacagcacatgctttattcatgcataaagaatctacactagtaaaagacagtctagattccttctagatttttctatagagaaaacccttcaagtgtttcagggatttgttttggagaatagcagatagttttggagaatagctagcaaggcttgaaatcctccttcaaatctgcttcttgtgtgctctgagtcatggtgtctcagagttccagaaaggtaggataaaaccagggcccaaggaaggagatttcaagggccctggagtcagatcctgtgcactaaaatggtaaactttactctgcactgaaccatatatagttaatctaccaactgataatatgcttagctagaattgtagtttgacatttgatgcttttcctaaaacaaagctaataacaaatgtcctttcgcaactaagtatttttgtcaacaggaaagcacacacatggatacacatgtgaagatccatagtgcatttcagagctgaaaggagactttcccggatactcttattacataaaggcaacacatacacagttctaaaataaaatgtatcagattcctgccatcataaaccttcctttgtgtctcagactaccatatcgtttttattttaccactgtgtaaataaattattatttaagattttattttagttaacacttattacatttaaactgaataatgtttagaatggatttgtttagaatggtgttagagtttcacttaatcacttgctgggatgctggagtctgagcacagggcctcctacatggagctccaacactgttccaacctgcaaatcttaaagtaaaaaccttttgtaagtttttttcccccctgtgtatgagtgttttgccttcttgtatgtctgtgcactgagtgcacgcagtgcctgcagagtcagacgtgggtactggatatcctgggactggagttacagacaggactgagctgccattgggtgctgacaatcaaacctgggccctttgaaagaacaggaagtactccaaaatgctaagacatctttccagcatgcccacctaggtataaggattaaaggcatgtactaccacgcccagcaaattagtaacccttttagacagactttcctctacaactctttttcactaaggtataatctacatatcacaacatcctaaaaatcagctgacagtatattttacttatttattttaaagacctatttatttttatgtgtataagtgctggcctgcatatatgcatgtatatcacattcatgcatgttttcacaatgaaagtaaacatggacagtaccaggacataaaacgattataatttgtaaaaatgacaataagggggctggcaagatagctcagaggttaagcacattggctgtttttcctaaggtcctgagttcagttcccagcaaccacatggtgctcataaccatctatagtgagatctggtgccctcttctgaactgtaggtgtacatgcaagcaaaacactgtatacataataaatcgttttttaaaatgacaataaggaaacttaaaagtggatcactcaaattttatatttttcctaaaataactattaacagaaaagtttcttcatggagaagaaaatgttattaagtgtcccttttttcattactgcactcaaagttcccatcttccaataggaacacatttgcatctgttttccacaccaaaaccaaagcaaagaagttcagaccctcaatctttaccgcctataagactgtattatttgatcatagatgacttcctaatcaaaacaataaaaagattataattcaccatcaaaagtaatcaaatttaaaaggtatagaacacatgatacatgctcttaagtatacatcttaatatgtaaactaaggtgtctatagagaaacttgctctgaaatgccttcactgaccccaaatgaagggtttcagcttcaaatttagagatgaaagtagatctggaatataccccaacacacagccaacatgtaaaagaaactgaagggagagacggaggaaaggagaataaaatcatggaaactacatttagacaaacagtagaactgagattctctgctgtaagttatttcaattaactcagaaggggggagcccgttttacaaagcacactttcccactatgcttatattaagttgtgggcaaaagactgacactgtactaaaagtaaaagttttggagtactattctcactactgagttataatcctccggggggggggcatacttaatgtagtctttggtgtattaaaattgaactagctctagaaaattagtttcaaagaaaaatgttagaacattatttatcaaaaactaaagagatccaggattaaagctactcacaatcatgccaattaagttaaatgctggagagcaattaaaaaacaccagatactaagagaagcaggactgcctgcctcagtcaaaggctttatataaactcttaaggttctgccttcaggcacaaacagttctttaatgtgccactcatatcgcctacatttcaatttataaacatatatacacccatctgcattttatttctttaaagaaggcaatatcccaactacaagagcaatagaagagaaagaatctaccttatgtttctttctttctcttacttattactaactaaagcaaatcaaaccactttggagaagttgtcagaatccccggaaagcattttggcataaaaagagttaacacccaactcagctgggcagccagtgaccatttgcaagcctcctaggtacattcccagcagacacattatcagattaaaggaactgcaaacaactgggttgaagccttcctttgtccaaacccagcctcttcttcctgtgatgtcatattacaaatctgggaaggctttcttgctcacttcagagacagcccatctcacaatacagctggcaacctccgaaaggcctctccattcagcaagcgcgaacatgcttaggaatttatctgggatcccttaaacgactgcctatcgccgtccggaatcaatgtagaaatacaaagtttgagaataaaaagaaggaagaagtacccgaggacgacgggcggacggacgcacggcgagtgtttgtgactgaagtaaagctggtttggaccctggcggctgaagcacaagtttccacgcggactggtctggtccgacttggaacagtttttccttacactttcagctttatgggttggcttccttgactgcattttctgtcagttaactaaactccagactcatggattttctcgaccagaaaatcagactattttcctgaataatctactagaaacttttacggaacacatttcatgtttcctttgaagagttaagagaagaaagtatttgtaagaacaggaaaagaaacaaatactttgcaaataaactggctgctgctgtgaccacatctgaatagcaaaggcgatcgatcaagcgctgcggacaaaaggcctcctgtaagctgcactgcctgacaatggtaagctccaatggctcccagtgcccttatgacgactcctttaagtacactctgtacgggtgcatgttcagcatggtcttcgtgcttgggctgatatccaactgtgttgcgatatacattttcatctgtgccctcaaagtgagaaatgaaactacaacgtacatgattaacctggcaatgtcagatttacttttcgtctttactttgccatttcggattttttactttgcaacacggaattggccatttggagatctactctgtaagatttcagtaatgctgttttacaccaatatgtatggaagcattctgttcttaacctgtatcagtgtagatcgatttctggcaattgtctacccatttaagtcaaagactttaagaacgaaacgaaatgcaaagatcgtttgcattgctgtgtggttcacagtgatgggaggaagtgcgcctgcagttttctttcagtcgacccactctcaggggaacaatacctcagaagcctgctttgagaactttccagcggccacatggaaaacttatctctccaggattgtgattttcattgaaatagtgggcttttttatccctctcattttgaacgtaacttgttctagtatggtgctaagaactttaaataaacctgttacattaagtagaagcaaaatgaacaaaactaaggttttaaaaatgatttttgtccacttggtcatcttctgtttctgttttgtgccctacaacatcaacctcattttgtactcgctcatgaggacacagacctttgttaactgctctgtggtggcggcagtgaggaccatgtacccgatcactctctgcatcgctgtttccaactgctgctttgaccctattgtttactacttcacctcagacacaattcagaactcaataaaaatgaaaaactggtcggttagaagaagtgactccaggttctctgaagttcagggcactgagaattttatccaacacaacctacagaccttaaaaaataagatatttgataatgaatctgcaatataagctgcctgactaagccactgggactgctccgtgttcaactgtgaaaactgtgttcttgggaactatctctccggctccaacagaaaatatttttaaaggaagtttgtgtctgatgtgttaaacattaaaatatattctattcttgtatgcacgccattttactttcttgaaccactttaacgtgttttttcctcattaaaaaaaaaaaactccataaagttaaggtctaaaagcaattatgatttaaataatgtgatatatctgtacgtttaaaattttgtatatcatgaaatgatttaatcagaaatctgttaaatggttttatactgaaccgagatgttgtttacggaatagtttactaagtagatttcacttatattttattttagattaaaagtacttatcatgccttaaactgtaaacagtgaagaaaaccagtttgaactagtcacacagttttagagcatttcctccaagagactactgcagttttctgcatgacattttatctttttaggcaactcataaaaaagaaaaggtatctaactatatagtatattttgaaattactattttgatttatattctggctgcaacacccaatttcaaaatgatatatagtataaaaacttagcataaagaaactaatgaaatgttatcttgctaggtaaattattttgaaagtacaataaaaaccttgtattttcaagaatgttggtctagaaatcaccaggacagtgaagtgcctgagtttttagaatgtgatacatagctaagatttttttttttacttcttttcctctctcactttagatcaactacagagtgcctgaaaatgttatttcaagtggaaaaaaaacctttaaaaatgttaaacgtataaagtaaagacatagttctttacatagagagcaacaaatctagaaagacaaattactaagcacaattatattttcattatacaaaacagacaaaggcatggctttgagacagaaaaataccaactacatcaaaactttcattttccaacacatcctcttctaatttaaggcattttgcaaagttttaattttagaaaaatgatatacatttgaattcagttagcctgtatggtaaaacaagttaatctttcaagtctgaatacagcatgaacacacacacacacacacacacacatatgtatgtatatgtgtgtttatgtatgtatatatatatatgtatacatatatatacatatatacatatatatatatatacacacatatatatatgtttgtttgtttgtttgtttgttttgttttttgagacacggtttctctgtatagccctggctgtcctggagctcgctttgtagaccaggctggcctcgaactcagaaatccacctgcctctgcctcccaagtgctgggattaaaggcatgtgccaccacacctggcgaacatatattttataatacataaatttacttttttctgagtttgggctgcaatgatttttgacaaagcatagtcattttctatcttaaataagtctctttgtaataaatagcacatacatggatgttttctttcaatacccatgtttttttataggtaaagctaaatgaaaataaacctgtaacaaaaagcaaactaatgaaaaataagcatatcctaagagatgtatatgttccacacacatacacacactgtgaagtttacttcagttgccctatagttcctgtacttgatgtcactccaaaagaatgagatgcatgtagcagtcttagatatacactgtagagttgaaaagcagtgagcagtccactgatcaagaggaaaggatcatggagttctgcatttctccgaactttctatgtgcagggttcatgagaaaaccctaaggaggaatctcaaggcatgtgtcttactttaaagtcctagaaaggcagtcatcaaataaccgtcactactagactcagtggagaagatcttattgcccttgtctgaacaacaaacatgagtcaaaagttttgtaaaattctttaaattttttgttttttcaagacagggtttctttgtgtagtcgttgctgccttggaacttgctctgtagatcaggctgcccttgaactcaagagatctacctgcctctgcctcctgggtgctagcatcaaacgtatgcaccaccactgggcaactttggtaagattcttaacaaagtgtcacaatagattaaaaagttgtaattttctcatgttgatcaaatattaagggcaggtgatacagccggtgtacagagcttacctatatgtgaagaccctaggtttaataccaacactaccgaaaaagaaatttaaaatactgggtaaatcttacctatctagacaaaagagtatcacaacaaaatgtatgttattttcctttttgagtaacaaaatgtgaggtaagttacgtattttagggttttctatttcccccttactcacaaacatacatgaaaacactgagactgtaaccttttattactttaaaatgacagtatcaatcctgccattcctgctcctcctcaaacagttttcaacatcttcataaagggacagatggtagaagccttctttttacactgcctttcttcaaagaaaggaagatcagagtattgtcatggaagacagctttatggcaccctaaaaactggctccaaacttaatatgtatgctgttcattgtctttccatagggggaaaaaaaatcaagatactatcaaggttctgaacaagccttaatatttacatttgaaatagtaacaatgaatttgaagtataaatcctaattataagcactgatcattagagaaattggccactcgaccaggaaacagaaaacagaaaatgaagcagagttcatacttccaatgcagaaagactaatttgtggatgaaacagctacagaaaatgcatttggttatatgtggtagaaccctaatgaacgtaattttttgacatatattaaattattaatgcctagaagaatctttgctagtttctcagcaactaaactttaatgcttacaggccatccaactccagatggaaggaagataagacccactatttttcactataaatttagttgttcaatggaaagcatgttataaaaagttcttacacaaggacaacatttcaaagtaatcataaaataacctgtttgaactagcctgaaaactaaattacccattggtaacatgacttctgaaatgttcaaaattcaaggggaataatcaagaaacttatgggtatagaacatatttgaattgacaattacttggtgactgacaatatggctcaatcagcagtattttctagagacacttatattcatacaagtatgaactcttaaatttttattttatcttaccatttttactcatctgctatttttcaaagatggatttttagtattgttaactctgtgtgtgtgtgtgtgtgtgtgtgtttgcgcgggcgcacgcatgcactcgcttagtttagatcccctaaagctgcagttacaggtgattctaagcaccaaccatggatactgtgaactgaccttgggttctctggaaaagcagtgtgttctcttaacctctgagccttctttccaaaagaaaactttttttttttaataaaagaaaaattatcacaacaggccaattatttaaaaaattgttaggtaactccagaaaaactcctccccttatctatttgtttgagtagtacctacactgagtattaattcatttggttctaataattaccctattctcattctctctctctctctctcacacacacacacacacacacacacacacacgtacatacacacagataaagaatacgagactgtcaaatattcagtgttctgaatgacaactgcaatggtgatctgcattttattctccataaataattttaacattctccttaactaactgtgatatgaccaaatgtatactcatcatgcttagcataccaagtgggtcttttctgagtgaagccctatgttatcaacagatgtagaaaatttcctccgttattattatttattattattatattctttccctgattaccccctcccaccccccccccccacacacacacactgatctttcttggagagaagaatagagagaaaatgaaccaagtactccttgatacgaagataagaagtaacgtaacctaatccaatagcacagaagtttcttgtattttccttcccaggaaaaattacctctgcattcctagcacactcagatctgctatagaagtctcagggtagctgttcctgctcagattttccatttgacatcaataggaaactgcatgcctgggtgtttatgtgcatacaaaatttgaaggttgagctgggcggtggtggcacacgcctttaaacccaacacgtgggaagcagaagcaggcgaatttctgagttcgaggccagcctggtctacaaagtgagttccaggacagccagggctatacagagaaaccctgtctcaaaaaaaccaaaaccaaaccaaaaccaaaaccaaaaccaaaacaaaaaaagaacccatcaaaaaattgaaggttagctggtcaggcatgtatagatggtccctgacttacaggatgctcacttactttttaatacagcatgaaagtagtatacattatgtggaaactgtacttcaaactgaattctcttttcccagttagtaatatgttccatgatatctcttcagtacaaggcagcaacagagttacaagcttcctggcagccacttcatgacaggccaaacaagttactctgtgggttaatggcatcaaaggcatttttgacttatgatattcacagcttgcaatgggtttatgaggacaattcccacagttagacagaattgcttacatgtgtatagattatgcactgcacaataattaatactaggcttcaatccaagctgcatacctctgatttacccgaagaggagcagacacacttgcaagttcctgacagactggcatgggtctctgaggcaagggtccaggaacttcatgtttgcagacacccaccaccaccatccaccaacatggtagaatcacaaattcttgaactccaacccagaaactttggggttgtacctaacaatctgtaacctgtgtttttataagtctcagataattttgatacataccagttggtactctagagaattctggcaatgacaattcctgtatttgcttcgaggctgaagctcccatctccctgaaagcactttgctgtgtgtgttctttgtattatgatctgttctattctgttacacccatcaaaacaccctcatttagtttttatcctcataaaatgaattaatccctctactttctttgttcttttcctcttgacagtctcagctctgctgcgtttgtcccgtctatgtgagtcctagtgtgagagtacatttctgttgttctacaatgtcctgagaatagaggaagtaaagatttgtgctcagaagtttgttagtttgaactagaaaaatcattttaagaaataagtatataaaaggttagctggatagaaacaacaagagaaaggggagggaaggatactggaggagatgggagagagaggaaaggcactgtacagtataagttacacatgggaagtcacactaataataaacacctttactacagcgaaaaacaacaaaggcttctttcataaatcttttcattctgaacaacataatcttcaaaataatatttttaataagagctacttctccaaccatacactagcaagattttatcgaaaggacccagatgtagctgtctcttgtgagactatgccggggcctagcaaacacagaagtggatgctcacagtcagctaatggatggatcaaaattgggctatattttatgtgctggtctttaggacgtctccgagtaaagagactagaacacatagttcagtaaaattttagctactgaagagaaaaacaacaacaacaaaatatgttggttttaaaaaacagaggaaggagccagaggagaaggaagaggagaggaagggaaggaggaagaggaggaggatgtagaagaggaggaggaggaggttgcaaaagcaggttgcagagagaacatatttgcatgtcagagcaatcttcagcattttccaagaacaggaatcggtcgccttccatttgaattgaactgtggaaaagtttgcttcagatcaacctgttaaactatgaagtcacatgagcctggtggtgtctcatacgcacagcacaacgctacaaatatcccatctggaaagacaatgtaacagctattctaaggaacaaatgaatccagtgactcctatacccaatcctctctgggctgttctcatttcaatgtttacagaaaagaaacaaaacaaaatgaaaacaatgaattttaaaactagtatttcttagtatgaaaaggaaaaaaatcccagaaaaattaccctaaaatatgctatgagcataatgataaaaatgacaaagcattttaattccaaaaataaaagtgacttaaaaacaattatctattagatgtttttgaaagaaatcataagagagcataataaaatcttaaagggaaattctattatatataattctcttgttttttgttttcctttttctgaaagaaaggaacctggggtactaggcatgttaagctgccttctaccttgtactacacagcagaggctggtcttgaattcagtacccttctgtctttgccttccgagtgcttaggttacagatatacacaaccatgtctagcttctctgttatattttagtgaatggtaatacacaaacaaataacaaaaaagccacctaaaatgtagcaataataattttgtttttgtttttttgttttttgagacagggtttctctgtgtagccctggctgtcctgaacccactttgtagaccagactggcctccaactcagaaatccgcctgcctctgcctcccgagtgctgggattaaaggcgtgaaggcgtgcgccaccacgcctggctagcaataataattcttaaaaacccagaagagttagaaataaaatttctgttctacatttcattaacattgctttaaaaataaacttttaaaattaggtttatttgtcttcttgtgctgggaagtagggagagcacgcagacaccagcacacacttatagaagttacaaggactgaggactgaacttaagctgtcaggcttggagctaagtacctttacccatggcctgtatctctggcccatatgtcttaaatctatcacttatagcaacacaggaaaagacgaaaatcaaaaacaaactaacgacttttgatatttggtgatcttgagcaaaattataaaatattaaaagccaataaagtaagtttaaagagcacacatgagagggctataaatacacatgctgaagtgactctacagtgctggcccagagggagcaccagggcataagtgcttaggaaagagaaaagctgtgctgttttacaaaatgcagtcagtagcttcagatgactaaaggacaaccgccttatgcccggcactcggagttgtcttactctgctggagaaacctagaaaaatccagatgctacccagttaagatgagtatttcattcatttctctttttcttgcacatctagaattctatcttcactatactagttaggaaatcacaagctgaaactggagatgtcaggactgtattctcttatgtcaacgatccctgttcatcttctaaattagagctggtgtacttccattccacaggtaaaggacagaagatacttcttagcctttctacagttgctgtctcttgtcctgtctgtacttgaatggtgaactagcattgccatggggtaattactaacatgaatcataagcaaagcaatataataaactccaactgccacttagcagccaagagtagtcacatccaacaaagtggggctcaaagaccttttccctcctgaatatttactacttggagaaagtcacagggcagaggaggcaaagggaaaagttctcaaaaaggggagtgagccaggatgaacaatcccagactactgtgccctcagttctctggtcttaaatcattgtataggtgaggaaagagaacaaagcaagggaaatcacaattaagtgtgatgtttctcaatatcctttgcataagtgattattatccctcataacagctcctgaagcttggtgtatctccacttttagagcagaaaattcaatattgtaagtcataatttacttagaaatatacaaaggcatgatatctgacaatgtctgaatctcaggtttccttatgtatagcctagcgacagcagtgctactcttcgaggcttccatgaggagtaaatgagatccagcgaccacagcccacgtgcctgtgctgggacagcacagcaacagactaagaggcaaacccactgcgtcgacccaaatgacaaccatctaactagtcacatggaaaagcagcacagaagttggggacaaactgcagccagagcctcaggggtgtttcctgattactctgtgctttggttcttttcacctacaaaaatgggattctatttcaatacagctgcaagaagtaaataactttacacaataagaacctttttacagtgcttacacacattccctcttattgctcctatatcaaacatttcatgcagaagtgggagtcattttgatgctggtctatatatgataatcaggaagattccaaaggaacgagcactgcttcactaaccaagtttctacacgttgttaaaattattcttaaaaagctagattgactgatcagctgactgatgtttagtttttaagacaggatctcactatgtaactttagttggcttgaaactcactatggtgaccaggctggtcttgaactcttaaattttgcctgtccctgccttctgagggctaccacaccctgccttggattttttaaaaataaaatttaatttgtttagcattttgagccaatgcacaaagtaaaaggatgggtactgtatactgtttgaatggtgtggtggggaaaggacagggtggattacagagatttctccacagtgaactccaacaattcctcagtgccagtgacttaaaggaaacaaacacacggagaaaagcataggcttaggattaattattagaaatcgcgtaagcaacacttagatgtggaaaagattttatgttcaaaaccatagtcaggtctgcagcaggggcttaaggcttttcacagcacttgtaagaagccttctactgatttacacgtatcttctctccttcaggctttctggtgtgtgtgtgtgtgtgtgtgtgtgtgtgtgtgtgtgtgtatgtgtgtgtgtgtgtgtaaaatataaacacactgatttctttattgaccttatgcaattatgaagacaattattaaattgagcttctgttttagttctttttaagtgcctgaatatttacatctcaatgaataattatttagataagaaattattcagtatgctactatcctcattttatttgtatttcttctgcatatctatatatttgaattctccctagtactctctttggttttagtaggtatactgtgctttgtcacatcatgtgtctaaatatatatcatcatggcaataaaaatactgtgaccaacttaacagaaatgacctggtagagcagcagagcactttactggaaatcatcatgggatctagaagcaaacaaatctggtttcaaatgccaacagggtggcctgggcgttagaatcttcttgaactagtcccacatttagagaatggtaagactacttcccatcaactcaggattaatatgacagttacattaggcaaacattgtccaacggtaactgtcctaggtacctgttgcctatctagccagacattttgtactgttactaatgttataaggtaacttcctcatgtgctattactaggaaactttctcatgctggagttgattgtatattctgttttgttctgtgctttggtgttcttggaaactaatcacagtagaagtcaattagaactgctttgtctagttagccacaataagcttgggtctgaaccacccacccagtagcacttcctgcatttgtgtgtgagctcttatggggtcttgcctttaagctgtcctgggatggacccctatatgagagacctctgcagctacataagaagccagttggattaaaacttccattttgagtagggggtgagtaagtttaagtccccaagacctccttgagaactgacaacctatgtgacagagagagacatgcacatccccgttggcaagttaagacatgagtgctagacaaggcaagtcccccaccacagtttcatactccaaccaatgagaacaggataatttataacaaagacatgtatctaaggaaattccctgtctctaaatcctgattggtggaataacctgacgcagacatttgtggatttcaggctttcaagctctataggattctgccttgtcactgcagctcagctccctggtctagactttgtccctgattgatcagtcttggggtgtgcattcaataaaccagccctgtttgactgaggtctgtgtcggagtggtttgtgggacaattcccatacctcaacagatagaacactgaggtgattaataaaaacatctgattcttctcactaatattaaatgtctctttcttcatttgaaaactagagtcatgagtacatttttctttgtctttaaacaaccaatagagaattttacctaaaagccctttaagaatataagttcatctaaaatcaatcatcaagtatcttgctactttagagtgaaaaagggctcatgagtccctatggagctggtgacagttgatggctcctgggaaaggagggtctaccatctccagggatttagcctctgataggccagccgttcatggtccagtggatggttccatacccaggagtatacgggcagcataaaatagactcaacaggttattttacgggatcaggataagtaggaagacaattttggaaagagcaaagaggtagagagtagatctagtagatctgggagaagtggggtaggaatggaagtaaaatatgataaaaatacattgttaaaaaaagtctcaattaataaaaagtatgtttttaaaagatttataaaaagaaagaaagagaaagagaggggggagaaagggaagagagaaaggaagggaggggggaggagggaggggggagagagggcaggtgagcctggcagttgtggtagtagctttaatcccagcacttgggaggcagaggcaagcagatctctgagtatgaggctagtctggtctacagattgaattccgggacagccagggctacaaagagaaaccctctctcaaaaaaccagaatgatctaagaatgaacagcaagagtatgttgggaatagaagtaaaatatgataaaaatacattgtaaaaagtcctcaataaaaagtgtattttaaaaagactgtgccacccagacacccctgagaagaatgtgcattttcaaagatctctagatgattcctgtgtacattaaagtgtgaaatgcactactgagaaaatagcccttaccatggaagaatatgctatcacacagttatgcttcgagccttagagtatgaaggacatgtacattagtgatttaattagtgattcagaagagcaagctaaaggcaacttctttttacattttctgtcttttttttttttttttaaagggatggaggtctcactatatagctgtctgccctagaattcactatgtagaccagggaggccttaaactcaaaaagaccctcctgcccctgtctccctagatatgattcactatacctagctgtaaaggcgacttcttataggttggtaatataactgtcttggcaaaagagatattctaaagacagacactcaggtctttctctgactatcaaactaatgaaacaatgaatctcaaattaaaattttcttaggaattccatgccaaaggaagggaaaggctgaatccttggtggcagtaagaggaggaactatattttcacatagttctgaaagcagagaatagaggcaagttgatgagtgggaccacaccttgaaaaagacgtccaagttacacatgcctcttagacctcatttcaggagtccacagacggatgtgacttccatttgctcctcttgccaacgtaccacagagagtaattttatctttctctgtattttactattacttattccttgtttattggagacaggtagctttcttaagattccagagcataggttttgactcccaaaattcaagcaacagtaagataccaaaacactgagaaataagtacccgcttgtgagaaaagaggacaagtactggtttaaaaagtgtaacatttggggctggagagatgggtcaatggttagagcactggatgttcttgtagaaaacccagttcagttcctagcacctatgaacctccagttccagaggacttgatgttttcttttgatctctacaggcatgaggcacacaagtggtatatatatacacacataagcaaaacactcacacatataatctaatacaactaaaaaagcaaacacaaaagcctgtagcaatctttagtgaatgagtcctccagtgcactaacataatcatgtctgcaatggcatcgtcagcgtgagagcaaaagtactaaagcaggctttgtgagagaaggaggcacagactgttccaagaaccctcccaccccactagcacacaaagctactgcagaaaattgtctgctgtcttcccttgtataaaatacctcctttttactcatggctggcttttcatcttcatcaggagtaatttgcagaggggttgctttgtgcattagtttgtgaatatagggtctccttctgtgacctaggcctgcctagaactcagaaaacaaactgctgctgcagcttttgaatgctgggttttaggtaactgttagggccaccttcatatcctcgatcgctgcacattcccaaatctgttgtaagcagtctctcatccatgtgtgctcactagtttgactcttactggtctgtcatcttccttccttccctccctctttcctccttccttttttcctttttttttttgccatagctcagcacagcactgtaattcacttctctactagatcacaagttccttggaggcttggggctatttctcatgttttgtttctttcacttgggcaactgcagttctttccaaatggctgatatgcagaaagaaggagaaaggaagtaaagaagaagaggaaaatgagggcccggtattgtcttgggaaaaaaaaagggcttttcttaaataatttagaaactatgaagtaattctttttgtcagagacacacaacctagaatatccctgagccctatttcagccagtatcaacaatgtattctgaacaaaataaaatatttttcactttgactgtgaagtcaagtctcccaagttacccaagaccataacagtgaattgtggaaaatagaggtgtgatattaaagagaaaatggatcatggtaagatatgttttcagaaagaattgattttaagaaaaaaaaatcacatggtagaaaaaaatcacattccagtcccctggttcttgtgtaactgtcaacatggcctgcgctgtgtcattgtcctaacccacagttttaaaagttactaagtcaagtaatcattatctcacaattcaattgttttcctgtaaggcacaattctttgtaaactgtaacttaaaaagaaaaaaaaaaaaaaaaagccagcgtattgtttcacagccaatagcacaggcaggcacgcaacctttgtgcccagtgcaccagaggttaatgattcaccacggaaccagacaatacaggttctttctttggctccttccttggcttttacagagccacaggcttttctcccttttgtgttcacttcctgtcaacactgacttttcaaaagataccaaaacatctcaaaaatctgtttgtgagtttgctaccaaatcaggactcaaacaggctgagtcacttactaccatagtactggtgtataatactgtgcttcatgtaatatctggggaaagaactgacaagaaaaatgtttaacctttatatgtaagagtatagtgatcaaaactaatgtataagaacatagtaatcaaattagctgcataagcaaactcccttgtgtttggtgactgagtcagccacgtctgtcagtatttacagacacaactttcttgtggttttctagatagtattaagaggaaataatgaactactagcacttcggtgtctccacagagtcagctgtactccagaacagcccccacagaaacactgtcctaaacagtcctcagggacttcgacatcatagttatatggatctcaccaatcatgaagcctttcacttagaaactgacagccctgctggagaacaagaaccagattttgtggttttaaacaactacaaaactgaaataaataaataaataaataaataaataaataaataaataaatcaaaacaaaacaaaacaaaacaaaacaaaacaaaaaaacagttctcaaatggtgagcagcaggacaaaggcccacgagagtcccatgagacagcatgctgcagcccactgcagggaaagtatcctagccgaaacaccgacagacaatgatgggaatggaaacccactggctcccaacaaacacaagtcaacagcactgaggggacaggattcacacaacagagctgagcaggtctgtggagacccacttcagctggggcacagcagtccacacccatgagataactccccaggactaaagacgaagaagccctgggggagcagaggcactgctggagtccaaactgcttcctacctgccacagtagacgagcttatgatccatctacaggcagcagcaggtaaagtacttacaagatcacctcttggatagtgggggaaattagaaaaagtttctggaatcagaaagaaacaaacaaaaaaagaaaaaagaagagaaaaagaaaaagaaaaagctggagggaggggagggagtacaaaacaattaagctacttacaatttaaatgtgtcccaaagcacaactcaagaatattattaagaatatgaaaatatccaggaaccagtaaggcaaaattcacaatatttaacgtctagtaaaatatcactgccaggcagtggtggtgcacgcctttaatcctagcacttgggaggcagaggcagatggatctctgagtttgaggccagcctggtctacagagtgagttccaggacagccagggctacacagagaaaccccgtctcgaaaaacaaaacaaaaaacaaatcaccaagaggcaaaaaaaccaagtggctgttagaaaggagagaatcagtcaataggaacacatctaaaaagaatagacattagagtaagcagttagatgattaaaaagttataaacacctatgttccatgtgtccaagaaggcaaaggagcataaatctgttaaagggatataaaaggaatctaaataaaaatttctagagttaaaaatatagtgtctagtatgcacataaaattaagagcagattaaatacttcagaagaaaaataccaataagcttgaaggtacagctatagaaacctctaaaatgaactacctcacacaagcatcctttaaaagaggaggaggggtgtggcaacagccacaagcaacttaacatacacataaaagagggacctcaaaagagaaggcagagaggtcaatacgaacaccctaacctgtgcttaagggcctggctgtccaagagcgatacatcctacacttccacacacccaaagcagagacaagataaaggcatgctatgggaaaacggatgagaaccaacaatagggggaaaatcttacagggagccagaaagaggaaatcttccccagcagagaaacaccacagtgacttcagaagggaggcaaacccagacagtacagcagcttgtttaaacaggaaaagaaagctgtaacctagatttctttgcttagtcaaatagcttccaagcatgaagtgacctgtttttccagccacacaaaagttgaaatagtccttacagatagatgtgaacccaaaaaaatttaaatgaatgaataaaaagttcttggagaaagaaggaaaataaatcagatgaaaatctaaatctctatgaaaaataaagaacaccagaaagaaaaacatgtaaataaataaaaatactcccccccccccccccagacagggtttctctgtgtagccctggctgtcctggaactcactttgtagaccaggttggcctccaactcagaaatccacctgcctctgcctcccgagtgctgggattaaaggcgtgagctaccacacccggctcacattttttattttttatttatatcttattctctctctttctctaaaagacaagcaatgggcttagcatggtccttcatgcttttttaatcccaacactctggaggcaaaggcaggtggatcgctgtgaaattgaggtcagcctggcttatagagttgtaggccatccagggcttaaaggaaggaaggcggatggagggaagagaacggatgcgctacagcagagcttacaccagtgcactgcttttataacttctggtgagataatatgtattacagtaacagccccaaagctgggagacaaatggtaagtattctgctcaaatgtttctctttcccattcttatccaccacccttccttttgtttgtttgtttatttttatgttagttaattcgttatttattttgtttttaagacaaagttttactctgctgcccaggctggccttgaactcctagatggaagtaattttcctgctttgcctccagagtaaggtactgtgtcctgtatacctggctgctagatccttacactacacagaaagttgtaaaataatattcaaaggtagactgagatattaaggtcacatgttataaatcttaaattaataccactaattaaaaaataaaacgaaggagtctaagtagtaagcctacagagaagataaaatggattaaaatattcaatgcagaagaaggccaaaaggaggaaaatgaacaaagagacagctaagaagacagcaccaggagaattgaattccagccatatcactaatcacactgatgtaaaacttctagaagctgagcatggtggcatgcttataatcccagaagctgggatacaaggcagaaagactgttctgaacaatgactgcagcacaaacaggttacaggagactctgcctcaaaagaaccaaaaaaaaacaaacacacaacaaacaaaaatcagagagaatagaggagtgggggaagggacaaaaaggaaagaggaagatgagagacagagaaatgaaatatttcaaatgtctcaaagaaagattattatccaactgatgacaataaaaacccagatcaagatccaatgatgcactgccttagggcgatacgcattcacttgaagaaaatgacacagataagttacaaactaaataaagggagagagagccatatcgctattaacggaagaaagctgaaacacgtttcctacgtgagacagctgttgcacaatgtatcaccagacagagcatttttcatagagattagcaactcagacaaagaacattacaagtttaatttttccaggcctttagcctctgcccacctaggcccctctgcacagaaatcttagttccttgttcacattgctccttgctacacacgtcctgcctgggtggctctgaccctctcagtctcttagttcctgaatctcttctttgcagagtcttcatctccattcctattcagtctgctctctcctgagatcatttgtgtgaatataaaaatgcctgtttcttaatattacactgaaacttttcatttttctgtcaatcacgtcgtcacttcaaatgtcaccaaacatttctgctgatataaatctatacttcattaggctccatgcaggtacaacttccagtcttgaccctaaactcactggcaaacaccctccaatccctggctgcactgttgctctactgcacctccatagctgtactccaaggcctgactgcacctaataactaccttttctaatcttgcaagatgattctgaggaaagaatgccatcatacagagcagtggtacaactgcagagaattcgtttttgccctcaaaatggcctggaattgtgcagggcaattcttttgtccttcgccagtccactccactctctctatcaagtcccatagtaacacctgccaatcgtaagcaccctcaaactttcagtgccacttcagcctctccaccccagccatttttatcaaataaataaataaaaaagaaaagctattaattggagacctcctcaatttcctgccagggcagacttacttgcagtgtttcccacttttcccatttgccacaacagtattttgcaacccacatgctcttctgaaatgtgaccttgattctctttaaacaggaggtggcatctgtttccccatcccctcaagttggcaagcactgtgactgttttgaccagcatgcaatttccagatgtggtcctcttagaagccttttggcggccagcttctatgtcaaagtgtgcctactctaaaaccagatgctctgaggaaacacagcactcgtattagaccagaggctaatggggtgggatgcagagccaggaagaatcacgtgtgagagggtcagtaacacctaggcccagcagtgaagggatctcagcggcagagctactggcccagactgctgtaccacagggtcagacagcaagtaccctgtaagctattcccaaagcctgtcttttcacaaaatcatgagcaacataaaacaaccatttgcactaccacttcctagcaatagaaaacactgtagttgttgttgtagttggtttttttcccataacattacatcctctctcttcaggtttcttgtttgtttgtttggtttgttttgtttttcaagttagccctggctgtcctggaactcactctgtagaccaggttggccttgaactcagaaatttgcctacctctgcctcccaagtgctgggattaaaggcatgcaccaccacaccctggtctctctcttcagttttaaaagacagtctttcctgggttggcattgccatagtggtgtgccacttctgctctctgtactcttagctcactgtgactactccatttactagtcctctctattcttactatggacttccttgctgctagagttctcaatccttctggatgcttctaccgtgtctgaagtaggcatgcactccttgagaccatacactctcccactcatgcttttaactcctctctcagtgttcaatttcactttcttttgtagttggaatattttctttcctgtatatccttttgatcttagagctccctggccttctatctgtagccttctttccccaaattacattatctccttaattgatattacctattttctaaataggtactcagccttggacaaagcacatcaggattcaaacggaacctctgccacttagcttgtatggtctggggaaatataacaagcttctctaggtattcatttcctcatctagaatattaccacttggtagactactatcagaatgcagtgatcaatttttaaaactgtagtaacattcagaaagtacttaccaaactggccagcataagataatttggcagtaaagattggtaatgtttattatatatgtctggtagctttcacattcatattcctagcctgagattctttcctaatctcaactcatacatacaattgacctcaatttgaatggcctaaaattgttttaaactcaatataataaattgcagtttatcctaaagaaaattacatacaacccagactatctattttcttaaatgacactaccactgagttacacaagccagaaacctggatatcattgtaaagtgaccacctctgtcccttactaatccttctataattaactgctgcatctgctatcaccaggccccatacactgtcttaagtggtttatatctaataagtcatctaataagatacaaagtcaataaatgactttagacattgtaggcattaaacatagtgagcctgtaaaggaagtatggccacagataaatgttctgacaagaagcaaagcgaaatattgaaacacagtgagtcaaaggcagagaaaacccattcatgctctggcagaaaccaacgtgactgtaggaattaaactgaaaactcttgggctcagcagtcaggagtatgtgttgctcttgctgatgatctgatttttatccctagcacccacatggtggctcagaaccatctatgagtccagttttgggggatctaataggcatgcatgtggtatataaatatgcatgcatgcatgcaaagaaacattaatatggataaaggaaaaataaacaaatctttttttagaatccatattaaaaatggacaactccttaaatattttggagtcataacatatctgctttgacttaaaatgtcttccatattctcatgttttgagcacttggtcttcagttgcaaggaggctctgataggctaataatatatgaagatatgaaagctaagcctaagttgccatggagaccagaggatccatgggacaccatgtgagggaagctgcaagcacaggatggagctgaccaaggaagacactatctggtctgggttcaatccccagtacatgaacacatgcacatatattttaggggagagatgaaaataattagtacttcatttgatcccacctaccatcaacaatataatgtgagtacattctcatcaggttttagcactacacctacacacacacatatatatacacatatacacatgtgtgtgtatatatatatatatatatatatatgtacatgcatatatatatatatatatgtatgtatatgaatgatacagaatcaaaagttgctgtaggtcttgacctgagtattcattacatagttgtactcagttaatgaaaaactcatctaattgtcacctgaaattaaattatagaattatgaaattaatagtggataactgagataagtcatgtcatataaacatgatattgtatatttttcctgtaagaatgattgccattttattggaaaattagaaaatatatcacatggatatacgtgagctttcacagaccttaaaaaactgaaatttgggttggagatacggaccctctatatgttttcctccctcgcccttcccctcccccctcctcatcccccccctatacctgtaccccagaagagggcacgagatttcattacagatactgtgagccatcatgtggttgctgagaattgaactaaaaaattctggaccagtgctcttaatttctcaggcaccaaaacttcagttttaaaaagatggatttgtttattttatgtatgtggacacaccgtttctgtctttgtcccattacagatggctgtgagtcaccatgtgagtgctgggaattgaactcaagacctctggaagtactctgaaccgctgagccatctctccagcccaaatctcagctttttaaggtctgttaaagcttaagtatatccatgtgatgcattttccaatataatagcaatcattcttacaggaaaatacacaatatcatgactcagcttaaagttatctactatcaatctcatgattttataatttgaaaatcagacattaacaacatataaaaaataaaaatattttcatagactttcactggctgagtattcctaatcaaaaaattccaaaccgaagatcctccaaaacttgaaatttctttcatttcatatcaatgttcaaaataaatattcttattatgcaacatggtttgaattattattttaaaatctgaaaatctggtaaaccacaaggtcttacctagtaaagtagacttgaagaatataacagcactttaggggaatatataggatttattgcctttattaagataaaagtagcttgcatgctctataactaactgcccatggcacataaagatttccactcctataatgatataaaaaacagtatctaccattaaataatactgtggacttcagattattatctttatgactaaaacaaaatgatcaaacagataaaacagaaaaatgtatataatcttttaattttgttgaaaagtgtaagcatttatttatttatttatttaggttttttcgagacagggtttctctgtatagccctggctgtcctggaactcactttgtagaccaggccggcctcgaactccaaaatcctcctgcctctgcctcctgagtgcttgggttaaaggcgtgcaccaccacgcccagcgaagtgtaaacatttatattatgaacaataacacttggattttaaataaactacctcaacactcaagactccgactttaaagcgccgactttgatgaaaagttgctcagcaggccagctggcctgttcacagcagaacaagcagcagctcacagacctgcactcacactcaggaactcacacccacccacactcaggccattccaatattccacttgagtcctgcgctgaacacaggtgattcattaaataaacaactgctcgctaacaggtcacttacgcatgaataccttcggttatttagctaatcacttactgaaagccatgcaagggattccatgattcgatgctcacatctttctaaatgttttatcatttctcttgtcaagttggcttccactttgataaaactttcaatcactttgtaaaaatcaaaggcttttaaattaagtacgttcagaatccacgggaaggacaaatctgttccagaatcaagatgctgcaatgtacttcctaaaaacaagaggaaaaatgtgtcaatatgaaatagtattgtctgaaatgatgagattcggaagatcttatcacacaaaccaacatatagaaaaaaaagggtaagcactttttatttacagcaggtatttcttattctgtggtctacagactctcaagaaactggtttccaactttttaagtgtatgtgcacacattttccttagagataggaatcatagtttctataagatttgcacaagtttacatgccctacactaacacccaggcaggtatcttaccagcaattcattataatatccactttaactaacattactgcttggttaggatgaaatgactcagcggttaagagcactgactgctcttccagaggtcctgagttcaatccccagcatccacatgttggctcacagccatctgtactggaatctgatgccctcttctggtgtgtctgaggacaactgcagtttacagtttactcatgaacataaaaggatttgtttttaaaggatgactagtgatgcttttaagattctgctaattagcctggcagtagcagtgcttgcctttaatcccagcagaggcaggtggatctctgagtttgaggccagcctggtctacagatatattgagttctaggacagccagggctacacagcgaggcccttctttgagcccgatgctgcaggcctataataccagatactcaagaggctaaggcaggagaattacaagttcaagacctagtcagtctacagactgagttcaatgcctcctgagatcctttcttagaaccagtaaatatgagggggctgggttgcctagtccctgtcctgagttcagttctcaacacttcaaagggaaatggaagagaatttgctagctttattagaaaatgatttctcttaaaaatgcgcagattgcagttatgaagattcagtttcagtgattactaatttaaattcctttatctatttatctatctttagataactcttcctcttttgtttctgcaagtgcaacattttaatatttgcaacaatgtttgaaaagtaatatattaaaaaagaaaagtaatacatttttcaaattatatttttaaaaacagttatgagcctttattgttattttctatgatcattaaattgtcataggtattataaaaacagcaaccaattaggaagtattcagtttctgatagcctcctgctcctggtctcatgagcacagaggcctaacagcggggcacagaagcactgctgtccttcaacactctgtggctcacaagcctttgtagccgtttcattagctgcctctcctgaactcaatacactcagagcagaagcctcataaaattctatcccccagatgacctgactgactgacatgttaaaccatttaaatagctgtaactgccaattacattgttcagcatatattgatctacagtatgacttttccttctcaccacagttacacacaaaaaacaaagcaacactaaaccacaacacaacttaatttgtttaaattaagctacagtgcttatttattaaaatttaacttactgctatacgtagccattacaacttcaagagcacaggccagtaaagacatatgaaagatgttgtcatttaggagtttgctaaaaggagaaagagtgaataattttaaatagggcttttatagaaagaaattgttttattaaaacgagaaaatatttacctaaaattctgaatggacaaacgttcttcttcctaaaacagataattgaaaaaaaaacttttaattgaaactttctttgtgtcagcattaaatttttttgctattttgtttcctttaacttactgatttaagcatggattccatcacacggtaatacaatcggactccaagtttatatcgctacaaacaaaaggaaaaataataagcttttactgtttcagaaagtcaaaaagttaattgaattttgttaaagtcttttattgaaacacattctgctccttctaggaatgtggctagcaagagatcacaaaggctcgtttgtttacagtctaaggctcactatacacttgtgctgagcactcccagtagccagcttagtatgtctgggagctgatgcttctccgctcacatctagcttttgtcacttgctccctagagacgatgtgcccagtacaattttaaacattttacacatctagtataatccttttggtgatgcagaatattgatttttgaaatagctaatattaaaagaatagtttctgtctgtaaaactcaatgatactagcacaggccaaaaagagaaaaagaaaaacaaaaaaccgaagttgattaaatcagtaaatgttttaaacaaatgattagttctcatcaactaaaattaaagaaaagaaaaattggtgtttgaattatagacattcacacacaagactattcctttattctaaaacaagactcagaagaattctgtgcataatcacttaacccagtggtcctcaaccttcctaaagtgtcccgtaagcagcagcaaacgcaccgcaccatctgccactactgtatcccactaccgtatcccaccaccgtatcccaccaccgtatcccaccaccgtatcccaccaccgtatcccaccaccgtatcccaccaccgtatcccactaccgtatcccactaccgtatcccactaccgtatcccactaccgtatcccaccacacagcaccaccgcagcacaggcggcagcagctgatgcgttctacactaaggaccaacagaagtgcctcgagttacctgtactccgatgtcaacacagccctggcccacagcgttagcaaacttctctttaaagatgtgcccaacatcctttactctctttaggatattttcttttggattcactgtgcaattctttaagaaatataaacataaataactattgaagttaccgtgtaaacacttctactataacaaagcaactgacactacagaatatgaccagtcaacatgcaatcccactgcttgtcagacacaaaaattattcagtacactgttattgaatttttttcttggtttttcgagacagggtttctctgtgtagtcctggttgtcctggcactcactctgtagaccaggctgtcctcaaactcagaaatcctcctgcctctgcctaccaagtgctgggattaaaggcatgcgctaccactgcccggctgttattgaaattttaagccagtggtttttaacattgctaatgctgtaaccctttaatacagatcctcatgttgtggtgtctgcccagccataaaatgttgttgctacttcataactaatttcccaactgttatgaaccataatgtaaatatctgatatacaggatatctgatatgcaacccccaatgggattgcaacctacagattaagaagagctgttttaaacaaataaaggttatagacaaaacatatctctcagcctttccatctatcatatgttctcataaagtatcctcagttatgaattgctttagtggcctggaaagatgctgggcggttagagtactggctttccgaggacatggatttggttcccagcattgacatggaggcttacaaccctctgtaactcgagtcccaggggttccaatgccctcttctggcctctgcaggtactgcatgcacatagcacattaacatacatgcaggcaaaaacaaccacatacataaaaacaaactaacaaaaaaccccaaactttttaaaaagttttaaaaaaatactttttaaaaatgtatacaaccttactactcaaaagcaaatgaagaagtaaaagcaagatttgagttttgtttcttttcctagtgaaatgtgctttaagagaatgcagaattaggaaaaccatttatttgtattttcaggtacgcaagtcaggagaatagttacaagtgacatattataatagtctataacttatactatgctatactaaaatgtgttacaaacattcttgtctcctataatcagactaattttattttttataatcttgatatatcatatacattcaaaatacactaaaaataaactttctaaatttaagattataattctttttgcacagtgacactaaaaatgtaacgcacataagatgtcaataactctgtattccctaaagaaaatagcaaacaaatcttaggaacattacacttacacacacacacacacaaagacaccatttcccagtgtaatattacttatgtcaaaatgtttgcataatttctaagactttatgtataggaaagatggaattatttttttccaaaaaagagaaaaatgaagacaactgaatatagaaagaagtaaaatttccagctatggtagaggcaagaagattttgagttctaagtcagcagaggctaaataatgagtttgaggacaaaatgggtggatataagtatgtatgaatgtatggatggatgaagaaaaggaggaaggaagggagagaagaaagagggaaaaaccaaaccaaagagaaaaaggaggaagatgaggaaaataaaaaaaccacacacacacacacacacacacacacaaaatctattatgttctccacaatgtttgcctgagcccatctgtcatctacacatcaattatcttctgacagtgcatgaagcttcaaattcattaaaaagctaagctataaattctccttaagaaaatgtccctgaaaccgaatttcttgtttaactaaagtaactcaaataaaagggagctcctacctacttcaaagctgggagcaagtactcaagaaaatattggatgagagattatttttctttagtatctacattatccttgctaaaagctgtaagcaattgggtagatatatggcaaattattactttatagaagttgggcaaataaaatcatatttgaacaattattacggatgacagaacttgttctgctaatctctggattatacagtagaagagaacaacatactatgctaaaaacttgttccagtatgagacagaacattagcaagtataaaaggcacttaattatattaattcatttgtaaaggctcccagccaggtgtggcatgactatagatttccctgtcacttaacccttaagcaagagacgaaatgaggggaccacttgtagatgccagtcaccagttaccactctttctgtcttgtgtttctgagggaaagacaacatgagctttcaaatattaaatttagggtctcctaggattgggaagggctatatgaaaggtaagtcctattagctaatagaaactaaaacaaacaatagttagactcacagaatacttagcagcaatgggatcttaaaaataggaagatagtatttcagagaactgaggaatagataaattataatatatagtgagctatatgtctgaatatgacatgagtctcattactttgtattctaccttaaatttagtaagaaaaagcatatatattgagcagtagtagaaaacagaaagagagaaaagatgggctggggacatggctcagcgggtgaactacttgctatgcaaccgtgcaatcctaagcttgatctcagcctgatgtgacaacctgatgtggcagcatgcatctgccatctcggagtgggatgcagaagccagaggacccaatcctgggggctcactgacggctggtataggactcagtgagctcaagttcagtgagagatctgtctttagaaatgaagtcaagaactacagaagacagacaccagatggtgaaccctagacttcacaaacacacatatatgcagatagatccatgtacaatgtgaaggaagacaaaggaatgggaaaaaaggaaaagggagtgaaaaaagaggtgatgcatagttttaatctcagcactggggaagcagaggcagggagatctctatgagttcaaggccagactgatctacacatccagttctaggccagccagggctacatggtgagattctgcttcaaaaagagagagagaaagagagagaggaaggaaggaaggaaggaaggaaggaaggaaggaaggaaggaaggaaggaaggaaggaaggagagggggagggggagcgaagggggaggggaggggaggggagggagggaggggaaaaagagagtgtcttagagggaagtgcctcagttgcaaggaaagtagcaaacataagaaaaacttaacaatatttaaataaaataaccatcaaatttggagcagttcaaagagcaacaaataaaataccaaattaagtacattttggattaaaaaaaaagtgttttaaaatatacttagtactttagcttctaacttcaattttcttataagatatcacaagtgatattttacatatggcttacattgaagtaggaaatcagattttctgatggctgatcacttgcagaatttaaaatcaccattaattgttgaatagtattcataacagtcctagagaagaaaaccgaggaagaagcattaagccactaagaaagaaaacgaggaagaaggaaacacagctatcacataagttgagcatatccctttttggggggtgggtgtaatttgcattacacatcctaagtcacagtgcactgaaggaagtaaaggcaggaggaactcaccccagaattttgtgcaaggtacaagatatggaactactttcattttctacgtgtgaccagtagtgtttgttgaagatgctgtctgttcttcagggtatattttggcctttgtcaagttaggtgaagtgagagcatgggcttatgaataaaactatcctcccaaaagccatctctagatccaatggaatcctcatcaaaaccccaatgcacttctttgcagaagttagaatgataatcttaaaattcatgtggtgatccaaaagactcaggatagccaaaacaattatgaaaaatggaaacactagtaaaggcatcctattaagcatatctcttaacataccatgtattccatgtatcttgaataagttctaaataaaataaaatccacttaccatgtatagtttaaaaattacagattacttaagtcttttagaaaagtagtatcattaagtataattgcagaactgatacacttactaataaaactaagtaccattagtatcaatagagaattacctgtcaaactaatgatgttttccagaaaatataccttatattttcatattatatggatacataactggcatcaaaatactgttctttcaagaaactattacaatgaaatgttaataccccactctccaagacttcactgtgtagtataggctagcctcaagcttgcaacaaccctcttgatccagcctcccaaatctggagattaaacaaaggatcactatgtctgtccttaaattttatacactttgaaataaagacagtaagatacttagaaactcatgtgaagaattaaaagagccttcattactccttcaagggaggagagtaaggtcttgagtaaccataaaagtcactattgctggggctggagagatggctcagcagttaagagcactggctgctcttccagaagtcctgagttcagttcccagtgaccacatggtggctcacaaccatctataatgaggtccgatgccctcttctggggtgtctgaagagagtgatagttttaaaagtcactattgctaaagcataaaatttgccagtttctcaggacctccacagttctataactttgcatgcagacatacacttgtgtttatagaacatagtaaagattggtgttgtagctttgcttttgagacatcgtatggactgcaaagaaccacaaaccatttagagatgaaaggctgattaaatataatacaaaacatgccatattcgcaggtttctctatacttcatatttcacatactacatttttatagttactagagattaatttaagtcacaatgactaatgccacaaatgaccaagtactaaaaacaaaactgcagacttctttgaagcaactgactcaaagcacttattttttcttgacactggtaccttccctcagattcttggctttccgctctaggctccaagccttatcagctaattgtagcctaacctgtattatctggttcttctgactgcattcctcacgggtcaagccttcccttcttgctttcatgcctgctggctttgggcagatccatgtgttctcacgtttctaacgggtaatccccaatctgtgggtgctctgtgtccctctgcttactagaatctgcacacatcctgttaatattgctctgtgaaacatgaaagcatcacatttgtcacacctgtccctggtccttcattcctaccactattcacttggtccagtcctttggcatgcctcagctgaactactccaaaaggtcagtgtagagattcccactcacgaggcatggacaggaaaagaatcctcaggttattctcctgcgcactgtggtctaagcactaagttgcactgacagtcctatttctaacctgtctgtcttcacttttcctccatgagccactgataggtaaagctgtaaaactaaagtctgggctggggtgtagctcaatgatagagcacctgcttagcatgtgcaaagccttgaatttgatcaccaggaaaacaaacaaacaaaaacttctctgagaaatcaaatctatgtttatctttccttgtgtttatcatccatttaaaacacagaccacaccattgcactaggtaaagtgaggatggcatactagtcaatacctgctttccattcctgcagtttatgccccatcttacaattagtacagagcagctagtagtccccagatccattatgctgtgccacatttcagtgcctctttatataatattacctcttggtaaaattcacttgagacaaattccatacactttgtgttactaaaacgagcctgttcacatacctactgtagctgataggtctcactgcttgcttgcaaggtaccaagcaccatgacaggtcttaattactaaaactgtgaataaaaacccatggtccatatggaaagcaacttaaaggctattgttggtattagtgaaaaacacgtaaatatgtaaatggatttacagttatatcgtgaacataaaggaagagcagatggcagtccacagaaagaagaatttcaagaaaaaaatgccaagtatgaaggctctcaagtacaaaagagctttgacaattcaaaaactggaaaaagaccagtgtgtggccaacacagagtaatcaagaacaaaacgaggttggctaggcaacggaaaacaggtcatgtaaggtcttagggattgttaaggaatacgctttgtattctaaatgcaagtagaagcaatcaaagggtttaagcagcagtcacacacaatttaatttacattcacagactattatttccaggctctgtggaaaacagatttattggtaggagaaagctacagtggtaagaaatgaatgacacgatcagttagatactaaacaaattcaagaaggagagagctgacctgcacaaaggtgagggtggacagaaacgggggaaagcatgtggagccctcagctggatctgaccattagaaccaaagtgggatagcagtgaagaagggacatgaagtaacctaggctatgcaacattaaacactgatgcttctcctttctgagtgagacatacttttaaagttatgtttcttatacataaaaacaaccaagttatatatgtaacataagcaagtcataaatcgacaaaacagtcctccatacacatttgttacatgctgtgcaaatacaaagtccaacaaagagcaagtctgaaacactaacacagtctgaatgaacaattatgaaaactggacccaggaaaaggcatacctaactggagtgtgtggagtaaccacgtttgcctcttcatcagggttgttttttcgtggcgttctctctgtttcaaaactaaatgatacgtaaagtaactcatactgaaatttacaatttgtgtttatgcaccaaaaagcagttattacttaataatcaataacaataattaattcctgttgttgagagcatcacacgaatgttcactatatggtaagtactatgaaataagtgctgcctgtatgatttttttgtcaccaccgttcttcagcatggctctccttcatggtttacagaaaatcgtgcaccaaccacagggcacagctttctggaaagtggaagctgatttctggctggtggtgttcatggctaagcttcgtgagatcttaaaacaatgcagaacccattttccagtgcgctatgctgtccaaagatttcatttctacttagatagagctagaaacattttactgtgtttaacttctaaattatatgttttaatttcatagtaaagtaattcttcttaaagagtcaaattagctttatatgtgaacagttaaaaactgtaattactctcagccatttcctattttagaaatctctacatggtaagtcaagaggatattttcttaaaattgtttgaaatatcaattaagcaacagcatataaaaaagaatggaatgaaagaggaaactcttgagtaaactaattaattcaaccattttcttttggtacacatttaaaacttatctagatgaccaaacaaacaaacaaacacaaaatcagaaaattggcttaagaaatactttacactaaatctctgtttgttattaattgtatgtttaaagaactacctttgcactagacaaagacttttgaaaataacctgctacaaaagatgttaaaagatttataagttagtgaaaatctacataacatatctgagtaattattaatccaaataaaaagcataccaatatataaacattatgtcattgcaatacctgtctataggatcagtctgaagtgttttatcatgatccaaaaacagtcttgcatctaaatctttgtttttaagataaacttcttcatagcgtttagaaagactttcaacctcaaaagaaagaaattggcagttattcctttttgtgttatgtcttttagaatacataagtagacttcattaaggaacttttatactatgtacatttaattttaaaacatactgagtccagattcaaagtaagatcggtctagaacagaacattacacataaactttatttatttatttttttactattttacatatacatttcacttattagaattttagctagatgagggtcatcaatggcacaaaatagtgctgaacacaaaaaaagtcatcacaggttgaccatttcctacccaacatgtttagaaccaaaagcatttaatattttaaattttttaaaattttgtaatactggcatataaaaatgagatgtctgaatgacaacatctaagtacaaaataaaattatgtcagaaagacatattattgtatgcagagtatgaaggtaattttagacaaccttctaaaatacttttgtgttctgagtagaacctttcacttgtggtcatatcagtgttaaaaaaaaaataacaaatcattaagggctcttactataaccatgatttgctgtgatttttctcccccttccttctagtggtagggaaaaaccaagagtcctgtacatactaaacacacattccactactacttgagccctttagtgttccctgcctagtttggtttgttgttgttccagtgctggggacagaacccaggatatttgacatgtactctaccactgacccacattcccttgccctttctgggactttcaaattcaatgcttaatcttgggctagagagatggctcagtggttaagggcactgattgctctgctgaaggtcctgagttcaaatcccagcaaccacatggtggctcacaaccatctgtaatgggatctgatgccctcttctggtgtgtctgaagtcaactacagtgtacttacatataataaataaataaatctttttaaaaaatgcttaatcttgaggtaacaaaaactgcattataaagaaaaaaaggtagaagaatgcaaattgtgtgttttttcctacataaatatactgggcagagtggtgactaatccatggctaagattagtcaccactcctgccctaccttagagaagcacaatctgactgacaattatatgtgcaatactgaaaatgtcgagtttctcttaaggtacccattgaaaccaaccctttatttaggatactctgtagagttgagaacagcgggtttctaatgactaaggtaggaataagactattaaaagtccaggtcccagacaagtggtgccggctcacgcctttaatcccagcacttggaaggcagaagaaggcaatctctgagttcacagccagccaggtctacagagtgagccatagctacatagagagaccctgtatcaaaaaacaaggacaaaacaaacaaacaaacaaacgaaagacaaaaaagaccagtcccttcttgctttcccaggtcagtagtggaccactcttctatcaatcttgtaagaaactttgcagtttattgaagaggttctactacaacataccactgagcctttgaagtgaccaaattcagtcacttgaaaagccatcttgcatagagcatgctcagctcagaaatcacaccaccttaaaacagtgttccaggaaattcacctgccccagtttggatgggaaagtcctccgcaggaaacaagaacccatacatacttccgtcagactcttggagattctttgttatctctgggttttctgtttgtttgttctgcttttgtttggtgtgttattattgtatatagttttcatcatgtctttcaagagcattagtactctggccgtacaaaccctcccatactctttcttcccttccccaagtcttctgctgctctcctgtcataatgaacttcagggttttctgcatctatgtaaaatctagaatccacagattagagcaaacataaggtatttgtttttctctgtggtgatgcaatattcttaaactatctactatattctaagagactggaatttttgctgtacctcacagccaaagttattaatataccttgaggccacttacaaattaagactaagatactgtgtactcagactgtttgcttaacctacctttaagacaacaatgtaaccaaccaccaaccttacctgccttgaatttcccacctaatcaatttttacaacctaaggtaatgcatagctgcaattttaaattgcatgcacttccgtgcctctgacctagataatgcacgcatttaatttactgaaagctgcaaaagcaggagctgaagaaaaccttcctaaaatccgtgacaacatttcaaaacaaccctttatggatactgcttgattaaaaaagaaaaaagaaaaaaaaaaaaaggtctttgttatccgggttggctgcaatcagttggagccagtgaattaatcccttgcttaaacttctaaagatttctttgaagtatcccattcttcccccatgcgatgtgttctatgctgttcaataaacagaacaaagctctttgttggggaaaaacactctcacacaaacacacacagctcaaacaacagacatacacaatcacagacattgaaacagacagacacaaggacagcctttaggcaggcacggattcagatgcacagtagacagtacagaagacacaatgagtgtcaggtagagaagtcaaatctggactctttcttggttaaacaactccaagaagtacttttctttctttaatgtgacactgttgtattattggtaactcagaattaatcactgatatgctataatctgcacatttctgagtttatattattttacttaatattatgatctcaaggtatatgcattttcccataaacagcataaatgccttcattctccaaaggcttaaaaaactccgtgtataaatatcatattttctttatccatttcctgaagagacatctagactgattttgtaaattagctattatagctagagcagcaataagcgtggctatacaaggatatttatggtatactgtcataacatctctggaacatacacccagaagggatacaggtgggtcatttagtagtcctattttagtttttttcagaacttcattattgattccatcaagactagactaattacattcccattatatatatatgatatacaaagattgatagcttccaaagaattcctctcattccataggctgtttgttcattcaatttcatgcagtgccttttagtttcattcgattgctgagcaactgtaatctttcatttttctcagaagatagtgtatctactttaaagcattctgcctatggttttctgtagcagtgttagtttctgtttacattgagaatgttgatacagctatttgaccttcatgggatgagaactaggatctaacttccgtcttctgcgtgcagtttccctaggatggcctgggaagaagctgtgggttgtcattttgtttcggttctggtggcattccttcctttgctgggtcatggaatagtgaggaacggtgttgaagtcagcagtgagtccacctggacctgagcttttctagtgaagagactcattaccttcccaatatcactctaacagttctgtttatatactcttgctctacttttctaagccatgtatatcctgaaatttatccactttttttcctagagtttccattttacttgaatattaggtgtgtttgtttgtttgtttgtttgtttgtttgtttgttttttccgagacagggtttctctgtatggccctggctgtcctggaactcactctgtggaccaggctggccttgaactcagaaatccacctgcctctgcctcccaagtgctgggattaaaggcatgtgccaccactgcctggcttgaatattagttttgaatggtgctctaatgatcctgtttttcattggtatttgtttccttttcaacacctaattttattaagttttgggtctttcttctggtccatttggctcaaggtttatcaatcttgcttatcttttcaaagaataaactcttcatttcacggaggttttgttttgttagggaggggaagagggagggagcacataggctagcctctaacttaaacgtctgcctcccccactagcacttttttttttagttatccattccattcgtttacacctcaaatgatatcccacttcccattttccccttcaccacacccccatcccacatctgccctcttccctccctcccactagcacttttaaggacagtgaatgaaggctcatctctgtaccacgtgacctagcacagcacttgcacacattgaacacataacaagcattaagtaaactcctaaatagaattaccaagccaggtaaaagaaccagctgtccagctttctaattctgtgtcttctgacaaactatggtaacttatacatctgaatgtacatctttacaacctttgtcaccacagaaaagctgtctttacagctctactcagcttagttttccttgagaaataaacaactgacatatagtaaattgattttaagaattgtaaacaattattccattcccccaaagtctcaaacaaaccatactagttttaactgaattttttttcaaattacctctggaagtccattagatgatacaattccaagtgaatttataaaagggataaaatttttgaaataaacatttttcacctgaaaaatacaacatttgaatatataaatctaaaattatccagtaatatgatgatataatttaaaacaaaataaaatctagtcctagtaaccctcacattagcagtgctacctgccacttacattgcattcaaagtaatgatactaacttataactgattcgatcgtttactttttaataatgatttcataaaacagagtttaagtggaaaactgttaatgaaatgggattaatggcatgaggagacattgaaaccaacattttaaaatgacatttataaaacatatttagattactggttgctctacaagtgcaatgtgctatagaatttttaaccaattgcttttcttaatctaactttttttcccacttcttttttctaacaaataagaattaacacaggaattaagtctaggaagcactcactatttttgtttcctaatttgttcacacttacctaagatatttagtaatcaattattaaaattagccactagttatatatccacaaatgctatcaagtatcaattaaaatattagtttttattagctatgcttgaatattaaatatgtaaagattctaaattctaagaataaattccttaaggtgaaaaacgtatttattctaatatgcaaaataaaattaattttaagtaattacaaaaagccagggaaatagaaaatgtatttactactatttgttcccttatgactaaacagcaggattgagacagagctacttgtacgacatttgtcagcttatttgcatgcgtaacttgtgaccgtagaaagagggaaagtgaacacctgggttactatgtaaatgcaatacacctatacagatacagaaattcataaattagcaagaagcaccgtggtagagcacagctggaaatggctctagcactgctttagtcagtactggaaacaggggcttactccttcccagagttgtcagaattccaaagatgcaacacttcacacatctgatgacgaattacagacaaaatttcaataagtaaactgtgagagaaagaatgtactggatgaacagagcctgggagacatgtcctaaacgctatcaaaggttcagcgagtgatgagcaaccagtgtctggtacatgcctgctcattactacagggacgtgggtacattacctgtaaaagtcctttcaatgcctagattcttgaagaaaataattactatatgtgtttaagttctccccagcagttattaacagctgatattgtatttggaaagagtcataaaatactaaacagaaaatgaatgctagatgactttagctttagggaagtgagaaactgaggtttcttggcagggtgtttgaaaacactatggatactagtaaattcaatggactagaagaataatgcatttgaaaactatcatcttcatgctacaatccagtgaggacagaagggagctattctctttaaaagcaaagtaagaacgtatgaaactgtttttttcccagaattttgttcctatgtaatagaagtggtcctacttaaaaaaagaaagtatgctcacaagaagtatatattgacaggcagacttagcatatatatctacttcagctgttttaaataaagtgtaagagaaattacctcatctatattacactcgtgttctttacagagaacctcgataatcctcgtatcattttctagttgttttgctatccgagcgctcctgttctgacctcttctgggtgttcgaggtgaaccattaatggggattgcagctgtttctgtaaaaatggtaaattagaataaaaacaattgtgtattccacattgaccattaatgaaattgggctgtggatgtaactgagctggtagagtaacttgcctagaaaagcatgaaaccctgggttcattgccagcaccacatagtccagcagtgctggtatagacctgtaatcccagcatttgggaggtggaggaagaatcaaaattcagtaccaccactgtctacacagcgatgtcaaagccagcctaggccacatgaggtcctatttccaaaataattaaagttagataaattataaaataatgctacactgtaattataactaagatgtctgaaataatcctggtagaattttattctgcttattatggtttactatataacaattttaacttatcaattcatgattattgggacactcttgttctgcagtgctggcaatcaaatccagggtctttatgcacgctacacaaatctctatcactgagccacagactgcccttgaatatctgttgtgatgtatacgctgctacaaatttttgcaactcacatttttcttttactcccaatctcattcccccaaagctacatcccataaacccagagaaagactgacaaaaaattatttatgttacttgtaagtgtattttactcaggatgtatgagcaaaaatatttcctaggctgctgagattgctcagtggcagagacacttgatatcaaggttgacaacctagttcaatccctggaacccattcactggagtaaagaactgactcctggaatctgtcctttaatttttacacacaggcccagacataatcctcccacttgtgctgtaggggactggagaaatggctcggtggttaggaatactggctgctctgttggagtacccaggattaattgccagaatccataattatctgtttagttccaggggataggatgccctcttctggcctcataggcaccaggcaagcatgcatgctggcaaaacaccagtacatatgtttaaaaacaaacaaacaaacaaaaaacagatctaatataaaatgtaagtacatagcaagaggaatccatgaataaaggccactgccacccatgtctgatgccctgagtttgatctctgtgactcacacaaacagaaaaacagagaactgactaaaaagttgtcctctgacctctacttgtactcagccacacgacacataccccctcacacacaaataatatcaataaaaataaaattccaaagtgtgatctttaaaaaaaataaataaaagataaacataatatgacaaattgtgattttcttaaataacctgtattattttgaacgttgctgaccaactacttagtagactcagctattaagaagattacaggtgattaagtatggtctagccactctagaaatcagtgtggagaatactcaaaagctaaaacacatctaccattattacccagctctctaattgaacttaagacccactcaacaataaggaaaccatgcctggtacttgaaacctagccaactacctaagggctagtgatgttacagatactggaggagaacctgcaacccccactttattagaccagtataattcctagtaacaatctataaacatttgtccttataccacagataagtactcttcactccttatcaaggaaacttctctgtatcacagatggagacctttacagaaaatcacaaccaatcaaaaatgcagggctgtgaagcccagtcccgatggacaaacctacaaaactctagagtccttacggcttaagggcccttgcagacaaagggacagaaggctgcaagagacagaacaggaaagctacatgtcctagaagcacaatatgttgaataattctcaaaattttccaggttatgttttcccaggaagtcactgttcacagagatgaattaggcttcaccatttcatcctcttcaacagtacctttagacttgatgtcttgatctgctatctactaatagcacttctatcattccagcagctaggaatcggcttgtccctagtttagtttatatttctatagtataaaagtgattcaaagtcctattcttgtggtgacaaaaagaaacatttctattccaagaaactgatttatttacacttagatttgtttaatgttatctaactagatcagcaatagttacttttttttcttttattggatattttctttatttacatttcaaatgttatcccttttcctggtttcccttccggaaaccccctatcccatcccctctccccttgcttctatgaggtgctccctcacccaccgtctcacccactcccacctccccacactggcattcccttacactgggtcatggagccctcataggacctcccacactgtgagctaaaacaacctcttctttcagtaagttcatctcattggattctgtcacagaaaaccagagctgagaacaaaggccgagtccacacctgataatgtttcatcatccttcagtttaaggaccacaccagtcctatagacagtcagtacggaactgctgaagaaaaggagaggagcgctgtattgtttacaatacttactgtatggctctctgagtagtgcaggaggtgagaacttaataaaatagtcaactacacacaacattagctgaaatgagattaccaggtcatcttccatctgtaatacttctcctaaaataaaaaagatgcacatttaaaattttttaactatatttatctattatttctttagctacctgtatgtgcatgcacatatgtttgtaagcacatgcatgtatgtatgcatgtaccacaatgcacatgtggtaaccagagaacaacctgcaggagccggtgctcttttactccgtgggtcccatgacaaactcgggttgccaggctgatggcaggtgccttacatgcaaagccatttcactggcctcaagagtcccactttaaagaaaagttagagactggtacctttaaattagataaaaaaaatgtgggtagtaatatattcatatgctcattcatttgctaatcgctacagccacaataaagacttttctcttttttataaaaacaaaataaaagtgagatttaaaacataaatgaagttacaaaattaggtagtattaatctaccctctggattttaagattaaggattataatgattattcttttttttaaagtgatttatttatttatttaatgtatatgagtacactactgctctattcagacacaccagaagagggcatcagataccaataacagatagttgtgagccaccatgtggttgctggaaattgaactcagaaccttcggaagagcagtcgggtgctcttacccactgagacatctcaccagcccctagtcagtgttcttaactgctgagccatctctccaacccccaataattaattcttattaaaatcaactggcactgttttttgtaaaatttacttcctatcttggtatgacttgcaaaactcacattttccagaaaccatgctgaagcacaatgcatgcttgtcttttatttaaaatacttataaaatatctcatatgctcagtttaaccccctataaaatattacagtagccaaaaccatcaagaaacaacaaactcagaatataacatcctaacagtttatgctatatatatatatatatatacatatatatatatatatatatatatacacacacacacacacacacacacacaaaactacaaggcttataaaataaatgcatgataggtatttatatacaaacataaattatttaaaaatataagtgcatattttcttgtggctctttctctctctccccctctctctcattcccttgctctttttttttttaaagacagaagtgtaggggccagagagattgctcatggttaatagcacttgctgttcttgcagctgatccaggttagcctaactaggttaggctcctagtaccaagtgtctgttattcctatatcaggaaatctaatgccgtctctggcctccctccacaggtacctggcataatacagatacatatatgcaagcaaaacactcatacacatagaagataaaaataaatacattttaaaataaaggaaaagcttgactgattcactttctctcttctgggtacctgctaagcttgtaataatgacaattaatattgaaactgccaaatatgtgagaaaattaataacccagcatcaggtaggtgttttaagtccatatgatatggtacaaaagaatgtttgcaatgaattcagtaaagaaatattacaggagtgtagacagcaaagaaaaaaatcaatgatatgaaaatgtcactataaactcatttgtatgttacctaaaaggtaagctagtgaagaaacagggatgagattgctatcaggtgtttcccagtacgaatcgcaaaggcgcaaagccgggagaaacagcctctcccctggtaaacaaccttctgaaaggaaggcgcacattagccaggggccaggagaggcagtaccagcctgcaacgatgcagcagaatgctcagctttccaccttctgacttgcagggagaagtcattgctacagaaggtaaaaggaaccagtgctgcctgggaaaagaggggaggataaagtttgtcctacaaagactcagaactgcaaaggctcctggcattccagataaattctctagtctcacccttaccttctgcaaggtagtataatacctgtttataacacactgcaattcttttttttttgcgggggtggtgggggggtggtgggttctttcagacggtttctctgtgtagccctggctgtcctggaattcactctgtagacctgactggccttgaactcagaaatccgcctgtctctgcctcccgagtgctgggattaaagccgtgcgccatcactgcccagcttcacactgcaattctatagggaatacaaactaactacatgttaagtgcaaaatgaatgaagggagggcctctcaaactacctcagagaaaaccagtaagatgaaggggaaaagcacactcaaaagaaaaagtaaaatcacaaaaggggacaaaatcagagaacctaataggaagagactatctaataagcaaagagacaaacaaagccggcgctcctgcattctagtgaagtcccagtgcctgggacgtcagacaggaaaaccatcagctcaaaggtagcctgagctacatgccaagtacttgctttgaaacaaaccaacaaacaaacaaacaagggagctcactgatctcaatttatataaaaacacggtgtcagatgaactaagacagaactaggataacaaaattagtttagctcaaaacagacaaaaagacaagatgaatagaacctgtatgtaatacaaagttgagggagtagctcagtggcataatatttgcttgacactcatgaaccttcagttcaatttccagcattgcaaaaaaaaaaaagatttaaaatcattaaaatgacagaaaaatatgaagaacaaaacaacctgatatcatgttcagagaagacatactgaataaaataatgtcttaaaatacaacattattaagatgtctcagaaatgaaaaacagaattgtttgttttaaaataagtattccaagacaaatgaatgcagtatgatacaaatcaacagatatcctagtaaagatattaaacctcaaacttaatattcatttacttttatttctacatatgagcatttttgcctgtatgtttgtctgcgcccatgaaggccaaaggagggtaacagatgccctggactggagactgtgcgctgccatgtggattgaaagcaggactctggtgcaagttttaactttagctactttaactagtcactaaagatggctttatctactgtgtcatcacttcagacttaaatctcacgtttcagaaagaactcatcaagtactcagcaactaaatgacagcagggacgctactcgagcctcagatttcctaattaagggacaaatgactcaagaacaggacacacagtcaagttgtctttcagggataaatgctgtggacacttgccattaacatgacaagcatttggaagatgacatgaaaagacctagtttttaaaattccacaggttggagaggtggctcagcaggcaaaagtgctttccaccaagcctgagatgcacgcacgcgcatacacacacacacacacacacacacacacacacacacacagagtaagtaaataaatgtacaagataatgttaaatccttgatggtacaatccagatagctaagaaataaatcaaactcaaaaactcagaaacagagacgctgtaataaagtagttacaatgggcacagaatgcacttatacacagaactgacagtaaaggcatatagtaactataattacagatgaataaatgttatagtcttcagaaatgaaatgaagacaagagaatgcagtggtcagaaagtgggaaggcagggaggatgatgctccaagagcgattactatcactgttttcaaggtagattggtgtgcagtgttgcagacttccctctcccttgtctccggctgtaccaccctccacatgcccgatctcagctgctctcagctgctaaggggaaaggtctggctggtattgggtagaagaactccctcctctctaaggggaccgtgatgggatcctgttgttttccctcagcacggtatcctggaatctcgtctttactgactaatcatcatagcttatttccatctgactctccttccagcaatttctactttctccaagtcagaagaaaaaaccctaagacttcaccctgaatttggaataggtactggcatttaactactctactttttccttttcattgtattagcattctcaaaatacaaagtctaaaaaagaaaagtaaagattctatcttaggaaatattttaaactccatgtaaagtgaccaaacacatattatttccatttcttattactttatttttaatttaaataaatttttataatttaaaattcactaggccctgacttttatccccaacaccactaaaaaaggagaatgcatagaaaatagggaagaaaggggggataagacagaaaccaggaggaacggaggaattaaacatttcgaatgatgttctatcatcataactataaaatgcagttaataagccatgcagagaatacagaaggatttattaattgaataatttttgtactattccaagtgaacaatttaatcattatatttgacacatcagcattcaataacacattcacttacctttagctagtaaaaaagtgatccaagaaatttttagcaccaacatagaatttatttcagtagataacctggtaaacaaatacaaagcaaaaaaaaaaaaaaaagtcagacactgacaaagtattccagctttactttggggtagtttgttttaattatagacttgagttaaataaatacacaaatgaaatgcaaccctctttaatgcacaattttcacctaaactcacctagctcatttggtgtgcctatcaaaatattgattctaatctaaaactatataaagcccacggtacactgatttgtttctaattacctttatacttgtttgctctgtttttctaattaaaatgaacaaccaaaaaaacccaaacaattaggtggcttagattttgtcaacttaacactttaccttgataatttttccatagaatgaccactcattagaatcaacagctttttatgaattaatatatgcacaatttgcatttcaatcaatctcttcaatgccagtgctttcgtggggcaggaaatctccaggattacttgagctatttacagagaagaacactgccatactgttcaggaatttaggatttgtaaatgaagttttttaatgagtaggaatattttacctatctgtgtgtttgtgcacgacttgtgtgcctggtgtctgtaggggcctgaagaggtcatcgcatcccaccccacagaactagaaatacaaacagctgtaagccaccatgtgggatgttgggtttcacgcctgggtccagtcttctctccaaatccctaaattgagaatgtatttgttcttatacaaaagtatgcagagccttgttgataaaatccctgtgatagatcgttaataaaaacttaatgaatgaactgcattttcctcagaaaagtgacagagaacactgaattccagccaattggttctctctgctatataagtaaggcacacatttttagaagataaacaaatccaaacaggattttaccaccttaacttataaagtagtatgtttttatcaccaaagtaaacaatatgtttgagattagtccaaaaaaacaaattttagtgaaaaattacatgctacttacgcactgctgggttgtgtcaaatatataagttcacacgtcctgaaaagaaaaaaataatttcagtaaaataacagcttaaaagaaaacttttaaaatacttctgcagcatgagtcattagccttctaaaagaaagttaaagtatatctgcttactacaaaatgccatctcatatcaccatgttctaagataaaagaaccggcttctgtcactcactgttaaatcaaaaccaatgaccagaccagactgttagctcagtgggtaactaaccaataagccacatatatctctatagtttaccctataataaacaagctttggcattgcaatcttcatactccagaaaactgtacaagtagaatgggaaacggaaaccttgatttgattcaaagccaccaacttaattaaagctaaattattccaaaagactagtcaataaaaatcttaagttacaaagtgcagggcagccttgtaaggccaaatcagactatgccattccccagtgtaaaagcactcagcatttccactgtgcagggcacagctagcttgctcctgcccagcccccatcctaccttccatacatcagcgctcaaagcacatccagtcactgttttggtgtgcacatgctcagcacatgcctgacacgcccagttcctgtccccactcatttttctggatacatttctatttctaatccctattcagaacttcctccttctctttttccttagtagaaatcaacagtaccgccttctcacctagctaagatccatgacgtactgcatcatttctacttaaacgcggtactcttcaatccagcatcacagccattactgcattttcacgtggacatgttgtggcatgtgcacatgtacacatgtatgtggaggcctgagactgatgtcagggatattaaattgttctttcatcttattctttgagggcaggatctcttgatcaaactcagagctcatggagatagcagggtactaacagttaattcttttttttttttaagaattatttatttatctcatgtatgtgagtacactgtcgctgtcttcagaaacaccagaagagggcataggatcccattacagatggttttgagccaccatgtggttgctgggaattgaactcaggaactctggaagagcagtcagtgcttttaaccgctgagccatctctccagcccctaacagttaattcttgatgtagcttgttaatttgattacaacaaaacagctgacatcatacattttcttaaagtatattccataaacacttcttgtatgagatcttaactgatgttaaatggcattatggtttgtggtttgaatgtgaaatatccccacaaggatcacacttgagaaagagagtcaccggtggggtgggggtgggagttacggctttaatagccaaaacccacttcctgttcatgcactctgctttcttttgagggatgccatgtggtcaggagcctcctgttctgccaccatgctttccaggtctgctgccacatcttcctcactgtgacaaactgtatccctctggaactgtaggtcaaagtaaaccctttctcccttaaattgttcctgtaggagtattttatcgcagcaacagagagtaactaaggcaaatgtaaatattagtcatttagaaaatgcttaactcaatcaaacttctaaatatcgtgcattgccttggtgttttgtgactgtctaagagggaatacaatatgaaaatacagtattatgcagtgttttccaaatagacaatgtcttattttcttctttaaaaacctaataaatatttgggcctgtgagatagctgagtgggtacagatgcttgctgctgggcctggcaatataagtttgaaactgagacccacgtggtagaaggagagagccaactctttcaagttgccctctactcttcacaactgtgctatagcccacatttgcccacatacacacacacacacacacacacaaattaaaagctatcatgaaagcactatttatatattatctcaattaaaacattaacaggtgtgtgatggctatacttgatcatcaccttgacctcatctggaattaactaaaattcaaaagtccgttatctttaggaggagaaaacacacctttaacccaaatctagtctgggtcacaccttctgctgggagtctatataagggagaggaaagcttttgttctttgcctgcttgtcctccccttgctagcaagtccattccttcattgccactagagcctacttcaggatcccagcatatgctgaagaccagctgagacatgcagttttgtggactgagtgcataactactagattcttggactttccattcatagttaaccattcttagattagctggactgcagcctgtaagccattctaataaattccctttggatatagatctagagatatagatacaggtccattctatgagttctgttactatagagagccctgactaataggtactctcattaacttgatttagacattagaaaactatgtacccaagttaggtaactcatttatccaagattacatagtatatactcaggatcaggttagaatgcagacctgagtgactgcttctcctctaagctctactgtaacccccttccttctctctcatagataatagctactgtttttgatagagaacaagaaggatggatgatgagcctctaccctctctgttgtaagggcaccttgtacttgataatacagtaaggcatctatgcatatttactatgaacagctcattgggaacacactctaatggttgtctattgagtagccccaattcaggtgacacttcacgaggactgtaaaacccagcttcccacagagatgataacaaaggcaaactacagaaaatagagagagaatctcaagccagaccagaggggcagagcctgctctagaaccctgaccgctccccttccatgacaagcttgctggctatagattacaggagagataactaactctaggagccaattggttgtttctcagactgtgagttctctacatcaagtacatctcaaagattcaactggaatgtggacggtcatcgtgaactctcatgttctagttgtattagaagaaaattctttgggaactgtggtgctgtatcccacagactggactgtaaacaccgttgcttatcctggcccttagggaatagcatacagaaagatccagagcacttcaaaattgtctatataactgctaaagtttttgaacttcaatatgtagtagttataatattcttttctgtttttatgtaatttaatcaattctctataacattcttctctctgcccttccaaactacttaaaattactcttcaaaatacaaatacagaaaattcttaagacttagtagtcttgagattaatatgaatataaagagaaaaatgtcagcctaatgatttatctattgatcactgctctgtttggagaaaaattagagggtaaaccacctaaacagaatattttgtaaagcctaaaaatcacatatgagactatttcattttctagtacccttttttacctctctctcaactcccaggatatcaagtgcactatatcagaggaaagtataataaacaaacaagcaaacaaatccctgaagacagaagctgatattaaagcagaatcatataagaaagtaaaactacttggaagtatccaattaaaattattatagcagaaatataaatgggggaaactcacagggccccacccctagacaaataacaggcaattaaggaaagagagcaggaagaataatctatctcctggggagaagcctattaattggttatcccataccaaatggttagcatttaaatcatatacacacgagaaacactagacagactcagcaggttataattacatgtttatgcatatacatgtaacaacaacaaagaaaatgagctgccagatttaaaaggaagcaggaacacagtgtgggagaggaggggaggtgtgggaggagtcagaggaataaaagggaatagggtgaaatgatgtaattatattttaataacaaaagtagaataaaatcactatagcagaagacagtaagcactgtaccccaagtcattccgagccctcaaattctagatctagaaatcacctagtcagtttttaagtaacttatttgtgcagcattttcttttgctcttaaagactcatttcatttttacttctgtgtatgtgtgtgtatgtctgttgtttagcacaagtctgtgcaagtatcctgcacagaccagaagctgaagttacaggtggttgtgagacacctgaagtaggtgctgggagctgagttctgcaagagcattaagcatcttaaccgctgagccatctctagagcctaccacaggtttttaacaactggctcagagaaatgtttgcgtactttgtctatcgtggataggaaacctctactagaattctagcttcttctgagtcatttcacgtgatgcattagaggcttggatttttcccttttgcactgtcacaatcatagtatactctgatctatatatctaacattacaagcacttctttacactgttattcctcatcaaaactagcttataattgtttgattataattataatatttgaaatatttaaaattcagttataaagagctcatttctaattttcagacatctaaataatatcataacaaaaatctttcatatttggggtcatagtcatatgaaaaataagataacattctacttggaaagattgcctctgaattccacgaactaactgaactgtctgagctgaactgagcacaactgcactcaactaaactgcactgaactgaactgctccaaactgaactaaactattctctctccctccctgctctttcctgactgttccttagcctctccttcctgtctttactgtgagaactgggcatatcctatctctgactcattccttcaagtctttctccgatttgtcactttgtcggtccatcaattagatatcattgactggaatcaaaggtatgttctaaatgagtgtctacattccagccagagggaccaaagatgtgtattaccaaattccagctggatcatatctttgggtgtgatctcttgtcagagtagccatgttgctcaactaaaattcctctacaagaattgattgcttctgggctggccagatggctcaacaggaaagagcactgacttttcttccaaaggtccagagttcaaatcccagcaaccacatggtggctcacaaccacccataaagagatctgacgccctcttctggtgcatctgatgtcagctacagtgtacttagatataagaataaataaatctttggacctgagctagcagggctgaccagagcgagcagaagtcctaaattcaattctcaacaaccacgtgaaggctaacaaccatctgtatagctacagtgtgctcacatacataaaatatataaataaatcttcttttttaaaaaagaattgattgcttctgatggaggtatggctagggaaggactcagttttctttaacatgagatccaccaggattttgaccatgtaccggtgagtacatgggtaacaaaattgggcttgttttttcttcttctttgtcttcttttgtggggagagaagtcctaaagtgggcaggataggaaagtggggcttgggatacacgatgtgaaatccccccccccaaatcaataaaagtattatgacaaaatataagccaagcttagccatgactttccagttgaacagtgcaggtagagtcttctcagctaccactgagagcacagatcacaacttggcaactgctcacacacttttatagacaatatggtttctttctaagccggaagaagttaaaatttagatcactatttagaattacaagctccactagacaaaatgaaaatcaagctcaaaatctgaagaagcaaatgtcataaaaggctggtaaaaacagttaatttagggcaagtacccagaatgtttaagaaataatagcaaaatggataaggctaggggataatgcttaatacttctattacccatgacagtttccaaattgaagtatcaaggtataaaaataaaaaacaaagaatgaaagtgcaagcctaataaaacttttatcttaccgttctaatttgctgtagagtgcacataacacattatacttcttcaatagtcttgacatagcattatcaaccttggtactggtatcgatttcttttaataagtcaaagaatttatagacactacaaaaaatagaaaaagtgcatgagtagctatcaaaatttgctttatttaattttcaaagcatgtgcaattcaattcaaaagactgccagctctacactgtgtattctctggaagggctctatttggttttgcattttattagaagcaacccaggccctagtatctacctaccccaattatatttatttaaagttaagaaaacaagaaaagcaggggcatgaaatatgtacatttgtgtttctaaatataaatgtatgagctttttaattaaaattattatcaactgatgcataaaagcccaagaactatacattttagggaagtagcatgtgatgttttcacacgtgtaaacactgcataacaaagataaacataccaatctcctcaaacatttattacttgttcaaagcaaaaacatttaaaatacattctttcagagttccgcaatacattgtacttaaacactacacagccatctgtatctgtatgttttttcaaaacatatagtttattctagtgcttccattttcatatttgaaactctgtccttcttataaccctaaagccttccagtctccaacaaggacaggctgacttaactgcacactgtcccctccctcccccatcaggctgccctcctgtactatacctctctacaccaagtgcctggtctctgacactgcattccagacagcttgtgcaggactgctctgcccatgtggggctgcccagcccatgacgatgatccccaccctgtgaatgtctacctcacctcgctctgataacctttctcaccacttggcatttccttgtcatagacacactaacatgctttgccttaccaaaagcttcatgtttaaatagagaaagaaagtgaaaacctggctaaaattttacattgttaaacaacttctagtaattctaaaagttgttttctataaaattaatcttcaatatacatattttcaaaagggcagtaaggcagacatgatcggatagctctcatatatccattaccatctcctcctactcttgacaaaaagtctcatactcctggctggcctggcatttgctatgcagaccagtctggccttgaactcacagagatcagcctaccttacaccatcacatctgacttcatatattaatttctaattgactttgtatatacaattgtacaaaagcagctaagtagagcaaggaatagtcattacaactattataggctgtccaaagcaaagccaggtaagagagtacgtgtctacggtcccagacctgggagtctagaaagattacttaagaccaggagtttgaggcagacctgggaagtacaaggttacacctcaaaccaaccaaccaaaggagcccgagatagtcagcaggaggcaaaaatccacataacagaggatattacaaagtgttcaggccaagaggggtaaagcagtgctgatagttacgtggacagtaaagaaggatgcagggatggcagaagacagcagagatcaagatgctgactggaaactgctttgaacttccatcaatacagtttagggagttagtgagaaatgctaaagttaggttaaccatgaaggactgggtcagagaatgaactgttatcctctcatggggcctctgctttacatttatttatgctgtattgatgagaagggaagagagagagggtgagagagaaggaagaacagaagagttcatcatgtaaatgtgtagaatccagaaaaaaagaaaacctcggagcagtgcgtgtgcttatgaggggtaccccaagcgtcgtgggaggggccgagcaccacagaaatgaaacgaaaatcctgaaacaaagttgtctctttctggggtagtttaagagaagggatgggaagtcagtgcctgtggtattagagacaatgactcttgtgctatttatatgccatgtatgtatgtatgtatgtatgtatgtatgtatgtatgtatacacacacacaaagcctttgttttcacactttatttaaaggtagtaaaaaagtgctataaatgtaatgatttaatctacttagtttagctaaaatactaattatgttgaattatagatcaactcactgaagatatacatctatttaccaatctggtaaaattacttactgctgtattttgtaaatatgttacaaaggaaataacattatgtcctgtgagtttaagatgaaaatctacaagttactagagaacaaattaataaagtttaaagctaaaaaatgttaaatgcctgggtcaagtgtcaatcaatactgaatatatggcagttttatgtgattatgtaattaaaacatccacgtacgctaaagtcttcaacttaaataaattttatctaaatttaaaacagccaccttaggccgggcagtggtggtgcatgcctttaatcccagcacttgggaggcagaggcaggcggatttctgaattcaaggccagcctggtctacagagtgagttccaggacagccagggctacacagagaaaccctgtctcaaaaaaccaaacaaacaaacaaaaaacccaaacaaacaaacaaaaaaaaaaaaacccagacaccttacattttaaaagatttttattttttcacttctgtgtatgtatgtgattgtgtgtgtgtctctgtgtgtgtgtgtgtgtgtttgtctttggtatgttcaggtgcccatgttcggtccctagcacccacaggatgactcacggtacctctaactccagctccaagggctctgatgccctagcctggcctcttcaagcattgcacatggtgcacttacctgtaggtaaaacataaaataaaaaataataaattcttaaaaaaatactgcccccaaattaagtaagcattaactgatcccagcagagaattaaaattcattattggtcccaaatcccttatattaaatttaattttagcatttccaccaacttcttaatgtgaattaaaactttagaagccctttttaacttcaggattttcagtcagagcttttacctggtttctatgcttttctgtagctcagtaaaagtgaatggcatctcatctagatcaactgctgcgataaagatgcagatgccccagagttccttcttcttttgaatatatccttcctaggaataaaaaggttcaagtattttattaaatcatctgcacactggataccatgttaaaattgaattacaaaggattttttcattaaacataaaaatgtaattttaaattcttataatggcatatacttgaaaatatttaattttacattaatataacactcaatttttattataaggaaaaaattatgaggagattcaaaaagttaaattactatttcctttggaaactttgagtaagctagttatttgaaagtttgttttcttagtagtccaatatcattaaagccacattaaaagattctaaaattttttaaaacttgttttttccaggaaaacaaaagctgacttcctttcagagtatacgtatgtcttttgctctaattcatccatttttttccctttgttcagtcaagaattttctgggcttgtgcaatttctcaactaagccacctgtacaatggattacatgcatacattactttacaaggcttaaatgaagctatgtttaaacccttgaccatagcccagcactcatttagtaactgatgagcaatgagtaacactgtaggtagagtatttttcagtataccccctcaatgaaatatgccaccctctaaatgtatgttttgtaggtaaaatctggatcctattgtgtcagattatctctggtctaataaggagatagaagcattgctgaggaagcagatgtaaggcattttacacactatgtgcatctcatgtaccaagggaagaatgagaggatctagagtatcaaatgattgtgggtaatcaataattcaccattgtccaactataaacttttccttctaatataaatactttaaaatataactatacatccaaaatagtttaaattaaaacaaattacaatattgatgattggtaaggaagaagtggaatgagacaactgaatccagtgacaagtggtaaaatgtctatgatcattttgcaaaacaagtttggatagtttttatgtatttaaatatacattttctatatcacttagaaattctatccccaatacttatgcccagaagaaattaaaacactactaatgaatataattccaaactagaaaccaaccaaatataatagaaatagaaccaaacagaaataatcaaactgttaattctataaataaactgtaatagaattatgcagctgatgctatctaacaaaaaagaaaaggccctactaaatgtagcaacacagataagtgaaaattattacactgagaaaaagtcacccaaaaaaggaaaagctagacacaaaacagtagcacagattctgtgcacacacagttccagggaaggtaaagccgtatttaatgtcagacactaggtaagcactgctcaaatcacgaggtcaggtgccagggaatgaccacaaagaggggaagagaaccttctggcgtgctcgggaagctttcatccttgctggtggtcattatatgggaatagatctccatcaactcaataaatttgattcagaaactgttacgtatatcctactactgaaacagaaatatatatatatatatacacacacatatacttatgtatgtatgtatatatatgtatgtacgtatgtgtgtacgtatgtgtgtgtgtatatgtgtgtgtgtgtgtgtgtgtgtgtgtgtgtattgattcagcattacaatgataattatatggtctcagaaaataaaaacatcaacttttgcctgtttttaaatttttttgagattttgatataattacatcatctccccttcccttttctccttcaacccattccatgtaccctcaccccattaaattcatggtctctttttcattaactgctgcaaatgtgtatttatgtgtatgtctacctgtgttcctaagtacataaatacctcctcattttgtactttaactgtaagtgcatgttttaagggctggctatctggccctggatacccattggtgtgctcttccctgggagagactacctggcccgcctcagcattccttagttgcctgtagatctgatgcagggttggggtcctgtgagcttctcctttccatgtcagcatgtcttttggtgtcctccttgttgcctatgtttcttaataaggctaatttcttagaaactactaagatatgacagctgcttgctgctataactccttaatcctcacttctggaatttttaagtgtacttatctcacttcctctctgcttctttgcccctagccacctaccccctgttgaacataactgtcctcgatagacctgcctatagctactacagccttttctaagaaaactctcacactcacatttttagtaactaaaaccgacaaacattattatactgtttattcattttttaaacactagaaaaaggtttttgtgtcatgctggaaattgaaacccaggcctcacacataccaggcaaacaaactaaaagtgagctacatccccttccctaaaagcctcaaattgtattagaataaagccctacaactgaatcaatctctctatgtctctctctctctctctgtgcgtacaagtgtgtgtgcgggtgtgtgtgcgcgtgcatgcgtgcgtgcgtgcatgcatgtgcgtgtgcgtgtgtgtgtgtgtgtgtgtgtgtgtgtgtgtgttactgacccttaggcctgctgcttgcgtgtgtgtgtgtgtgtgtgtgtgtgtgtgtgtgttactgacccttaggcctgctgctccagctagactgcctagtcgtgtgtgtgtgtgtgtgtgtgtgtgtgtgtgtgtgtgtgttactgacccttaggcctgctgctccagctagactgcctagtcatgtgtgtgtgtgtgtgtgtgtgtgtgtgtgtgtgtgtgtgtgtgttactgacccttaggcctgctgctccagctagactgcctagtcatggagctggcctctcccagcactggggttagtgttccgtgcttggctatgggtactctgaactcaggtcttcatgtgtatgtagtaagggttttatccactgactcgtcccaatctttcgttttcttaaaggtgtacttcacagagaaagagtgtttaaattttcactattttttttcttttctggttcagtttttagtgatgctatttatgaaacttatctctaacacagttccacactgatttcttacatgtcctgctctagaattttatgtctagggttcatgtgaactaatttttctaagtactatgagacagaaaattctttaaattcatatttgttggcaatccacatcacgctggtaaaggtttgagtacaacgtggcagaaactggtcctctccattcaccatgtgggatccagggatccaactgcgggtatcaggtttggcaaccttcacccactgagccacctcccaaaccctgtaagtgaagtgtcacaaacagatagccagttggtccagcttcaaggttgaaaagaacaggctccctctaccgaattacctttgcgcctcgctagaaaatgaacggacaacgcatgtgtcctcgtgccagtgtccatgccgccctcatctacggatcactggtctttttgcaccaataccacaaggtctccattagtatagctttaaaggttctggatatttttaatggagtttgagtcaagatttttctgtcagcttccccagaaatgctatactttaaactcatagttttaatttctattttaatgctatggctgaagagtcgcactaagtttttctccttcaacctaccactgtgagccttttttccttacttctaaagtcctctaatatccttgtgctctttcctgtatctctgtgtttaactcctacccgttgctatccttcctttaataagcaccccgcccactcccacagccctgccattatctgcaaacagagggtccgcctctcttgctactttgtagcacagtggctctgggtagctacaggatttatttccaatccaatttacaactaaattgaaaacaggtttgtttttgtttatttgttttgctgtaattgcataaacctttttataaagaacttgcaaataaaatgtttttcttaaaaattataaaaggaaggctggaagaatagatcagaggtcgtccaaagtgtacattacttggttagacaattcaaaatcggttcctggcacatcatcagggggctcacaactgttgatctgactggcacctgggatctacagcttgcatgagcacctccactcctgtgcatgtacacacaagtacacataattttttaaaaagcttaaaaattattaaagggagtccaaaacagcacttaaaattatttacaaaaaagtaactatttctcagtgaaatcacacacaaaaaggtaaaacttgtggaggaagtgtgtggaggaagtggactttgcaaaactggaaaaaaaatcttacctttcaaaaaccagattcagcaaatgtcaaatcttagaataatgtcaactgaacaatacgctgccatgatgttttgagacattcagttgtacagctaagaatccacccagtgaaaataactggggagctgggacaagatccttgtaacagatgttctaatagctacttacataccccataacagtggggtgtctaaatatcttaaaatagaatggctaaacaatgctatagctgaattatggggttacacaaaatcctaagacattttcaaagaccagaacaagcacatgggaaatgcccaaggtacaatgtttaagtgagagaaaaaaatctacaaaattatttgtatttcttgattccaattttgtaaaaaaaaaaaaataaacaaaaagttaaggaaaggattataatatatctaaagtgggttcttatttctagagctattaggatcataatcaactttcattttcttcattaattcaagatatatattcctaattaaaatcaactgcaacaaagaagatgcaacagtaaaaactgctaaatttatgaaaagcaggatagaaaagtcagaaatatgataaaattattaaaatatcaaaacttcaattatatattaacagtttaaatcaaaatatacagccaacactttacatggctatctgctatgtgatttaatgttcctctgaaccaccttaaagacaaccccaaatcagtgacaatttatttgagcttgctttttgacaatgttctcacttaccaaagagctccaccaagtggtgacagtaagtatcactgcagtgtgaaaaacctaacaactaaagctagctgaacataaatctcagctgtaatttcacaaggtaaaaaagtcttatgagattggcagcaggaaaagacgctcttgtccaaagccgatcctttgacttttatatccagagctcccatgtgccatgacatgcgtgtggaaattgtcctctgacctccacactcaggtcatagcacgtatgccccttcacacgcacaataagtaaaatgtaatgaaagtaaactactagcacatatatggaaatatgtactcttccaggcaagaatagcaaggttgcattaagcattgggtgtgcaatagaaagtcttgaaacaggagagctacttctttctatgcttgggtttcctcttcacctaggttttatatatgaacaaaagaaatacgatactaatatgtcaggaaactcatcctacttatacagcctgagctggcagcagtcagtatttaaggcattcttgactatgcacagaagatgcaggagtggcagagtcacaaaggaaggtaaaggctaacccacttcactcaatcacagtcttttggcttgtttttaagtttttgagacaggatttttctgtgtagccctggctatcctggaacttggtctgtagagcaggctgacctccaactcaaaagattggtctgtctctgcctcctgagtgctgggatcaaaggtgtgtgccaccatacctagccagctgcagcttttgtttttgtgtttttaaatttatttatcttagtcttagtctatgtgcattggtattttgattgtaaggatgtctgtgtgagggaataagatgccctgggacaggaggtgcagacagctgtgagctgccatgtgggtgctgggaattgatacctggtcctctggaagagcagcgtgctcttaaccactgagccatctcaccagcccgccaatcagttttaacaagacacactggggtagagagcaggtgagttaaccatctagttgcatggtagatttgagtgtggagttagctctactccaggaaaacatggatctggaaagttcaggcttacctgaccctatgatgaacaaccaagattccttccttaaagactggatacagatctcagtgttacagctcttccttgtctgtgtctgacttgcttgcttatttttacctccatctcaacaaatttataagtgtcttgaaaacagaaaattctaatttctattatacccccccagagtctaatacactactcagcactaaaatgacactaaatgcaaatattttaaagttataacaacgtctatgccttaacataggatatagtagctttcagattttccttttttttttccttttcccttaacataatcagaaaagcaagtagcaatagaatcgcccaagaaaaagactgttgattctaccctggtttctttagatctcatccacattctaatagcaaatcaattaattgcttatccaaataattcaaagaaatgactgacaggcctcattttctatacagggtacataactggcctagaatttagctcctaacattcactcatgatttaaaaaatatctagcaaactataaattaagaggtatttcctcaacttaataaagactatcctcagaataccagctgttaaatcaataatgaccaagctacactctatagaactacagaggttacgtacaaggtaaggaattaagggagagatggatagacctccctaggaaagggaaacattatcattatggggggggggtgggcaggaccaggaggatcaaatgtagagggagatgaaggaaggaatgtggagagaaacaaccaaaattaagggctatttgagagatagtatagaaacctaatacagtagaagctccctaaaatatatacatatacgaaggtgatttaaataaaatcaccaagtaatgagggagacagatccccaagtggacatcctctgtcaccaaatgaatcttccagtaccaagattgggttacatctaattgagttgatgtaagttgagttggccaaaggagtgccatgggaaccccaaacaacccatattgttgccaagactataggttgttcgtcacaaactgatagcaaggccccactgctgaagacaacacccacacaacccactgaccatggagaagttgagctggtgcctacataatgtcttcatccctacagtctagcatctttgctataggaaggtactctgcactaccaaaagagaaatgtaaccaccaactcagctacaaactgtttgatctacaatggtgtcctacctacaagatctgctagggcaatggtggcacaatgtttgtttgagtaaccaaccaacattcgatttgactgaaagcccactccacaagatggaacctatgcccaactttgcttgaatgactaagaacctgagattagatagctcaagctcctaggataaaaccaaatgttactattccactaaaagagtatggcaataaaacaaagctactaatgacattcgctatacttatatatcagtgccttgctcagccattttcagggaagtcttctcttacagcagatgagaaaaatacatagacccacagccagacatgatgcagaaagtagaagaccttggaacactccaagggaatgtcctaaatgggaagtccccatcaatctctcccctcagggatcatgggaccccacagaagaggagacagaaaaagtgtacgagccagatgagttggaaggtcaagaaaagagtaccctctaaatcaccatgatcaaagttcacataaactcacagagagtaaggccctccatgtgtattttatggcttccatttcagtatttttattgaattcctgagtgaatgaacgagtgggtctctgactcttgtgccttctcaggctatgttccctagagctgaaagaaaaagagaatacatgtccccatccctaactcagaagcaatatgcagctgatacctacttgccaatgtaagtgtaatttcctctaaggcactcactctcactggaggaaacaaactcctcttaaaggtaggctgcatgctagcagtaggtgccaacagaaaacgactcggtaatcactgaggttctgtgtctcataacatcatgccaaggcttctctatttctttccttttaatcttattgttttattttatttcacttacatgtttctcttgttttaccccataggtcccttattatggctcccagtttagtgtttttatggcgttcctgagtgagagtgagagggtctttgtctctcgtgccttctcatgggctcttttccttctgtttgtttgttttgtccaattctgatgtgttaggtttttttattattattattatcccttagaagcctgtttgtttttttaatgagaaaggaaaggggtgggtccagataggaagggagatggagagaaactgggaggagagagagaggggaaaccttaatcaggatatatatgtgagggggggaatctgttttcaataaaaaggggaaaaagaatcttcacagaaaatctatagctaatatatttattgatgagagggtagaaacatggtatcagcattatcctttaccacacactgacatcatacagaattcaagaattaatgcaataaaacaaaaagaaaaattaaaagttgtttggactgagaagaaacaaaaatgcctttatttaaaattattcaatcatttctacagaaatccccaaagactcaatagagacaatgagatctattaaacattctaacaaggatacaggagacaaggttagggcacaaaacccaactgctttgctatatcccaacaaatagactgcaattaaaaaaaaatacaattaagcagaatgtggtgcacatgcctttaactcttgatttttgtgtgtttgcatccaccctggccatagtgagctccaggccagtcaggaaggaatatatatacacacacacatatatatatgtgtgtatatatgtatattatatatacatacatatgtatgtgtgtgtgtgtgtgtgtgtgtattacatgagcatctaaagtggaatagttagatataaagctaataaagtctatacaaaatcagcctgaagggaaccataaaagtctaattaaaaaataagagacctaaataatcaagaagatctataaatctaataaaatgattctaaaatcaacaaggcattatagtgtgaatagaaatgtcccccaaaggtgctttaagcagggcttaatgagccatccaagtaagagcatggaaggcagtggtgcgaagggctgtagggacccagttcaagaagcttcaaagggaagcagtaagtgacacaaagaccattcttgtgtcattttgaagaacactgtggtttcttttattgtccaaaaaagctgcctgtgctaaactgggttaatgatgttggcagaaatttcaagagagcttagtactgactctgtcacttggttgttcgtggtcactcttatgcagatttataatgaaaagatcaagctgagcaaggaaaaatagaaaaattatagcttgaggagaaaaggggagcatcaggaaatgaaatgttggtgccaagtccaatgctcaaggagataaaaaggtttaaagaatagcctgatgataaatggaatagcggaaactctaacctcagggaaagatgccaaccagctaagctttcaacctgtgaaaaaggaattgaagaaagggcttaagaagtgaaggaacccatcaacaacagaagagaatgtagatgtaactaaatgaggggagcatgttccaagcccagaagcagcagaacttggccgctccagccatgtggttctgactttggagtcaagagtacaagaaaggggttgtggaactcccccagcagctaaggaaagccactaaagctacgtgtgcaccaggggtgtctctgtatggaagcctagagaggcaactgcttgaagttgtaaaggtgaaacctggattatcctagaacacccaagatgtcaaaaatgccaagttgtgggacacctgcctaggagagctggatacagggcatggagccagtccaagtgaaagaagtatgttgtcggcaagaaacctgaaagttgctggtgatctgaaaggcactttgacatcagaggtgcagatacaagacttggagactgacgtgatggctttgttcctttggcccagtattttctcactactctccctgtcttcccttttgtaatggtaatatatattctgtgccactgtatgttaaaagtatgagatatgattttttattttgattttatagggattacaaaattttccatgagtctcagaaatgactttgaactttggacttttaagcagtgataatactgttttgaagttcaactgaatggattttttgcattatgatgtagctgcaagcctatgggacctaaggaatggaatgtggtagttcgaataagaaagcctccacagactcctatatttaaatgtttagtcatctgggaatagtagtacttgagaagataagtaagtgtggccttgaggtttcagaagttcaagccaggcccagtgtctgtgtctgtctgtccatctgtctctatctcttccgcccgtgtttgcagacagaactctcagctacttctctagcactatgtcggtccgcatgctaccatattctccaccatgatgtaatagactaaacttctgaaactgtaactaactccccaattaaatgttttgtcttttaagagttgccaaggtcattgtgtctcttcacagtaataaaagagaggctgagacatagagagacagcaggaaatagagaggccagaaatcaagatacacaaccgcagcctagtataataatagtctttgatgaagacgcaaaacacaataccatggaaagagacaccttcccaggaaatagtgccagcaattatacatcttcacacacacacacacacacacacaagttccagacttagccctcccatatcacacaaaactagtaacaatggctcaggaagtaggaggtaaaggtaaagcagcaaggctagaaatctggcacagtgctagctgagtgcttcccacagcgcacagagctctgggttccatctccaataacacacacacacacacacacacacacacacacacacacactgcacaagcttggcacggtagcataagctataactcctggcagtgagaagaccggagaatcgggagttaaggccagcttaggctgcacagtgagtgtgaggccagccgaggcgacttagcaagatcctgtcttgaaaccaatgcttgggagctgcgaagatggctcagcaagtgaagtcatttgccatgaagcatgagagcccaagactgactcccagaacccacattgaaaagccaggcatgatgctgcgtgcttgaagtcccaaatgacggaggtgtaagcactgactccgagctccctggatgccagtcttaccctagtagggaaattctgggccaggctcaaaagagaaggtaaacagagcctaagtagtgagtgatacccaaagttgaccttggggcctgtatgtgattacatgtgggtacacacatgaatgtataaacacatacatacaaaaatgtgtatgtatgtttatagcagctttactcataattgctaacacgtagaagaaaccaaaataccctttggaagtagaatggataaataaattgtggcacaaacagatgacaaaatattattattcaacactaaaaagaaatgatctaccaaatcattaaaagatgtggaagcttaaatgcatattattatgtgagagagcccaactgaaaggttgtatactgtttggctactatattacatcctagaaaatgcaaagcaatattttttgtttatttttttaaagaacagtgattactacaggttgaaaggaaataggcaaattcaggatgaataggcaaagagtatttgtagagcaatgaaagtattctatatgtactataatcgcagacacataccattagacatttgtcaaaatcaacagaccatttaacataaagaacaaaccctcatgtaaacaccatggacttagaagtaacaaagatgggcaaatgtaaactcatcaactaacaaatatactaatttgaaaggaattttaacaaagaaaaggcacaaaaaaataagtatcaaaactagagtttggcataacacaattaaaaagttggggaataattaaataactcaagacacttagagactaagcacagaaggactcagacccctaaaagacaggaatcttaagtgtgagtcacacaaatgctcaaattaacttgctaagaaacaactgcaacagcagaacaagcagtaggaactagagagcagttgctcttcaagaaatggttaagcagagctgggagtacacgaaagtggctgtggtgtgaatgccctttatcctgtctgaaactcttcttgaaatctgaaggctatcatgacagtaatgggggattggaacattaagacatggttaaggcactgaagaaataattggcattaccatgggaatctgtcctactgtgatgggtccatgtctgagtgagcgcaagagccggttcttagaaagtgaagctgtccctcaggctctcttctgcctgctccagcttcccctgctttttcatcaggctaagacacagaggatttcagacttttctctctagaaccatgagccaaaataaatttctacaggcatacaggcagacctgtagagatttttgtaactgtggctactttctctacagcaagtctactggcaccacagttccaaaacaatgtgcttgctctatgcttcattttgattgattggtttgggttttttgtgacacggtttcactaggaagtctgaatagaaatgggctcatatatttgaatactttgctcccagttagaactacttggaaaaaacaggagctgtggctttgttgggacaaagtgtgtcactgggggcagcctttgaggcttaaaatgactcttaccctcccagtgtgtctgtctttgttttgtgtttgtgtcttaagatgtgagctctctgcatgctccaatgtcacatctgtttgcctgctatcatgatgtttcccaccatgatggtcatggacttttaatattttgaaactgtaagcccccaacagactttcttgtgtaagttgccttggtcatagtgtcttatcacagcaacagaagagtaaataatgaagaaaaaacccaagccaaccttaaacttgtgactctcctgcctcagcctgaatgccaggattacaaatgtatgtttctatatccagtttcattttttggtcacattttgataactctcataatacttggcattattttcattattactataccttatggtgatccacagtcttatctttaatacatgattataactgtttcagggagccattgagttatacccatataaatcaatgaacataataaatatgtgttataaaatccaacatactgttccctcatctctctcttaatctccttatgagcccctattctgtgagacatgaaactgaaactaggctcattaataagtatatactgtttttgttcaactgaaaaaaagtggcatgtatctcttattctaaccccaaactattagacttgagaagtgtgagatagacactcttaggtgtcaacctgactacatcttgaatctactaaaacaaaagcaggctgtatgtggtacacaggcttttaatcccagcacttgggaagcagaggcaggcagactgatgtgagttcaacgacagcctagtctacagagcacgttccaggatagctagagctatacggagaaattctgtcttggaaaaacaaaataaaatataacaacaaaaccacaaacagctgggcacacctctgagggattttcttgattggatcatttgagatgggagggtcacactttctagtgacagcccacataaaaggacatggaacagtaagttttggggtttgcccacttgccctcattcatcctggcaagttgaaacatgtatcctcatggactaaacaactaccaggttcagcctttcctttgagagacagccattgctggactaaccgttaacaaataaaacaaaacctggatgacagtatgcgtgcttacagcatggtttattaaatagtagacgcctgctgttaaaatctgaagacctacagatgagaagagaaaaatctttaaaaatatttttgcttaactgaaaatgtacttgaccaccctagggctctaaaagagatgtaccaggtaatattgttttcatgcccactggattaaaattccatcagcagtataaatcaaggaataattctgacttctaaatcaaaatttaagaaacattatgtaagtctatagctgccatagatattgaactcttgaacacatccacctgaacccagactgaagttgctttacctccttttaactatgtgtgtgtatgtgtgctcatccacgtatgcatgtacgaaggccagagatggacactggatctcttcctctgtcacctctaccttattcttctgagacctgttctcccgctgagcctggagctggccatttagattaggctggctgactaccaagaccccaggattcatctgtttctgtctctcaattctggggttacacataagtgttgcagctgtgtcaggagttaggtaggcaggtgtaaaggagacaactgaattctcacatttgtacagcaaacaatttacccactgagccatcgagatggtttgtcttttaagtactaatcaagtgccaattaaaatggaatttctgattgaatttgttcttgtaaccatttcatacacgtgggtagtgtactctggctattttcatcctccccttctcatttccctccgacatccagtacacactccctcctggccagtccccttctcacactcaggcccttctgttttgttttgtaacccagcgtttaacaagggatgccagtgcaacctgagtttgctaccattcactggagcacggtgaactcatcacgagtacacaactgaagacagtgtcggcccctccccaaaaatccatcagtagctcatatttcagcagggaggggtaaggccaaatgggcctctcaccgatctatgactgactgttgacaagcccaggcctgtgcaggcacactgatggcagctgctgccactgtgagatcatgattgcattggctgtgtcatgcccacaaggtagtctttcaggataagatagaattttggttttttgttttgtttcttttaaagaacaaaaactatgtagagtttgactcaataaattaccttgcatatatttaatatgtgttaacttatttatattcacaatgattccaagatctggaaattactgatagcccattttacgaatgagaaaaccaaggactggacatttaaggtcatttgctcaagagtgtggcgtcaccacatgctttatttcagacttgaaacagctcattctgactagaaatcttaacccatcctctctcaataaacaccatccactttcaaatgccaaaaagggttcccccaagttacgacatttctcttgtttcagagaacagacaactgggaccacaacagctgctttgcaaacaggttcattctgtctttgcatttgcttctctgaacacattccatcattcttaggccaactctcaacattaaacactcgcatattgtaaagaaagggtttgttgaattacagcaggacaaaagaatagtcttccacacccttcaaaatgtatcaagtcctaaaagtaacacaaagtcctctattgtcctcttcccccacacaaccaggaataattcatatattctaattcctatcatgacctccactaggaagtaatattttaaattatgcagtcctacggaaaggtaggaacaaagccaggaagagaagggggtaaggcaagaaagcagtcacatttatttgtatatatttaattctacagcccaaaatggtttctgctactaatcgaacctttatacactgctgatgggaatgtgaactggccgagccagccttaccatatgatatacccattcccagatagacacccaaaggacacaaagtcagtatactacagatacccctgcacatccatgtttacagaagcactggtcacagtggctgtaatatgttatcagtctatatgtctgtcaacagataaatggataaagaaatggtatgcatacacagcagagttttagttaacaaaatcatgttgtttgctggaaactgagtcatcagataaagaaaattaagtcagacttagaactataaatatcttatattttccctcatttgtggatcctagattttacatacacacagaaagctacttgtttatatatacttaatgagagatcagaaagctgactaggacagtaaaagaaaccaatgcaagaggggagcaggcagagggaggaagggagaatagtgagggttgaacagtctcaaagaatatgacagacttgagatacattatttttatgaaacccattaccatataatgaatatatagcaattataaaacaaaggctggccagcaaggtgtctcagtctaatcaaagtacttgtcagcaagcctgacattctgaactcaatccccaggaaaggcccatgtggtagaaggggggaaagaactcttccaaatgcatgccacagcacatagcagccacccttaccatagctatagtatccacataaacaaaccagctttttattttattttttcaaggaataatagcttgtcttataacccaagtacctgggttatataaaggaagcttctagtttagcttaaaaatatttaaagattaccagtgtgtgtatgtatgtgtgtatgcataccatgtgtgtatggggatgtgaccatgtcacagtgcacgtagaaggtcagaaaacagcactgtgacgacaggccatcccttccattatatgggttagttatataggaactaactcagatgggttagttatataggaactaactcagatgggttagttatataggaactaactcagatcatcagacttctgtaagcacttttacccactgacccatctcacgggcctttcttcttcattaattttcttcagtgtgtatgtatggtatacacacgtatgtgtgcgagaaaccacatgcagagaacagcaaaaagaatcaggtgtcctgctctgtcattgtttaccatattccctggatacagggtctttcattaagcctggaggtgcactggcagccagcaaaccccacggatcctcccacctatctgcaccacagaagcacatgcacgtgtgtacacgcgcgcacacacacacacacacccacacacacagagagagggggggggggagagagagagagagagagatatgaggttacaggtgcaaaccgccacacctagatttctttaagttgtgtactggaaattcaaattcagatcctcattttgtacagtcagtactctgacccactccccaaaggaattttctaagtaaagtttgttgactattggttggtgtatattaacaaattatattgttgaggttaatgtcattaaccttgaacttcacattttctacataattccctgtctgttaagttctgtagtttgcagccaagtttacagaagtgattcacccagatgtctaagaaaggagggtcttatccttggagtttccagggaccattactatttgcatcaatttattttttgaagacattattattttacttatttttatttatgtgtaaggtgccttgcttgcatgcatatctgtgcaccaatgcatttctagtgcccacagagaccagaaaaggacatcagataacctggaactaaagttatagaaggttgtgagccaccatgtggatgctaagaattgaacccaggttctctggaataaaagccagcattcttaactgctgagccacctctccagcgtgcatgtgtgtctgtttaggggtatatacataactgcagttgccaatggactgagttacaggtggctatgagccacgtgacataggtctccacctatgtcttcttgagattctcaatgagaacagcagttcctcactctgaactgctgaaccaactccatatgccaccgtgcctgcctctatttgtttcaatgttgaacaaggatcattcaaagggtaacctggagactttaaatatactactttaaaaacatctaattccaaactaaagacactttctctttaataatcaaataaaaagaaataaagtattgagtagtcttaaaagtttgtaggttttgactcagtaaattagcttgtgggaatttattcaaagaaagatatcagagagccattaatttaattatttacaattatcaataacttgcttatgcagaaattattcttataaggatatgtcagcataaacaagttacttggaaaaaactatatatccaacaattaattttttaaaactccagtggttgttatattaccactagaaactctattaccaaataaagtttatatgttgatataatttaataatctaagaaaattctcatgataaagcatgcatggggccctgaacttgggcccagcactggataaacctctgagctaggggacacaccctataattcactcaggacactgctcagaaattcaaggtcacccttggttattatataatgagtttaaagtcaacctcatctttatgagtccctatctcagaaaaaaaaggaaagaaataagactcaaaaaaatcctagacaaactaattaaaaaaaaacacaaacaaaaaacagaagaaccaaattaaaaataaagatgtaaaggagataaaaacaggctctgatggaatccagaaaggaaacagcttacattcctccctcaagctcctagaaaatctagaagacatgcagcataaattcctagagctatataacctgccaaaattaaataaaaaagataggtgaggaaactgacctcagaaagcaatgagactgaggcagtgtaaaaagtttctttccgaggagaacccattgccaagggcgtcactgccacacctttaaacagcacctctcaccaccctgtgcagactgctccttgcaacagaaaggagcaggctctactaaactcaatctactaaaccaatactactttaatatcaagcctagatacagataagacaacaaaatgaaaaccatacaccaatttccctgcaaaattctcaatacaatttttgcaaatcaaattcgtaggacacaaagaaattcacccacacacgaccaaactggtttcatcccagggacacaaaggtaattcaacatacaaaaactgatatttaatataacccacacatacacttaaagacaaaaatcctgattatattaatagcagcaagaaaggttatgacaatgtttagcagcatcccttcttttttttttttctttttttttattgggtatttatttcatttatatttccaatgctatcccaaaagtcccccacacactcccccacccactcccacttcttggccctggcgttcccctggactgaggcatataaagtttgcacgactaatgggcctctctttccactgatggccaactaggccattttctgattcatatgcagctagagacacgagctccaggggggtactggttagttcataatgttgttccacctataggattgcagatccctttagctccttgggtactttctctagctcctccattgggggccctgtgatccatccaatagctgactgtgagtatccacttctgtgtttgccaggccccggcatagtctcacaagagacagctctatctgggtcctttcagcaaaatcttgctagtgtatgcaatagtgtcagcgtttggaagctgattatgggatggatccccggatatgtccgtctctagatggtccatcctttcgtcacagctccaaactttgtctctgtaactccttccattaagaaggggcaaagtgtccacactttggtcttcgttcttcttgagtttcatgcatttagcaaattgtatcttatatcttgggtatcctaagtttctgggctaatatccacttatcagtgagtacatattgtgtgagttcctttgtgattgggttacctcactgcatcccttcttgataaggttctgaggagaggctaaagtgcctgatttacaagcatgagtgccggacgcagatcgctagcatgaacataaaaaaaaatagaataaatgaatgaataaatgaggccaagcatgtagcatatatttgtaatcccattgttagagaggcaggcaggtcactggggctcactggccatccagtctagcctacttactgagctctaggcctgtggaaatctgtctcaaaacaaaaacagtgaagagagaaaaaaaaggaggaagggtagaggcacctgaagaaggacatactggaagctgtctctggcttgcacatgcacatgcgcctgcacacacatgaatacacacccacacaccacccacatgcgtggggaaacaagaaatataagaaacatctcaacacaataatagctctactcaacaaacctatggaaagcatcactctaattggggaatgactgaaagtgtttcctctaaaactggggatgaggaaaaggtgctcactcttactgctcctctccactataatgcttgaagtcctcgttagagcagcaaaacgagaaatgaaagggatgcaaatagaaggggaagaaagcatctctatttgccgaaggtatttgatcctgtattttaaagactccagtagaaaactcttagatgtgttagatactttcaacactgcagaatataaagtcaacaagcaaaaataagtacctttctacataccaataactaacttgccaagaaaagaaaagatcccattcctaacagcttcaagagcatggtgttacacaccattaatcccagcacttacagcagggcaggatctctgtgcttcaaggctgcttggtctacataataagttctagatcatttagaattacaaagcaagaccttgtaacaacaaacaaacaagacaaaaaatattagcttcaaaaaagaaaatgcctaagaatcaacataaccaaagtagtaaaagacctctacagtgaaaatttaagaacccttaagaagatgaagatactagaaaattaaaaaacaaacaaacaaaaaagtcttatgctcttgggttagcagaattaatactgtgaaaatagttacattaccaaaaatacctataagcaatacaatgcgaggcctatttctagtgacattctttacagaactaggatgatgccccttagcaatgttagtttgaatagccaacctgacacagtgtaacattactaggaagggagtcttcaggaattctttggacacagctatggcaagctgccttgactgccttaattgctggggaaagaccccacccaatcttttcattgaaatgggaagacctagcctgagagtaggcaacaccattctagggtttttgcctctgaactatataaattttcatagagaaaattctatgagtactgggcatgcatgcacttatccctgcctgctctttattgtaggtgtgatgtgactagttgttttaagttcttgcctctttgacttccctattatgatagactataacctggaattgtgatttaaaataaacctttctcttgtaagttgttttttgtcaggatattttatcacaatagaaatgaaactaatatgaggtgacaaaacattctgagtaacaaaagcaatactaagcaagtgtcagaatagttgatttcaaagtatactgtaaaaccatagtaacaaaactgtatgatattggcataaaaatacatggaccaacaaagagaattcagaattaaacctatacatttatagccacctagttgttgacactgggggaaaaaatcctcttcaaataatgctgaggtaattgggcatctacctgctgtagatgtttaactcaatcaatatcttttgcccaatatcaggccagtgagatactttaatgggtaaaggcaattgttaagcctgataacctgtattcaattctagaacccatacggcagaaaaactgactcctgaaagatgccctctgaccacgacacatgcagtgcatgagagcatgtatgcacacacattaaacagacagacagtcagacagagagacagattgtgattaaacataacacagggctgagtgtggtggggcacaccttcaataccagcatgtattgaaactgataaagaacctcaaattttaaatattattaaagcaaatcattcactcaaaatacaggttaatgaaccaactaaacacagttctcagaaaaagatatacataggagcactaaaaatttgaaatggggaaatgcaacttaaaactgctttgagattccattctgcccaagtcagcatggctaacatcaaaacaacaaatgttagctggcaaaaatgtgggaaaagagagccttatatactgttggtagtaaggtagagtagggcaaacaccatgcaagtcagtgtgaggttacataaaactgccattccactatcttatgtatgtccaaaagactcgacgtcaagacagcagagagatccatgtttcctgccatactactaagaatagctaagagatagagcaagtggagatgttcatccacccatgcacagatgaagaaagccagtcaatatatataaaatagaatttattcaaccacaaataaaaatgaaatcacattatccttacaaaaatgaatgcaactggaggtcaaaataagtcagactaaaaaaagacaagtatgttctctcctatgaagattctaaaacttaagtgagtgtgtgtgtgtgtgtgtggtcacgaaagttggaaagggagatgagaggaagagagttttaaggcataggggaaaagagtgtgtgacacaaatgtgtgtggcacaggtgtgatacaaatgcaggagaagccgtctagaggtggcaggggactagcaaatggaagataatggatgggaaagaagagtgggggaggagatgaatagagaaaacaacaatggtgtatctgtacaaaaactgtcacagtgaaactcgttactttgtatatcagtttaaaatgaagccagttcaatggttgtgggtacttggtgcccagcaggcctggcaacttgagttcaatccctaggccttcactaaaagcagaaggaacacagctcccacaccaccaccaccatcatcattatcatcgtcagaatcatcaccacagccactgccatcatcaccatcaccatcagaatttttttcatgtaaaataaaaattaaaaacctaagaaaccattgaaatgaaaagcattctagtgctatcagagggtactcttggatagtgaaattatcactaactttatatattttactttatagattttctttttaaaaaattaactttaaaagcattcttaccaggattccatccacggatgaaactttctcccaagttagccaagctctttctctgacatgatcgggtacctttaacttttgacataatgcaataaattcgggttcttcaatttcttcaaactcaagcctacaaattaaaaagttacaaaattgatacacttgcagatcaaactaattaagcaaacacttgtttctatagtttgcacacaccagcacagttttgaaagagaacatctctgagtgctttaaggtcttactttatctttgagaaccattacacatcatttaaacatatgcttatcttttttgtgggttttccaaataagactagcacaaagtgaagaagagctgctagcatggtgaagcacatatactccagagcagccggacagcattgtgagacacagcaagtgcactagctaaagcacactgggaagacggaactgtcacagcaaaaacgaaaaaaccacaccctggtcaatccatacattctctccaccttcctgtatttcttaatgattaacttgatagaaatgattgcatcacgtatttcagtcctatctctttgacctttcttaactgtaagcttttaatggctaattcctttcaatttgacatataacaacaacactaggaagagcaacttaattcttgaaattttactatgatcctatgcatggttttcctgagtccccacatcagccatacttggtaagtcttcccattcatgttttacacatctaccatattagggaaattaaagcagtcactagaggcataccaagtggaaattacccaggtatgaaccatgagtcttaactccatcatctgtgctcctgaccacttttccagctgggcaactccttcttcaagcataattagcgtctgcatatttcaataacgcaagtgtttcagtctcctagtctcagcttctcttccacatgtagtacttaggagagagacagtgtaaaagaaataacaccccagctgtcaaagcagacttattctcagtggagacggaccgggttgaatccatacctaagctattttctaagcttcagactgaggcagccctcttatccttgctaagaacaggcatacactacatgatgtgtcactcagtaaggcagtttacaacagtagtcctgtaagattataatggtgcagaaacatcacttagagcccatcttaaccagcataacattgtggcacaatccatttgctacttgtgcagttagggagatgctgctgtaagcaagctgccactggtaggagagaatcatatatacaaggacatacaatgcctgaagccattatgttactggcttgtgtgtttactaaactatagctttatcattatttttcagcatatttctataattaaaagataaagtttactgcatagcagcatgttttgttatactggcagcagctttgtatctgtagtgtttaccacttctcttgattgtagcaagacagcacagtgactaatctatatatcatcagtgtttgtctaagtgtattctccaatgataacacaacattcatttaatggcagttcagaagaggtagcaaatccctatggtgaacacacgtgacaataggtaagtcagagatcaactgtaagtgctttttgagaaccttagtggcaatgagtaaccaagatgagactatgtcttgtaaagtttaatttaaaggagaactttttgagaattctccaaagttaaaagtacataaaagagaaagaaactgggtctgtctttcccacaggcaatgaccagaacttcaatgtgtacagttactctacaataatcagtaataagtccatagatggcatggaatcttttagaatacatgttactgctctttctaaagtgaagcttccacacactggatacatcagagtttaattagaaacaaaagcaaactcttcccctggaacagtttttattctgtatttattttttaagaacatgatttttatttggtccataagaaaatccatctaatatgaattttaatagacttagacaagcaatttccaaaattatttcagtctcttaggatttgacctgaactctgttaagagtctgggtctcacaaagagccttgattgatgctcaatgagaagaaaggagcttgatagcccatcagggctacaatcccagaacttgggaggcagaggcagtaaaacagagagcttaaggcaagcctgggttacagagtcagagtaattaaaaacaacaaaaacaccccctcccaaaaaaacaaaaacaacaacaacaacaaaaactcgagaacttaatgatgggctagaaattgaaggaccgtgagagacaaaaacaactcccatctacaatggatctatactctcaaaactagtgctgacaataacaacaatcatattgtttcaatttctgttacttaatcacacagtagcacagtcaagaaaaaaaatgttgaaatacaataaatatctctctgttgttcttattggatccacatgaacttaagtttagattccacttaataaatggagagaaaagttctttgagagaacacagtaccaaacacaagaccaaaaaagaaaaaagggagggggaggcaccagaatccgtgaatgctcaaaggcaaaaggcaagaaataatgaagcatgctgcgggccaatcagcacgcaagaagagttctaccctgaaaaaaaaggggaacaaagtttagaaacttccaagcccttgcatttaaatgtctcctgaaacttttgcccacataccagttcttctaagagttctgctccatcagtctccacagatggctttaaatccccccgggcctcaaagcattgttctaaagaaacccccacaaagcccgggagctgaggaccccgtgagcaattgacacccacgaccctgcgctttgcctacaaggcttttcttggcctctcccaggaccaagctgccgatgcagcgcaagctcagagagggcaaggctcccaactgttgcatcgcaggacgactgcaaaagagaaagtcaacccaccccgggggtgcttcggatctccacggagaaaaaagggaggaagaaagaaaacaaacaccggtcgagttttttttttctttttttaaatatttatttcaattgtttttgcatctgaccggggctctccgggacccgccggctccgcgcctgggcgtcgctggagtagagcctgcacctgtcacttcgctcgggagcaggagccccacccgcccgacacctgtcaagccgcagcccagaccccttcgggatgccctccccgtcgcccgcgagcccgggaccgtgtcagcgcgccgccgccacccccgcagagatgggggaccaaggggaccccggagacccggggcgccgctcctaccgccagcccggccccgccgagatgcgcccgcccggcgtccccgccgggatgcacccggcgtccccgctcccttcccttcccttctctccggcccgcggcggccgcgctcctcacctggccaggggcagctcttcggggccgctgtcctgcgcggggtcgtcctcccgaggcggcggcggcggcggtggcgggggctcggcggccgcggctctgcgcggggctttgggcggcatgacgcgcagcgcgggccggcgcgagcagccgagggaggcgcgcggggaggcgggcgggcgcgcgcgcacgccgggcacgccccgtcctcacccgactcccgttacaaaaataatgggaacgtcccccgaggaaaaccggacgcgcccggcaaccgagcgcccgggccaaccgcgggaaaacgtcacttccgcccgcggcgtcacgtccgcgaggctcgcgggccgcgggcgtcagtggggaaccggggcggcggtggcggcggcggcgggcaagggcgagggcgagggcgagggcgcgggcgggaagccgcggggaagccgcgcctgcccgggcctgtctccgcccgcgtcgtccccgtgggcggcgccagccgaggcggggccggcccgctgcgaggagccgcggcctctgggagaacgctggacagggcgcgcccctcgcccggcccgcgcggccggcaaaacaaaaacaaacgtgccgggccagtgggaggtgggctcggcccgggtgggcggtccagggtggggccattggtggccttctggagacaagggaagatgggcgatgcacgcacagactatagtcttttgatggggaaacaggaggcgcggtccgagcgggacagatcttagcgggaaagtagcttttgaaaaccagtttgccaggcggacccgactttgaaaaatcgcttacaaacgcgtttgagacgaaagcagaaaaccagttggccgtgttcatgcgcacgatccggcctcctttcataatggtttctccgagacagccggtcaaactgggaaggtcggcattccacttttgcgggttggaagtggggagttcggggagccaatttgcccgcgtcacatagcaggtccctggcagaggactcgaacccaagtaatatttgtctgaccatgtcgccgacgcacagacaccggaaaagagcatactttatactagaactacctaccgccaccaaaagctggctcagcaatggtagcttttctagttacgttttacctgtcagtcaacataattttctccctttgtcagtccttattcatacaactcactaattgaagtgctgtgaataaaatacagttgttgttctggtgtaaactatcttggaacagctgagcaaggactgaggaatcgagaacttaattgggtaggttgcaagcctgggcttattttctgccttgatgtcagatgagtgaaggatacatgggcctccttcaattttcagacttgcctaacttcagaagccttctagagaccaaatgtttgtcaggaggtagagccccaggccctgatgcagccacggagaatgaatggaattaaaatagcacttgagttcactttgtcccagatttaggcaagagctcaggctacatacagtctaggtttggtgaagataaaagatagactgtgggagcctgatcaaataatatacagaaatgatacagtcctgcctcataattatcagagaatgtgacacttggccaattgatgccaccttggtatttgtggcaagctactcttaagtttgagacagaatggcaaaggaacttgggtcctcagacgcgtaacagagctggtgaccggtcatctctgctggtactgacctcaaatcagctgatggtcagctatttgtgtcagaagtcattgtaacatgtttcccccataagcccctttcaacacacagatcaaagttgagcctgacctggtagctcaggcccataatgctcagagcctaaggcaagaaaatcccaagtttaagacaggctttggctatagagtgagttgaactccaacccgggcaacttagtaagactctgttttataataaaaagtgaaaagtctgggatataacttaatagtaaaatgcttacctagcatgtgaggaacagtgattccaatactcagggacaaagagagagaggcagaggcagagacagagagagacatcattacagccttagaatctaataaggcattggccacatgagaacacaggacagccaaggaaaggctggggacttacattagctctgcatgtgtagatatgacttgttttatttgaacctagttcatcaatacgattgcaaatgagtttttttttttcaattcttgatcatgaatgtaaaaacctgtttcaaaaaataaataaataaatggggcagcgctgggaatgtagcccaggagagggggtgtgtgcggaggggatttggtggtgaaggagaaatggaggcagggaaggaatttgaaaaggcatttaaagtgtttgtgtttctggtagtttgccacctggctattggacacctccttcctcagactctcgaggtcttcaggtggtctgcagcgtgtgtggggctgttgggtgggatggctgtgctcttgtcatatgccagggaaactttaaggtgagtttgaccctcgctactcagaataagtagaaagctgtaagaatataagtattcattgttattttcaaagtccttttcttttttttttttttttttttaactgagcgtggttttgaaaactcacggctaaattaaggatgtaaaagttttgtcatttcttttggattttatagtaggttttttttttttaaacaaagcctgtctcactttgtcagtaaaagacacacatctgtaatgtattagtaacagcagtagtagtagatttcacaatagtcacagaaattattccaaagaattgaagtcctatgggtttctcctgacttaactgagaactgtagtctctcatgtatctagtaggaggctgagacagaaggattccacattcaaggcctgcttgggtccaagagtgagttcacaattagatcctctctcaaaataaaaaaaagttaaaaaaaaaaaaaaaagatggtgccaggctgggatgtaactcagaatacttgtctagtgtgtgtgggcaccagattcagtctcacgtactgcaaaataaaaataaattcagtctcccacttatttgtagccatagctcttagcaatggcaataaaagcaccaaatttgaatgataattatgtctaaaatagaaagaaattagttaaggattagctaaccattttgaatatttactttccaccaaaataagcttcacagcaaaaattcccaaacccagcctagaccagagaccccaaaatccagcctaggccagagaccccaaaacccagcctaggccagagaccccgaaacccagcctaggccagtgaccccgaaacccagcctaggccagagaccccgaaacccagcctaggccagagaccccgaaatccagcctaggccagagaccccaaaatccagcctaggccagagatcccgaaacccagcctaggccagtgaccctgaaacccagcctaggccagacaccctgaaacccagcctaggccagagaccccaaaacccagccttggccagagaccccgaaacccagtctaggccagagaccccgaaacccagcttagtccagagaacctgaactcagaagtacacctgccttggccttctgagtgttgggataaaagctgaaatacacctggcctggcctggccaggatctttctttttctgtaaaacaattaaaatagagctttaatcctgtgagccagcttttaaaacaggatgccaataaaagactaaggataaccttttaaaataaagcattgcttccttcattgtggataaaagtttattgcccggagtgggggtggtggtggagagattattaagagcattactgctcttgcagaggacccagtttcgatccccagcacccacatagcagctcacaaccatctacaactctaggtctaggactccagtgcccttgtatggcctcgacaggcacgaagcatgcatgtggcacacaaacatacatgcaggaaaaacacccacatgcataagaaaaaaaagtaagtattgactgaagtatcttctcccattgccttcatacatttgagagaaaggttgctgtagtaatgatagtgttactaaaaaaaaaaatacagaaacattttagctaagcattgccttcaagtagcctgtcatcaatctaagcaacctaaatgtagctaaaatgtctcctttaacaagcaaagaacacaactcacttctcacattatctgtacttatatgtatggacatattaaataaagttatttttgtaattctcttcttcccattttatgttcgccccagttttatttgttaaatgtagttttatttctggttaatctgagaaaaaaatctaagtttatatttagagtgtctttgttatttgttttcattttctcttcctggcaattcactgtggttttctgagacaagatctcatgccatagccagagctgtcctggaattcactgtgtagcccattgtctcaaattcctggcagccctcctgcctcagcctcccaagtgctggaattatgcccagtttaacagtttgtttttatttcactttccaaaagttcaagacaattggaaggtttaaaggaatgaacagtttctgtgcagagtatgggaaacaactgacctctgaagaacttctgctctctgcggtggactcaggatcaggactcacgtcccttatgtgtgtacttcttagattctttcaggttttgggaaaggagacctgctactcttatctccgttactaaagactggtgatgagctgggatagggtaaagggacaagagcaagggcacaggagccctctctgtgtcttcctgtactcctgtgatgacagcgagtgctcagccaatccccccaccccttcctccccgtgctgaatgtcattcttcatctctttatagtcattgtccccctacccaactcccccaccatgccaccagttcacacacctcagtagaaaaaaataggattgattccttcaaagttgtggtttccatctgcaggacccgctgcgtcatttccaaggttctagagaaaatgaaaagatagaatccctgttttaaaattagtaagagggccaggcagtagtggcacacgcctttaatcccagcacttgggaggcagaggcaggcggatttctgagttcgagtccagcctggtctacagagtgagttccaggacatccagggatatacagagaaaccctctctcgaaaaacaaaacaaaacaacaaaaaattagtaagagggctggagaggtggctcagaggttaagagcactggctgctcttccagaggacccaggttcaattcccagcatccacattgcagctcacaactgcctgtagctccaatttcaggggatctggcaccttctcagacataaatgcaggcaaaacgccaatgcacataaagtgaaaattaaaaaacttaaaaagaataatattcttttaaaagttaccaagaatttcaagatcgtgacatcagagcattaaaactattaagattaatgctgtgatctagcatgaggtacagcatgatttcatagctcaagatatgcacgaagccagccaatcagcgaagatagatccacagccatgaacagacggatgtatccccaggcctgggctggccttggcacatgatgcagaagtttaaagtatgcaaataaatgaccctaacaaccccatttttacttcattaatcttatctccaaatacaatcacattctgacgtaaagaagaagtcgagatgccagcattatgattggaagaaatacagctcggctcataatatttgtggaagtgatttttgacatagctctaagcgctcctctaataaagagggtaaatatttctcaaaggttatgagggaagacattaaatatccacatgtatctagctgtcacataggctctaacttgtatctcaagggcacagagggataaagatgacaggcaggctttaaaaaaaagaaaggaaaaagcctttatcataatgtttgtgttggcctcacattgtaacaccctcattgcatgctcagcgcttccctgccagtggccagggccaggaagggtgaccaaagcaagctgctggattactgtagttcaagccggcaaagttactacactacaagaagaaacggtcccacatccaagtgacatggttttgtcccatgaagaaaagcagttgcttgtggtttaaatgtacccctcaaaatccatacattgggaacttcatcccctatgctaagagctgagactttgaagagtgacacaccctttgatatttgtcctaacattatgatagaccaagacaagagctgagtgagtttattgacattttctacaacctaatcatgagttacgcgctgggactgaagacacatctctttccttaccaattattaagagcaaccattcttgagtgcacaaaattttccccagttctccccacatcgccaccagccctgctgtgaagaacgggatccaattagtcttttcatttacaggtggctcttctcaccattcttaacatgaggtaggtcctaactaagacaaccaacagatgggtgacaataaaaccttttcctgcttggaaaaataccactattgttttagatttctctttttttgtgttataaggataaaaatattttgtagttttctctattttatcccatcgtcttaataatttgacagtccatacatgtttcttttaactccatcatttcagtgtatctaatggttgccagttaaaactggtatagtcccctcttcttctaatgagtgacagttttcagtcacatgacctcttcttcaagatccattgttcaacattgccacattaagggcaacatttccagcatatgaaattgtggggacacattaagccatagcattacttttccctcttgaggataaatcactgcaattacaagtagaaggcttctccctgtggtgaagtggctttgttcattggcttggattgtaaccgaggagttgctgctttggtctgtttcaggcaacgtgagtggaaagagaaatactatgctatagagtatggtctaaaggcacataggtgacagacatatttcagtagtgcagaagttaactccagtgatgttagctgacaataatagaacccacatatcaatgtagtaaaaggtcacttttacttctagtaaatgtctacagataggagtaccatgattaagtgaaggttctgttcagcatagcccttagggacacaggcaccttgaactcacagctttgccctttctagatagtgcccaacgttcaacatgacaatgaaatgtgaattttatgtgtatgggtgctttgcctgcttgtatgtctaatgctcacatatgtcaaaaaaaaggtcatggaatgggagttaaagacatttgtgagctgctatgtgtgctgggagttgaacccaagtcttctggaagaagacctttttaccagtgctcttaactaccaagccatctctccaggcccttgagctctagtttttagagagtgtaagctaagatagttggcacaaggagagtccactgacccttaggacactgcataacgcttgcatgataacaagactgcccaacgatttgttttgagaactagaatgggatattagagctgagttactcactaatcctgtgacaatagaggcctctggtaccttgaatggtaggcagaactcacagtaatacaattactaaggtttcacaccttcagctaattggaatgcagcgcaagtaggaggtggactaagtggtggccatgatgtttgattagtacaggaacaagcagaacagttgtgaagtgggctgaattctgttgacggagttgtatactttgcaaacatctcagagcagcttgtcactgtaagaaaacacactggaaaatcactttcctgtactggcgatttgtaatcagtctaatttcctgaagcctaaacgcaggcacaggatctgattgtaagaacaggcaaaatgagaggaaacacaggttttcagggtcttgtaggtccacatatgttcattgaaggcagggggtgggggaaatctaagataagatttaagagacatttggggtgaaatgtttgaaaatattgaactcccaccacttgaactgtatcttattcagtgaatcctctgataatgtgctataaactttctagccataaaattttaatttactggttcatttttctttggactactattcaagtccaaccaacacttctcagaaagttcactttggatggcatatgccaaagcacagaaaataaagtctaagatcttcaaggtcccatctcattgatggaagttggagtcgatgcttttcatcttctgagaacatagtttttgatgtaaaggagaagttgtgccgctcacatcctgacactgaagagcgagatgatattttagtaagcatcttcagagggaagtgaaactcaaaccaactcatcatgtgacttagaaagcttccagttacaaataaataccaaagtcagacacttctcttagtccaggctgctgtgtaagctgccaagatctatccaacccagagctctgatgatgccaggggtgtctgctgtagataagtgttactgagcatctttggtaaattcatatgggaggtacacccctgagggtgcaccttggagcaaagcaattacttttacaacactgagtttccttcttaattgatttttaatattattagtagccaatgtgcatgtgtgcatgacatagcacatgtgtggtggtcagaggacatctttcagaaattggttctctctttccatcttggctctggggattaaagtcagatccttcagcttatgcagtaagagtattaactgctgagacaaagcacaagcccatcacgaattcctttttatttgaattacaagcagcttctcggagcagggttcaaattctcctgatatccagtaggaaattgaagtcccgagtcatgacttcaggacatggattctgccaacgacctgattttggaagtaggtcctccctccagctgaggtgccatgtgagaatccattctaaactattgtcttaattggaaccttgaaagggacctattacactgtgcccagacccataaaaattgtgaggttaaaaaaaaaaatgtgtggtttagtctgtcttgtggtgctgctgctgtttgtggtattggtggtgctggtagtaagatttctacctggtgaaatggtatactctctctagaacatggtttgactttcaataacactaaacacaagccaataatatgacctcacaacctcacaaaagaggtaaacaggttgacttgtattagtagtatattcataacaattttatttattataattaaaagtccttttaaaaaccaaatagtaatacaagaatggatgaaggcacttccacaccctgggtggaacagaggagccctgtaaagtccagacactccaggaacaccggctgcctgaggtggtgcgaggggacacaaaatgttctctcaaaaaatggagccggtcgccctgtggagctgggacttggagtgccacgcatgcgccatctgcaagatccagatgaccggtgcttgtcttggatgtcaaagctgaaaaacagcgcattgtgttgtggtctggagaggagaaaaaccatctcttccacagttgcttcgtgtccctggcagtgaggcaaccatcactgccctccccggcggcaggattgcatttccccagagtctgctgatgttacagggtggtaacgtttgcattacatacgggcttgcaaccctcgtaggtcttgaggtggagtgctggacagaagctagaacacgccagtggaccgattcttcaaatagaaaggatgcgtctgtggtccttaacaaaggcgtggtttagcataatgtcagtttactttttggaagcgctacacaattaagatgctgtattagaattttttgttgttgtagttacctcctcttagaagtgccatttaaaactaaaaaggagagaatgtcaacatttgcatgacctttatcgtttccctcttggtgtacaggggctgtgagagcagctgcattcacagaagaacatttgcatatttatgccggattggtttctaaaaagaatgttacggtaacaaatagaactcagcttaaaaacctgccctgaaaagaatagatgaagcaattctgacatttaataaaacacaaagaatacagctttaaatggaagtgactcttgaaactctccaaacatgaataaatctgaaaggcttgctaaaccaagaaaaacagcacaaaaggaacattatacatatgaacccatttttaagacactctaagacagaccagcacagcacagacagaccaatgggtgctctggaccaatgggtgctctgatcagggaaggtggacattactttggagaaagtgatggtgggcatgctttgtgtttgaggtactggtcatacaagtatgcccgtgcccaaactatttttaagatttatttttattatttctagattgcacatgcacgtgcgtgtgtgcatacacacacaggcaccctcagaggtcagaggcatcggatcctcttggagttgatgagaggttatgagtcacctgtaggcactgaaactccaactctggtcttcggggagaagagcaaatgctcttaccactgagccatctctccagtccccctgtccaaacctttgatgtaacagatcttgctccttacatcctcagcactctcatggattcttagtaatctccagtatgtgtcaggatgagtttttaaaaagctgctgagcgagctccagctagctgatcagtgagatgctactctatcaagccactcaaaaaaagcagttgtagagacgcaaaacacagaacagcctggagcagcggaccctgaaggaaaattaccaagaaagttgagggagggaggggacactgcctagacagcagagtcataccgctagtgtactgtgattttctttcctctcttagcataaaaacttcattgaacatgttggaacacggtgtctgggatggccaatcctttttggctctaggataaactatctcttaaacctctttgaggtgagagctgtgtttgtgctgacaaaggtgagagacaatcttaggtgcccattcttccctcgactcccaccttgtttgtggcagggtctctgttgttctccacactgtgcacacagactagctggccctcaggttcctgtggatgctcttgtccccacttcccagttcctcacaggagtccttggttacaggcactggcactgtgcacatttggcttttacatatgtgcatggtaagcacttctacccactgagttatctcagcaggattaccactgtttttgtttttttgtatgttaagttcagcctgcttctctgttgaaactattcattagttctaagagttttctactggcatatttagtcttttatgtataggatcgtgtcatctgcaaatgggccatttgactcctccttcccaatttgtgtatgtaccttctgtttgtctctcttggctttattgctccacttagggctttaataataacatactgaacacgaatggaaagcatagactgtacccttgtctcattcagattttagaagaagctttctcactgtccccactcagcacaatggtggttatgaatttgtcataacatagcatttattgtgttgacttatgttctttctaatcctggtatcttcaaggctttcatcatgaacaactgttgaactttttgatggtgttagagccctgatggaaatggaaggactgtaagcctacttatgtgcgcttactgatttgcatatgttgaaccaactttgtatccctgccgtaaaatgaacttagtcatagttctcttagcacttcttaatgtgctcttgaatttgatttgcaagcattttattaagaattttccatctatgctcattgtggaaattgtgtgtgagtgtgtgtgtgtgtgtttgtgtgtgagtgtgtgtgtgtgtgtgtgtgtgtgtgtgtgtctttgtctggtttgggtattaaagtgacagtggcttcagaaaaatctagcagtgtttcttctctttctgattttaaatttctatttacttgtattttgtgtgtgtgagagagggagagaaaatgaatgaatgaatga

SEQ ID NO: 73 - DNA, 39601 bp, Homo sapiens
ttggataaacttcttttttttttttttgagacagagtcttgctctgtcacccaggctggagtgcagtggcacgatctcggctcactgcagcctctgcctcctgggttcaagccactctcctgcctcaacctctcgagtagctggaactacaggcatgcaccaccacgcctggctaattttgttcgtttgtttgtttgtttttgagacggagtttctctctatcgcccagactggagtgcagtggtgcaatctcggttcactgcaatctctacctcccgggttcaagggattctcctgcctcagcctcccgagtagcttggactacaggcgcccgccaccatgcccagctaatttttgtatttttagtagagacggggtttcaccatattggccaggatggtctcaatctcctgacctcgtgatccgcctgcctcagcctcccaacgtgctgggattacaggtgtgagccaccgtgcccggccaatttttgtattttttttttttagtagagacaggtttcaccatgttggccaggctgatctcaaactcctgacctcaagtgatccgcccgccttggcctcccaaagtgctgggattataggcaggagccactgcgcccagctctgattggataaaattccgtgccaggctgtctcaggtgtggcctctcttgcttctagcctaaatgtggtccccttggcctgggtattgatccccgggccagacagctgtggctgagatggctgtatttgttagcttcccaaggcaagtgtgacacagagcacagccacttctgcagggaggagccagaagccacttgggcagccctcctgggagggggctgtgggtgaggctggcccgggaacgcgtcctggcttccctgcagctcattctgaaaggccagtctgatccacctccccgaggctcccctttcctgcttcccctttcctccaggctgtgtcctgcgtactcttccttcatccttcgtctcctttccttaggccccgtcagcctttcttgtcctcaggccctctgcagacaggcccaaacagccagaacccggggcttatcctcccacgggcaggggttctccacacgggtactctgcctggaacccaaggagtcacagctgcaggaggccctcgagccctgtggtgtccacactgcttttgctgcagaatcccttcaaatcaaatcttaatggctgggcacggtggctcacgcctgtaatcccagcactgtgggaggctgaggcaggtggatcacctgaggtctggagtttgagaccagcctggcccacatggtgaaaccccgtctctactaaaaatacatcaattggccaggtgagatggtgagcgcctgtagtcccagctactcgggaggctgaggcaggagaatcacttgaacccgggtggcagaggttgcagtgagccaagatcatgccactgcactccagcctggacaataagagtgaaactctgtcttgaaaaaaaaaaaaaaagaggctgggtgtggtttacaggctcatgcctgtaatcccagcactttgggaggccaaggcaggtggatcacgaggtcaggagattgagaccatcctggctaacacggtgaaaccccatctcttctaaaaatacaaaaaattagccgggcgtagtggcgggcacctgtaatcccagctactcgggaggctgaggcagaagaatggcgtgaatccacgaggcggaggttgcggtgagccgagattgcgccactgcactccagcctgggcgacagtgcgagactccaactcaaaagaaaagaaaaaaaaagaaatcttaagccaaatcacaatatatttacacagctggcaaagtcacaagagggaggtgtgggagggtggggcgggcagcactcggcagtggctcacccacagaacccagctgtggtatgacagccagtgaccctgtctgtggtacatctggagaagctgagacaaagacaggcgattccttacgccgggtcacacggccagctggtagccggtgaagagagaaaaccaccaggtattattgagcaccgtctgtgacagcggacactgctacaatgttgttttttttctttttttgagacggatttttactcctgtcccccaggctggagtgcagtggcttgatcttggctcatggcaacctctgcctcccgggttcaagcaattctcctgcctcagcctcccgagttgctgcgattacaagcgcccgtcaccacagaagcccagctcatttttgtatttttagtagagatgaggttttgccatgttggtcaggctggtcttgaactcctgacctcaggtgatctgcctgcctcggcctcccaaagtgctaggattacaggcgtgagcccccatgcccggccacactgctagaaactttaaaagcatctcattcggttacgtgtccgcctgcagtgggacaggtagtatgactccaccccactgtgaggaagtggaggagcagtggggtcagtcacacgcctggcaggatggccaggagccccattgtctgccttaggagcacctgctggccccacccccacttagcttcggggctttctgtcctcatgctcttcccttcccttttctgtaggtggctcatttcccctttaagaacaacatgagctttgtggtccttgtacccacccactttgaatggaacgtgtcccaggtactggccaacctgagttgggacaccctgcacccacctctggtgtgggagaggcccaccaaggtccggctgcctaagctgtatctgaaacaccaaatggacctggtggccaccctcagccagctgggtaaggaggagggtgcgggcgagcccccgaggtcaggctgggcagggcgggtaaggaggaagcgtctggctggcagtggagctgagtcagagctgtcctgtgtcctgctcttttccagggcttcgggagcggggagagggttgaatatgagcccccagaccctctgtcctagaggaagttggggtggcccggggaatggggctctgctttgctgcccaagacctcgcattgcaaggagagtctgggtagagagcctgggatggcatgtgagcctcgctggcttccctggaaggggaaggaggagaagctggggtgtcacactgttaaagaaatgctgggtggagtggctcatgcctgtaatcccagcacgttgggaagctgaagtgggtggattgcttgagcccgggagtccgacaccagcctgtgcaacacattgaaactccgtccctacaaaaaatacaaaaattagccaggtgtggtgcatgctactggggaggttgaggtgggaggccctcttgaccccaggtggctgaggctgcagtgagccataattgtgccactgcactccagcctcagcaaaagaactaagaccttgtctcaaaaataaaaataaaggccgggcatggtggctcacgtctgtaatcctagcactttgggaggccaaagagggtggatcacctgaggtcatgagtttgagaccagcctggccaacatggccaaacccgtctccactaaaaatacaaaaattagccgggcgtggtggcgcatgcccataatcccagctacttgggaggctgaggcaggagaattgcttgaacctgggaggaggaggttgcagtgagccgagatcacgccactgtactccagcctggatgacagagtgagactccatctcaaaaaaaaattataataactaaaataaataaataaagcatctatccttcagccatttgctaagcagctgctgtattccaggcactgtaccaggtaccgggagcccaccatgtacaaacagctgagtctaatggggtgggcagacgagcaatcacatacttactacagcataagcgataagacagagagggcttctctccagctcacctgggagaacactgaaaatgtaccttggttggactttagagctggggatcagggaaggcttcctggaggaggtggtgtttaagctgagtcttggaaaccggataggaatgaagcaggtatctgtgagttcaagctgttccctggccaggatctcagacaccctcccaagcagctccaggagcctgtgaggccaagggcagctctgaccagccatctctggccctgggcaggcctgcaggagttgttccaggccccagacctgcgtgggatctccgagcagagcctggtggtgtccggcgtgcagcatcagtccaccctggagctcagcgaggtcggcgtggaggcggcggcggccaccagcattgccatgtcccgcatgtccctgtcctccttcagcgtgaaccgccccttcctcttcttcatcttcgaggacaccacaggccttcccctcttcgtgggcagcgtgaggaaccccaaccccagtgcaccgcgggagctcaaggaacagcaggattccccgggcaacaaggacttcctccagagcctgaaaggcttcccccgcggagacaagcttttcggccctgacttaaaacttgtgccccccatggaggaggattacccccagtttggcagccccaagtgaggggccgtggctgtggcatccagagtccctgcctggaccagcctctccactcatgtgactctttccaaccggctttgtggcactggggcaggggccgggggcagtctgagagaggccattctttcccaacacctcttggggagtttagggtggggggggggcgcggctgggaggagggcaggcatcggggagccgggagcctgaccctcatctttcttccaaacaggctcagagggtgtcctgcaccggggcctgggcaggagggaggtgcttctagttctgccaggagacaggttagctgctccccacgtcagctgggacaccccgacttttgtttaccagagaaaaagggagggggagagggctgcctttggacttgtcccgggacacctaggctagggtggggagagacgggccctggtggtggctcgggaggcgaagcgttgtcctcagccccgcgtggaactcgtgtctggcacagcctggctgtggcctaacctgccgagagtccatcagcctccatcctaccccctgtgccttgtcacgccagacttcccacggctcctcgagatcccaacactgccagcatttcccttccttcctctcctgtctccctcctctgcccgggagctcaggaaccgaggcagggaaggatcccatgagctccttaaggctcttttgtaaggtttttgtagtgatttttatgccacctgaataaagaatgaatgggcctggctggtttgatgtcaccgttctgggcatgggtggggacaagtgaggatggtggggaaggcagggaggcggccgcagggtggactgtgctgaggaaccctgggcccagcaggggtggcagcccgcgcagtgccacgtttggcctctggccgctcgccaggcatcctccaccccgtggtcccctctgacctcgccagccctcccccgggacacctccacgccagcctggctctgctcctggcttcttcttctctctatgcctcaggcagccggcaacagggcggctcagaacagcgccagcctcctggtttgggagaagaactggcaattagggagtttgtggagcttctaattacacaccagcccctctgccaggagctggtgcccgccagccgggggcaggctgccgggagtacccagctccagctggagacagtcagtgcctgaggatttgggggaagcaggtggggaaaccttggcacagggctgacaccttcctctgtgccagagcccaggagctggggcagcgtgggtgaccatgtgggtgggcacgcttccctgctggaggtgcagggggtccacgtggcagcggccacctggagccctaatgtgcagcggttaagagcaagcccctggaagtcagagaggcctggcatggagtcttgcttcttgcaaacgagccgtgtggagagagagatagtaaatcaacaaagggaaatacatggtctgtccgaggatgagctgccggagagcaatggtgaaagtgaagtgggggagggggcggggctgggaggaaaagccttgtgagaaggtgacacgagagcacggccttgaaggggaagaaggagggcactatggaggtcccggcgaagcgtggcctggccgaggaacggcatgtgcagaggtcctgccgaggagctcaagacaagtaggggacggtggggctggagtggagagagtgagtgggaggaggagtaggagtcagagaggagctcaggacagatcctttaggctctagggacacgataaacacagtgttttttgtcttgtcaagtgtgtcctttttatttttttgaaagagtctcgctctgtagcccaggctggagtgcagcggtgcgacctcggctcactgcaacctctgcctcccgggtccaagcaattctcctgcctcagcctcccgagtagctgggattacaggcatgcgccaccacgcactgctaatttttgtattttagtagagaccgggttttgccatgttggtcaggctggtctcgaactcctgacctcaggtgatccgcccgcctcggcctcccagagtggtgtgagccactatgccctgcagcacttgtcaagtctttctcagcgttcccctcctctccactgcagctcccagtgccccagtctgggcctcgtcttcacttcctgggatccctgacattgcctgctaggctctccctgtctctggtctggctgccttcactgtaacctccacccagcaggtacctcttcagcacctcccatgaacccagcagaataccaagccctggggatgcagcaacgaacaggtagacgctgcactccagcctgggcgacagagcaagactccgcctgaagaaaaaaaaaaggaccaggccgggcgcggtggctcacgcctgtaatcccagcactttgggaggccgaggtgggtggatcatgaggtcaggagttcaagaccagcctggccaaaatggtgaaaccccgtctctactgaaaaatacaaaaattagctgggtgcagtggcgggcgcctgtagtctcagctactcaggaggctgaggcaggataattgcttgaccccaggaggcagaggttgcagtgaaccgagatcacgccactgcactccagcctgggcgacagagcaagactctgcctcaaaaaaaagaataaaaataaaaaaaaggaccagatacagaaaacagaaggagacgtactatgaaggaaattggagagcttttgggatactgagtaactcagggtggcctttcccaggggacatttagctgagagatagacggtatgaagacctgaccgttcagaaacaggggaagaggcagcagcccgggcaaaggcctttggggcaggaaagggcttggatcactggagaagcagaaagatggccagtgtgaccagagtgtgacaaagtcagagaaaaccaggaagatggagctggagacacaggcggggccagatcacgagggtccttgcagaccagagcaagggtttggattttattccaagtatgaagggaagctgctgaagtgtgttttcctttacaatttgtagttgaaatataatatgcaaagtacacaagtcttaactatatgtaagcttaatgaatgtttccatgaaccaaataccgctgtgcaaccatcaccagctcaagagacgaacccttctccctcctcctgactgccagtaacatagtggttcagctcaagaaacagaactcttctgacttcccctaacatagcgggttttcttttttgttttgttttttgttgttttttaagagacaatgtctttattatttttatttttttttatttttgagacggagtcttgctgtcgcccaggctggagtgcagtggtgcgatctcggctcactgcaggctctgccccccggggttcatgccattctcctgcctcagcctccctagcagctgggactacaggtgcccgccacctcgcccggctatttttttgtatttttagtggagacggggtttcaccgtgttagccaggatggtctcgatctcctgacctcgtgatccgcccacctcggcctcccaaagtgctgggattacaggcatgagccaccgcgcccagccaagagacacggtcttgctctgtcgcccaggctggatggagtgccgtggtgcgatcacagttcgcggcagccttgacatcctgggctcaagcaaccttcctgccttggcctcccaaatgttgggattataggcatgagccactgtgcttggcatctattcatctttaatgtcaagcaggcaattgaatatttgatcagggatagaattgtctatttgggggtatgcagatgtgcttcatgtcatggaactgggccgggcacggtggctcatgcctataatcccagcactttgggaggccgaggcaggcggatcataaggtcaggagatcgagaccatccgggccaacacggtgaaaccccgtctctactaaaaatacaaaaattaggcaggtgtggtggtgcctgcctgtagtcccagctactcagggaggctgagacaggagaattgattgaacctgggaggcagaggttgtagtgagccaagatcgcgccactgcactccagcctgggcgacatgagcgagactccgtctcaaaaataaacaaaaaaaagtcatggaattgatggaaattgcctaaggggagatgtagaagaaaaggggtctcaggatcaagccagcagagaaggcagaaaaggtaaggtgtgtgaggtggcagaaaaagggaagagtgtggacagtgagggtttcaaggaggaggaactgtctactgcctcctgccaaggacggaggtgtccactgccagttgacataaggtcacccatgaacttggtgacaggaatttcagtggagaagtggccacagacacaagtctagaattgaaatgggagccgaggcagcgtagacaaaagaggaaactgctccttccagagcggctctgagcgagcaccgagaaatgggcagtggctttaggggatgtagcgtcaaggaagtgtcttttaaagaagtcgggggccgggcacggtggctcacgcctgtagtcccagcactttgggaggccgaggcaggcagatcacttgaggtcaggagttcgagaccagcctggctaacacgatgaaaccccgtctctactaaaaatacaaaaaattagctgggcacggtggctcgtgcctgtaatcccagcactttgggaggcagaggtgggcagatcacttgaggtcaggagtttgagaccagcctagccaacatggtgaaaccccatctctactaaaactacaaaaattagccgggagtggtggcacgtgcctgtaatcccagccagtcaggaggctgaggcaggagaatcactggaatcctggaggtggaggtggcagtgagccgagatggtacctctgtactccagcctgggggacagagtgagactccgtctcaaaaaaaaaagaaggtggggaaggatctttgagggccggacacgctgaccctgcaggagaggacacattcttctaacaggggtcggacaaaagagaactcttctgtataatttatgattttaagatttttatttattattattttttatagaggcaagcatttttcaccacgtcacccaggctggtctccaactcctgggctcaagtgtgctgggattatagccatgagtcaccacacctggcccagaaactttactaaggacttatttaaatgatttgcttatttgtgaataggtattttgttcacgtggttcacaactcaaaagcaacaaaaagcacccagtgaaaagccttcctctcattctgatttccagtcactggattctactcttgggatgcagtgtttttcatctcttttttgtatccttttggaaatagtattctgctttaaaaagcaaatacaggccaggtatggtggctcactcctgtaatcccagcactttgggaggccgaggcaggtgatcacctaaggtcaggagttcaagaccagcctggccaatatggtgaaaccctgtctgtaccaaaacacaaaaacaaaaacaaaaacaaaaattagccgggcgtggtggcgtgctcctgtaatcccagctactcaggaggctgaggcaggagaatcgcttgaacctgggaggcagaggttgcagtgagccgagattgtgccactgtactccagcctgggccacagagcaaggttccatctcaaacaaaacaaaacaaaacaaacaaaaaaacaaaacaaaagctaatacaaacacatatacaatagacaaaactgtaaatattttattatttttattttttttagtagagacagggtttcaccatgttggccaggatggtctcaaactcctgacctcaggtgatccacccacctcagcctcccgatagttaggattacaggcatgagccaccacacccggcctaaaattgtaaacgttttagaagaaagtatagatgaatcccttcgtgatctcggggaagaagagattttttaaaaaagataccaaaagaagcacaaattataaaagaaaagattgaaaatgttggtgttaaaattaaaaacttgttttaaaacaagcttgtgtaacccatgacccacaggctgcatgtggcccagaaaagctttgactgcagcccaacacaaattcgtaaactttcctaaaacattatgagattttttttgagattttgttttgttttgttttttgtttttttagctcattcggtatcattaatgttagcatattttacgtggggcccaagacaattcttcttccaatgtgtctcaggggagccaaaagattggacacccctgccataaacatgaaaagacaatggccgggcacggtggctcacgcctgtaatcccagcactttgggaggctgaggggggcgggatcacctgaggtcaggagtttgagacaagcgtgaccaatgtggtgaaaccctgtctctactaaaaatacaaaaattagccgggcatgctcgtgcacacctatagtcccaactactcagcagggtgaggcaggagaacctcttgaacccgggaagcggaggttgcagtgagccgacattgcacccctgcactccagcctgggtgacagagtgagtctccattggaaaaaaaaaaaaaagaacagtgtgatacattgacctaaggtttaagaacatgcaaactgatactatatatcacttagggacaaaaacttacatggtaaaagtaaaaagaaatgtacgaaaataataaaaatcaaattcaagatggtggttatggtgacgggaaagaactgaggcggaaatataaggttgtcactatattgagaaatttttctatctttttttcttttttctttttttgagacggggtctcgctctgtcgcccaggatggagtgcagtggtgtgatctcagctcactgcaacctccgcctcccaggtttaagtgattctcctgcctcagactcccaagtagctgggactacaggtgcgcgccaacacacctgggtaattttgtttgtatttttagtagagatggggtttcaccgtgttggctaggctggtctcgaactcctgacctcaggtgatcccccggcctcggtctcccaaagtgctgggataacaagcgtgagccactgcgcccagctttgtttgcatttttaggtgagatggggtttcaccacgttggccaggctggtcttgaactcctgacctcaggtgatgcacctgcctcagtctcccaaagtgctggattacaggcgttagcccctgcgcccggcccctgaaggaaaatctaaaggaagaggaaggtgtgcaaatgtgtgcgccttaggcgtaatggatggtggtgcagcagtgggttaaagttaacacgagacagtgatgcaatcacagaatccaaattgagtgcaggtcgctttaagaaaggagtagctgtaatctgaagcctgctggacgctggattagaaggcagcaaaaaaagctctgtgctggctggagccccctcagtgtgcaggcttagagggactaggctgggtgtggagctgcagcgtatccacaggtaaagcagctccctggctgctctgatgccagggacggcgggagaggctcccctgggctggggggacaggggagaggcaggggcactccagggagcagaaaagaggggtgcaagggagaggaaatgcggagacagcagcccctgcaatttgggcaaaagggtgagtggatgagagagggcagagggagctggggggacaaggccgaaggccaggacccagtgatccccaaatcccactgcaccgacggaagaggctggaaaggcttttgaatgaagtgagtgggaaacagcggaggggcggtcatggggaggaaaggggagctaagctgctgggtcgggtctgagcagcaccccaagactggagcccgaggcaaggaggctcacgggagctgcttccaccaagggcagtcaggaaggcggccgccctgcagcccagccctggcccctgctccctcggctccctgctactttttcaaaatcagctggtgctgactgttaaggcaatttcccagcaccaccaaaccgctggcctcggcgccctggctgagggctgggatggaggacagctgggtccttctagccagcccccacccactctctttggctacgtgagtcaaggctgggcgaccaatgaggttgtggcctccggcaaacaatgaccactatttaggccggcaggtgtatagggcatgggggcccagctgccagtgctggagacaagggccgtccgagatgaaccctttctgctgcctgccaagccactgggaggggtaggtctcagcaggattcccagaaaccccgcccctgtccagcctaggccccccacccggtgttagctaacccaacgttagcccccaggttccgtggggttggagggcagggagtcctattcttggggctgctgcttctggggtgtggggaagtgcaactccacggcaccctgggctgactcattcagcttctaaagcttcaggaaacattgtttggggctgggtcaccatgggtgggccagagaggacccctcaatcccctccggagagccaggggagggggaggtgcccttccccatgctatctccgaggcccactgccatgtggctgaaggctgtgcggttctgggaagagggggaggtggcggtggaggctgtttgtctcctaactgggcttaatctgaaacacatgtattggcttgagttgatccgcctcacgtggaggcaagatcacaaaagcttctgtgtttcttgatgtgggcaattgtcagaaaataaggcctgaccttggcccagcagggagggtatctacctctccctgagccctcccccgcctgctaggacgagagcggggcttggatactgccctttggacaggatggcatcattgtctgtggctgcagccagccagcggtcgcctgctcagcccatgagcaaccactgtggacagggtattgcgtgtgtgctgaggggcgtccatgcagacccccacgcttgccctctcactgcccttgtagggttttcaatcatctctcctcttcccttatccagatggcttgaagtggaggattcagacttgccgttaatactctgggtccctgtgtctagctcggggccacctttggacccatgtcccttccctgccaggctccctcacctcacctcagcctacccacattgtgacaatcatctaccacctgatctggggtttgggcttagattctgtaggcaccaagactaaagtcgctccttcaagtccatttgaattgtgactttagtttccttaaatactatgccaggataatggccagggatggtggctcacgcctgtactcctggcactttgggatgctggtggatcacctgagatcaggattccaggccagcctggccaacacggtgaaaccccatctctactaaaacataaaaattaaccaggtgtggtggcgggcacctgtaatcccagctactcaggagactgaggcaggagaattgcttgaacccgggaggtggaagttgcactgagctgagatcgcgccactgcactttagcctgggcgacaagagtgaaactctgtctcaaaaacaaaaaaaactatgccgggatgagcctgtctcctcccttaatttcttacttgggccagaggaactagaactaacaacttctcttctagccttgcctcctgtgtacctcactgaatttttggtctctaataaaccagtctgcagaggctcaggggaggcaggctcctggcagctgggtggggctggccccagccgggtggagaccagctgtaggcctggatggtggtgaggcctctgtcttgcgctgcagaaagcttttcctgttgtctacacgaaagttttctccctgcatgtcagggcagccacgtgcaagagcagctggctgggaacgcagaggtctgcggctcgaggcggggtttagaaagaaaaccaggctgcttcctgctgcccgtcctgccttaagctgagtaaactcaaaggcaatcttctttcatgcctcacgatattgtccagtggattatctgatttaatttgaaggacgagagccaacaatcacacaacgtcctcccaaattttctgatccactttgttctgggaagtcaaaaagtgtgtgtgctgtgtgggtggatgtttgtgtatataaatggataatgaaggatgatgtgttgggggccagggcaggggagacaacgctgttcagattctacatttttttttccttttttttttttttttgagatggagtcttgctctgttgcccagcctggagtgcagtggcgcgatctcagctcactgcaacctccacttcctggattcaagtgattctcctgccttagcctcccaagtagctgggattacaggcatgcgccaccacacccggctaatttttgtatttttagtagagatggggtttctccatgttggccaggatggtctcaaactcctgacctcaggtgatctacccgcctcggcctctcaaagtgctgggattacaggtttgagccactgcgcctggcctttttttttttttttgagatggagttttcactcttgttgcccaggctggagtgcagtggtgcgatcttggctcactgcaacctccacctcccaagttcaagtgattctccagccttagccctccaagtagctgggactacaggtgtgtgccaccatgcctggctattttattttattttattttatttatttatttttgagactaagtcttgctctgttgcccaggctggagtgcagtggcataatcggctcactgcaacctctgcctcccaggttcaagtgattctcctgcctcagcctcctgagtaactgggattacaggggcctgccaccacgcctggctactttttgtatttttagtatagatggggtttcaccatgttggccaggctggtctcgaactcctgacctcaggctatccgcctgcctcagcctcccaaagtgctgggattacaggcatgagccactgtgctcggtagttgttttattttaatagtaggttattttatttccattttacaagagaaaaaatggtgatttaaagagctactaagacacagcactgagaccatgtgtgatggcatgcgcctgcagtcccagctactcacgaggctgaggcaggaggatcacatgaggtcaggagttccaggctgtggagtgctatggttgtgtagtgaatagccactacactccagcctgggcagcacagcaagatcttgtctcccaaaaaaaaaaaaaaaaaaaaatttcaaatgtgaacccaggatctctgaccctaggccctgcactcctaaccatgggaggaagagctcttgaaagggaactgtgggagaagggaatgagctgccttgtgaggccacagaagtccaaagacagcttgagaatttggagggacagcacgtgccggactgggtgcctctatgcttggtatccggtgattccatggaggagacctgggttctgccccattctcctgggaggggttgcccaaagtcttatcaccggagtgggtcagctgcctccaggacaaagctttagcatacacttgtgctgggccatactccacgtggagaagccctgctggggctggggccccactgctctggatctttaaaagctattggttcaggggccaggtgtaatggctcacacctataaccctagcactttgggaggctgaagcaggtggatagcctgaggtcaggagtttgagacaagcctgatgaacgtggtgaaaccccatcgctattaaaatacaaaaaattagccgggcatggtggcaggtgcctgtaattccagctacttgggaggctgaggcgggagaatcgcttgaacccaggaggcggaggttgcagtgagccaagatcgctccactgtactccagcctgggcgacagagccagactctgtttcaaaaaataaaatataaataaataaataaataaataaataaataaaagctttaggcttaaaggagggtcccctgacgcagacagtggaacaaaagcacaagcttatggtatgactgtgggccctgaggcagggggaggggcgggagaaccttgctgggagggatgggccatcaagctgagggtccacttctgggggcctggaggggtgaggggtggtcgctgcagggggtgggggaaagtgactagccctgcccaacccctgggtcctggctggggtggccaggaaggggtagcggggcagtgcagtgtcgggggagagcggcttgctgcctcgttcttttcttgcaggccccaggatgcaggccctggtgctactcctctgcattggagccctcctcgggcacagcagctgccagaaccctgccagccccccggaggaggtcagtaggcaggcggggagggcgtggtcagcattccccgcccctccttggcaggcagcacgggaaacaggacagggaacccggacccaggttccaggccaggcttgggcctttatttctctagggctggagtttctccagcagcaaaacagagagaaaatgtcttgccttgcctttcaggggatggagtagggacatgaataagatcccaaaagagtaaaaatctgaagcacttttaacaagtccagggcaattctcctgcctcagcttcccaagcagctgggattacaggcatgcaccaccaagcccggctcattttgtatttttagtagagacggggtttctccatgttggtcaggctggtctcgaactcccgacctcaagtgattctcctgcctcggcctcccaaagtgccgggatgacaggtgtgagccaccgcacctggccaggatcttttctcattaccttgtcttcctagtgggggctccactgagcaggtcatgttcccggacatttgttcggatactgaccaggctgtggcagggagtgagggtatggagtgacctctctcctgcccagaaagggcgcagctgggttcccaaggcagatacaggcacatggagggaagcctgggccatatgagtgttatggggtgagtgttggcggaggcccacccttgagggacaagagcagctgggcatcttggcgagagccctggactttcgtgaggtcagagtatgaattctgcgtctccctcttcctagctttgtgaccctagacaacccttacctcagtctttgcttccttgcctatgaaatgggataaaaacacccattctacagggccatgtggccactcatttatttctcatctaccaaacacctactcgacaggggctggcaatgggcggaaataaaaactcagttctgccgggtgcggtggctcacacctgtaatcccagcagtgtgggaggcggagcaggatgatcccttgaatccaggagtttgagaccagcataggcaacatagtgagacccctgtctctacaaaaaagcaaaaattaccaggcgtggtggcaagtgcttgtggtactacctacttgggaagctgaggtgggaggatcacttgagcccaggagattaagactgcagtgaggggccgggcgcggtggctcacgcctgtaatcccagcactttgggaggcggaggtgggtggatcacgaggtcaggagatcgagaccatcctggctaacatggtgaaaccccgtctctactaaaaatacaaaaaattagctgggtgtggtggggggcgcctgtagtcccagctactcgggaggctgaggcaggagaatggcgtgaacccgggaggtggaggttgcagtgagctgagctcgcaccactgcactccagcctgggcgacagagtgagactccgtctcaaaaaaaaaaaaaaaagaaagaaagaaaaactgagttcttttttttaactttctttttttagagacagagtctcactccatcacccatgctggagtacagtggtgcgatcttggctcactgcaatcttggcctcctgagttcaaccaattctcatgcctcagcctcccaaatagctgggaccacaggcacgttccaccacgcccagctaattttttgggtatttttagtagagatggggcctcaccatgttgctcaggttggtctgaaactcctgagctcaagtgatccatcttcctcggcctgccaaagtgctgggattataggcataagccactgcacctggctcccaatttttatatttatatttatttttatttacttatttattttttgagacagggtctcactctgtcacccaggctggagtacagtggcactatctcagctcattgcaacctctgcctcctgggttcaagcgaatctcgtgcctcagcctcctgagtagctgggattacaggcatgcaccaccatgccccgttaatttttttgtatttttagtagagacgggtttcaccgtgttgcccaggatggtctcgaactcctgacctcaagtgattcacccacctcagcctcccaaagtgctgggattataggtgtgagccactcggctgatggtttttaaaaagtgggtcatggggctgggcgcggtggctcatgcctgtaatcccagcactttggtagaccgaggcgggtggatcacaaggtcaggagatcgagaccatcctgcctaacacggtgaaaccccgtctctactaaaaatacaaaaaattacccaggcatggtggtgggcgcctgtagtcccagctactcgggaggctgaggcaggagaatggcgtgaacccgggaggcggagcttgcagtgagccgagatcacgccaccgtactccagcctgagcgacagagcgagactccgtctcaaaaaaaaaaaaaaaagtgggtcataggtttcggcttataggtcacaagtgtttaaacctggccatgaggccaggcgcagtggcgcatgcctgtaatcccagccatttgggaggctaaggcaggaaaatcgcttgaaccggggaggtggaggttgcagtgagctgagatcgcgccactgaactctagcctgggtgacacagtaagactctgtctcaaataaaaaaaaaacagctgatctctcttctgcgctgtctctccacagagagctcatgcgtgatcagggagtaaaactcattcccgttttaggccaaacacagaaaaattaggaaggacagccccaaggggccagaaccaccaccctacacaaagccgtgaggagacagtccctgtgcatctctgcgagtccctgaactcaaacccaagacttcctgtctcctgccagggctccccagaccccgacagcacaggggcgctggtggaggaggaggatcctttcttcaaagtccccgtgaacaagctggcagcggctgtctccaacttcggctatgacctgtaccgggtgcgatccagcacgagccccacgaccaacgtgctcctgtctcctctcagtgtggccacggccctctcggccctctcgctgggtgagtgctcagatgcaggaagccccaggcagacctggagaggccccctgtggcctctgcgtaaacgtggctgagtttattgacatttcagttcagcgaggggtgaagtagcaccaggggcctggcctgggggtcccagctgtgtaagcaggagctcaggggctgcacacacacgattccccagctccccgaaaggggctgggcaccactgacatggcgcttggcctcagggttcgcttattgacacagtgacttcaaggcacattcttgcattccttaaccaagctggtgctagcctaggttcctgggatgtaactgcaaacaagcaggtgtgggcttgccctcaccgaggacacagctgggttcacaggggaactaataccagctcactacagaatagtctttttttttttttttttttctttctgagacggagtctcgctttgtcgccaaggctggagtgcagtggtgtgatctcagctcactgcaacctctgcctccctggttcaaggaattctcctgcctcagcctccagagtagctgggattacaggcacctgccatcatgcccagctaatttttgtatttttagtagagacggggtttcaccatgttgcctaggctggtctcaaactcccgggctcaagcgatccacccgccttggcctcccaaagtgctgggattacaggcgtgagccaccgcgcctggccagaataatcttaagggctatgatgggagaagtacagggactggtacctctcactccctcactcccaccttccaggcctgatgcctttaacctacttcaggaaaatctctaaggatgaaaattccttggccacctagattgtcttgaagatcagcctacttgggctctcagcagacaaaaaagatgagtatagtgtctgtgttctgggagggggcttgatttggggccctggtgtgcagttatcaacgtccacatccttgtctctggcaggagcggagcagcgaacagaatccatcattcaccgggctctctactatgacttgatcagcagcccagacatccatggtacctataaggagctccttgacacggtcactgccccccagaagaacctcaagagtgcctcccggatcgtctttgagaagagtgagtcgcctttgcagcccaagttgcctgaggcatgtgggctccatgctgcaggctgggggggtcttttttttttttttttgagacggagtctcgctctgttgcccaggctggagtgcagtggcgtgatctcggctcactgcaacctccacctcccgggttcacaccatcctcctgcctcagcctcccgagtagctgggactgcaggtgcccagctaatcttttttgtatttttagcagagacggggtttcaccgtgtttgccaggatagtctcgatctcctgacctggtgttctgcccgcctcgacctcccaaagtgctgggattacaggtgtgagccaccgcgctcggcccgtttctaaacaatagatcatgtgtgcccaggcctggcctggcactggtgtggaggaagggcccgtgagcccaaagaggctcagaaagaggaagtgggctgcaggagacggtgggaggggcagggagggcagtggcgcgatgtggggaaatctgctgcccccctggccagtgcctggggatgccagcagaagtcctggcaagtcacaggaagatgctggctgggaagtcagggcctgctgagcgctaaaccagaacccgagcctggcaggctctcaaagacgggatgcttgtcgtcgagtctcatacgctaacctctgctccgcctcttctcagagctgcgcataaaatccagctttgtggcacctctggaaaagtcatatgggaccaggcccagagtcctgacgggcaaccctcgcttggacctgcaagagatcaacaactgggtgcaggcgcagatgaaagggaagctcgccaggtccacaaaggaaattcccgatgagatcagcattctccttctcggtgtggcgcacttcaagggtgagcgcgtctccaattctttttcatttattttactgtattttaactaattaattaattcgatggagtcttactctgtagtcctaactggagtgcagtggtgcgatctcagctcaatgcaacctccgcctcccaggttcaagcaattcttgtgcctcagcctcccgagtagctgggattacagggatgtaccaccactcccggctaattttttgtatttaatagacatggggtttcaccatgttggccaggctggtctcgaactcctgagctcaggtggtctgcccgcctcagcctcccaaagtgctaggattacaagcttgagccaccacgcccagccctttttatttttaaattaagagacaaggtgttgccatgatgcccaggctggtctcgaactcctgggctcaagtaatcctcccaccttggcctcccaaagtgctgggattacaggcatgagccaccgcgcccggcccttttacatttatttatttattttttgagacagagtcttgctctgtcacccaggctggagtgcagtggcgcgatctcggctcactgcaagctctgccttccaggttcacaccattctcctgcctcgacctcccgagtagctgggactacaggcgcccgccactgcgccctactaattttttgtatttttagtagagacggggtttcaccgtggtctcgatctcctgacctcgtgatccacccgcctcagcctcccaaagtgctgggattacaggcgtgagccactgcgcccggcccttttacatttatttttaaattaagagacagggtgtcactatgatgccgaggctggtctcgaactcctgagctgaagtgatcctcccacctcggcctcccaaaatgctgggattaccatgtccaactttccacttcttgtttgaccaaggatggatggcagacatcagaaggggcttggaaagggaggtgtcaaagaccttgcccagcatggagtctgggtcacagctgggggaggatctgggaactgtgcttgcctgaagcttacctgcttgtcatcaaatccaaggcaaggcgtgaatgtctatagagtgagagacttgtggagacagaagagcagagagggaggaagaatgaacactgggtctgtttggggctttcccagcttttgagtcagacaagatttatttatttatttaagatggagtctcattctgttgcccaggctggagtgcagtggtgccatcttggctcactacagcctccccacctcccaggttcaagtgcttctcctgcctcagcctcccgagtagttgggattacaggcgcccgccaccacacccagctaatttttgtattttcagtagagatggggtttcgccatgctggccaggctgttctcgaaaactcctgacctcagatgatccacccgcctcggcctcccacagtgctgggattacaggcgtgagccactgcgctggccaaatcagacaaggtttaaatcccagctctgcctgtactagctgaggaactctgcacacatttcataacctttctgggcctacgttctcacctttaacgtgaggataatatatctacttcatagacacctttttatgttgtctccaagttttctaacagctctagttctgtacccaagacatggcaggtggccaacgacatccttctaggctgtggtgatgtgtttggagcttgttccacgggtcttgtgtggggccagccctgttcagataaggccttgtggggtggcctggggtagggggaggggttgggcaaactctcccttaaaacgctttgtaaccatctgaggcaccagcaagagcggcccccgagcctggacaaaatccaaacggcttcctacttcaagcactgatgtctagtgagtgaaggaacagctctgggtccaggatattataggtcacattaaactaaaggggcttggccatcagctggcttccagagcgtcagccagttacttcacctctttggctttggcctgttttcagctacaagaggacttaatccagaggacctcagaggtccttcccagctcagaccttctttgactgtctcccagagacactgctgtaggagtgcacaccagtttacttttctttcttttgtttttgagatggagtttcgctctttttgcctaggctggagtgctgtggtgtgatctcagctcactgcaacctctggctcccaggttcaagtgattctcctgtctctgcctcccgagtagctgggattacagacacccaccactgcacccggctagtttttgtattttcagtagagatggggtttcgccatgctggccaggctgttctcgaaaactcctgacctcagatgatccatccgccttggcctcccaaagtgctgagattacagatgtgaggcaccacacccggccatttttgtatttttagtagagacggggttttgccatgttggccacgctggtctcaaactcctgacctcaagtgatctgcccaccttggcctcctgaagggctgggactacaggcgtgagtcaccgtgcccggccatttttgtatttttaggacagcgttttttcatgttggccaggctggtctcaaactcctgacctcaagtgatccacccaccccggcctcccaatatgctgggattccaggtgtgagttaccatgcccggctaccactttacttttcctgcaggctatcacagaacgtgtacaatctagactctaatcaaccaaatcaacgtcttgccatcggagtttgctggtgaagggcacttggggtcctggaaataactgtaggctccaagccacacacactgagataggcctattccctgaggcctcagagcccctgacagctaagctcccttgagtggggcaattttcaacaacgtgctctggggacacagcatggcgccactgtctttctggtctcctggggctcagactatgtcatacacttctttccagggcagtgggtaacaaagtttgactccagaaagacttccctcgaggatttctacttggatgaagagaggaccgtgagggtccccatgatgtcggaccctaaggctgttttacgctatggcttggattcagatctcagctgcaaggtctgtagggataggggcagggtggggggtggatggagggagaggatagagaagcaaaacagggtagtgggaataaaatgacctttgagatccgacagctgtctacatgtcgcctgctgtgtgactttgagcaggttaataacatgtctgagctttcctcctcttaagatggggcaggggatcgttaccaacacttaccctcccagggtttgttgtaaggacgaataaggtaataggaaatgggccctcagactgggcacccacatgtttgttctcttgagactcctatttctagaatttaaagccaaactttgaaaaataatgacaaactccaaatcgttggcatctttttttttttttttgagacagtctcgctctgtcggccaggctggagtgcagtggcacgatctcggctcaccacaacctccgccccgctgggttaaagcgattctcttgcctcagcctcctgagtagctgggattacaggcgtgtgccaccatgcctggctaattttatacagacggggtttctccatgttggtcaggctggtctcaaactcccaaactcaggtgatccgcctgcctcggtctcccaaaacacagggattccaggcatgagccaccacgcttggccaatcgttggcattctaaggctttcagtgtacctgacttcttttagttctaagtctgtaactgttaacctttcttgggccacggctatcacacggatctctctgggaatctgacgacagtgcctcaaacccgagggagcaccgccaggtgtgcacacacgtttctgtcaacgatttcggagactcttgggatccctgacaccatctgttccatggaccttaggttaagagcctctgttcaaaggaggcttttgctcttggtgggtggatggggtgaagtctccaagccctcttacggccccttcggtattcctatccccggttctccctgtcttagtccagtgctctctatttaacaaatgagcagtaaatgttggccgatggactttgggagaaaataaagacctgaaattcaattctagctccttaaaccacaggagaacattctttcagcagacaacttcagttggtattaggccaaggtaagaaaggccaacagcatcctttctgaagaaacctcaggagatggctcactgccagaaagctataacctggaaggggaattgttaaatagatgaggggctggatgaaggacgagaccagggccccgtcacgggagagggaaggcagctcctggctgtgtctgtccccggcttttgggctctgaaggactaaccacatgctttctcacttgtctcagattgcccagctgcccttgaccggaagcatgagtatcatcttcttcctgcccctgaaagtgacccagaatttgaccttgatagaggagagcctcacctccgagttcattcatgacatagaccgagaactgaagaccgtgcaggcggtcctcactgtccccaagctgaagctgagttatgaaggcgaagtcaccaagtccctgcaggagatgagtatgtctgaagaccctttcgctcttggtgggtggatggggtggggcagggtctttgggccttccactgtgctaagcagaacgcaagggctccacaggcttgtaggggggccgtggatgagtccttaatcctcatcgtgccagaagggaaggctgaactgccttctctcatcagactcattcctcagcctcacgagcagacctccctgacaggcgctcacaacactgcctctcaagacgagtctgtctgacctgttttctcatcttgacctaacttgctaaatgctcctgggcaagtcactccaccctcggtcagctcagacctcttcaggcctcagagaaagtcaacagtgctgcgccatcccagcttgcttgcaaagggatcccttggttggggtgttggggaaggcagggttttaacggaaatctctctccatctctacagagctgcaatccttgtttgattcaccagactttagcaagatcacaggcaaacccatcaagctgactcaggtggaacaccgggctggctttgagtggaacgaggatggggcgggaaccacccccagcccagggctgcagcctgcccacctcaccttcccgctggactatcaccttaaccagcctttcatcttcgtactgagggacacagacacaggggcccttctcttcattggcaagattctggaccccaggggcccctaatatcccagtttaatattccaataccctagaagaaaacccgagggacagcagattccacaggacacgaaggctgcccctgtaaggtttcaatgcatacaataaaagagctttatccctaacttctgttacttcgttcctcctcctattttgagctatgcgaaatatcatatgaagagaaacagctcttgaggaatttggtggtcctctacttctagcctggttttatctaaacactgcaggaagtcaccgttcataagaactcttagttacctgtgttggataaggcacggacagcttctctgctctgggggtatttctgtactaggatcagtgatcctcccgggaggccatttcctgcccccataatcagggaagcctgctcgtaaacaacacatggacagataggagaggccatttgtaacttaaggaaatggacccgatacgtaaagattctgaacatattctttgtaaggaggtatgcctattttataaagtacagccgggtgtggtggctcatggctataatcccagcactttgggaggccgaggcgggcggatcacctgagatcaggagtttgagaccagcctgaccaacacggagaaaccccgtctgtactaaaaatacaaaattagcagggtgtggtggtacatgcctgtaatcccagctactggggaggctgaggcaggagaatcacttgaacccgggaggcggaggttgcagtgagccgagatcacgccattgcactccaatctaggcaataagagcaaaactccgtctcaaacaacaaaaaaccaaagtataactgggctttttgaagaacatgaaacatgcccagtgtctgaagtagaataactaccgaactgtccgtaggactaaactttttcttgaaaaagctctaccaaaaaaagtcaccggccactcccttgtcacagttattagacaggaggagaaatgataattctactgcccttcattctacaaatgtttgagtgctaactgtattccagattctcaaaaagctattgccaggtatctctggggctactgatttcctgatcataatgcaatggcaaccaacgggcacttgggcatggtgagggtgggcaagctttcaaaagcagcgtggatctggcattcttttccacgaatgcacctcaactacttggcaccagtggtaacacagcaaccagggttccgacctagagaatcccgtaaccttctgactggaacggggtctgggctgtcgctacacatcctggtggaaggcagctatcatccctaccttctgccttctgtctcttaaatctgaaccacaaacagcaacgtccataccctcagcattgttagaatcccctgcagcctccagttctcatactgtctgtattctactcgccagtttggagaggtctggtggagaaaaggagtctcttttcaggcttgacaacaaatagaactcagggccgggcgcggtggctcacgcctgtcatcccagcactgtgggaggccgaagcgggcggatcacctgaggtcgggagctcaagaccagcctggccaacatggagaaatcccatctttactaaaaatacaaaattagccgggcgtactggcgaatgcctgtaatgccagcttctcgggaggctgaggcaggagaatcgcttgaacctgggaggcagaggttgcggtgaaccaagactgtgccactgtactccagccttggtgacagagggagactctgtcttaagaaaaaaagaaaaaaaaaaaaaaagggccgggctcacgcctgtaatcccagcactttgggaggccaaatcacctaaggccgggagtttgataccaacctgaccaacatagtgaaatcccgtctctactaaaaatacaaaattagccaggcgtggtggcgggcgcctgtaatcccagctactcgggaggctgaagcaggagaatcacttgaacccggaaggcggaggttgccgtaagccaagatcgcgccattgcgctccagcctgggcaacaagagtgaaactccatctcaaaaacaaaacaaaacaaaacaaaacaaaacaaaaccaacaactcagaaggaggcatatgtgttataaagtctttactacaactttgattttattagtggttggttactgactctgccaagagtacagaatgaagggcagagagtaaggactggaaaactggcaggaaacacactgacagccgtcatccctggaggaaactgctcaataaaacggctccatatttacttctctggtcacggttcatactccacgattttaacaaaggagtcgaggaagctagatactgtaagtggaacggtgtgtctctggaggtaagcaggcttgctgatttcttgttttataattcttttttaattacaatgtaactactaagagcttcagttcccactggagtggtgcacacatctcattactactaaaaccacaggaatgttccagggaaacagactatcatcactgagcgaggtggaatccagccaaaaccccaggctaacatccagatgcctgcagatcagctaaaatccttttaaaggacttggaatctccagatactagttttaagtcttttctgggaactgggagtttgtactggaggccacttaactatttcaaaaaatattcaccaaaataggtgtctctctgactgcaacggtttgagtcctcctcagccctcatatcctaggcttcggactgttgggaaagtcttatcttcctgacgaaagctcagcagcaacagaacctgttatttttttgttgagacagggtcttactctgtcacccaggctggagtgcagtagtgcgatcttggctcactgcagcctcagcctaccaggctcaggtgaccctatctcagcttctcgagtaggtgggactacaggcatgtgccaccatgctcggtgaactaaaaaaacttttttgtagtgatacggtctcactatattgcccaggctggttttgaactcctgggctcaagtgatcctcccacctcagcgtctcaaagtactgggattacaggtgtgagcctctacactgggcctgcagaacctacacagaatccgcacctggtctgcagaacccacacccgacccacagaacccacacccgacccacagaacccacatctggcagcagaacctcttaatattttttttttttctttgagatggagtctggctctgtcacccaggctggagtgcagtggcgcgatctcggctcactgcaagctcttcctcccgggttcaccccattctcctgcctcaacctcccgagtagctgtgaatacaggcgtccgccaccacgcccgactaatttttttgtatttttagtagagacggggtttcaccgtgttagccaggatggtctggatctcctgacctcgtgatctgcctgcctcggcctcccaaagtgctgggattacaggcttgagccaccgcacccggcctcttatttttttttttgagatggagtctcacactgtcacctgggctggagtgcagtggagcgatctcggctcactgcaacctccgcctcctgggttcaagagattctcctgcctcagcctcccaagtagctgggattacaggtgcccaccaccacgcctggctagttttttgtatttttagtaaagatggggtttcaccatgttggccaggctggtcttgaactcctgacatcaggtgatccgcccaccttagcctcccaaagtgctgggattacaggcgtgagccaccatacctggccagcaaaacctctttaacttgtgttccatgggctccttttctgtgggtcaaaatcctcctggaaccctacaatgcaggccctacaggggtgggtggtaagtccaacaaacaggatttcatcttctggagctcctggatttcatcgtcccatgggccacagtgcagcgacagaacctcctcagctttctgtattgtgctcagggcttcgggtactgcaaacctgagccaagggaggtaagaggagttagttcactgatttgtgaggcaaatgttaattgagggcctactcacacaccgtgaagaatgtaagatcatttctgtcatcaaggatcctacaatctagaacagtaagtaagacactgtcacaaacacgctgcaaaacaaaagtgtgagaaaacagttataaaagatagtatagacgccaggatcctgagaacacgaggcaaatctcaaagcttttttttttttttttgagacaagagtttcactcttgtcgcccaggtatttgtgcgacctcggctcactgcaacctccgcctcccgggttcaagtgattctcctgcctcaacctcctgggcagctggattacaggcgtgagctaccacacccggcctcaaagttttcatctggtatttaccacaggtttacatagcagttttcattttagggtgaccatcttagggctgacctctgacctaactctgcagcccttttctctctctctgaccaaacagaatgtctctgtgtcttgggtaccaggcccactcagcacagccttaggttgaagctttaagcactttctcatagccacatacaccaagggcagctttaccagggttggaggttccacccggaaatcctgaaattgggccctaaatggtctcagtagcaaaagtggatttggcatcagctcatcagcgtgctgttctttccttttaaccttcaaagtagaacaggggatttaaaacaaaaaacaaacaacagcagcaaaaaagcagggtttctcgaccctgacactattgacactgttgctggctccttctttgctggggttggtggggggggcactgtcttgtacccgggaggatgcttagcagcacctctggcctctttcgaatagatgccagcagcaccccccttccaagtcatgacaatccaaaatgtctccagagatcgcttgagcccaggagttgcaggaagcagtgagctgtgaccgagccactgtactccagcctgggcaagacagcaagaccccttctcaaaaaaaaaaaaaaaaaagtctccaggcaatgccacatgttgtctgggggtaaaatcagccctggttcaagcaaacgctttaaaaggaagaggatgcagagtagggagaaggcagagagcctggagctgagagtgctgggaatgagacagccaaaggggctgtgacgaaccagagaacaaccagaaggagagctatactggagggtgggtggggctgcctggccaagttctctctgggaaactcacttgagatctaaaagctttccccatatctcccaggaggaaattctttttttttttttttttgagatggagtctcgctctgtcgcccaggctacagtgcagtggcgcgatcttggctcactgcaagctccgcctcccaggaggaaattctaaagcgttatgtttgttagcaaaacagaaggcaaagatctctcctaaagaggaaataaagaagtttcaacatgcttttaaaaacaccatagaaaaaaagtaatacccagaagagcctaggaaaggaacagtgtgtgccctgtgaagtgggaaagggactcacccgttgaaaaagatctgggccaatttgaagagctcatggcccatttcaacactggacggcccgtggcgaacctccaccacgtagagactcctctgtagatgggtggctgacttttgccagtctcctgtgagaagagaaaaatcttgttccagaaaagaaccactgtcaactgtggatgcatattttcagggggaggaaatggaacgagagggggagcaccctcagtttacagagcggggggtaaccaggcagacaaggccggggccacggcgaagtgcccacagcagactgttcccgacgcagaacgtgaaggctcatgctgtacctaaggcagcacaggcccgggccaggccatccgcgatctctcccaccacggcgtgctctgcccacaggaagctctcggcgtcacgctggcaccccgacagccgctgaacagctcgctctgtcaatgcagaggaaagacgtctcactatagacagaagcccagtcctaggaatgagaatccaggtctcaaatcctctgaatcagctgggctgaatgtggaaattccccctggcctccctgggttgtcaccaacgcacaatgtctgttccaataaagctgctgttttcttctgttttctctgtcagtggagaaaggcgctaggggaggcctccccacatttacactgtattttcaacattaacttcccaactcgaccaactctacctttcacgtacggccatgatttctcttgaccctgaaatctaagctaaaggtcaactttcataaagcagggtaaataaaaatcccatgatgtcaagctctaaggcagggttttcaagggcaatggggagctccgcaagtctcagacaaaagcaagacactcctatcagctgggctcacgccccactgctctctagcagagactagctctgaggagggaagaaccgcccttctaggaagttacatcactaggccctggaattaaaataaatgacactcaacttctggaactgcacacagctcacggatgtcagcgatgacccgttagttggcaggggtacttcaacttagcaatcagatgcagaagaaaacaacagctgaaatcacctggccccttttcaagggccccacagtaacaaagctggtcagggtttggactcactggcctatatagccatcttgtggctggcatggggataattacatccaattctcccatcagtactgagtatccctgagtccaaaacggtatcagaacaaataaaagggaaggggctggaggaccaaagcagggagccagtctcacctagttcaccatctctgagaagcttctgggccactctgacctgctgctgtaggtcctgtaaccgagagaccaggtggtccctgctgacggcggattctgcacaagatctgctgccacagcgcagcacgtcatctccctgtggaagtcagttttctctttattccaatgccagggtcagttatcaacaccgcctgtgcttacattacaggactgctccatagtttcttacctcatgggggaaagagactcctgtaacaatacatcgtgacgaaagtctgagcgaattttgtttgatggcggcaatggcggcaattctaatgaagtgtatcagcagtagctgatcccacctgagatttcatttttggaacagaactggtacagtgcacaatttctttccacttctatagcccctcttgtcgctttttggggccaggactttagatgacaaacatttcttttttttgagatggagtctcgctcggtctccaggctggagtgcagtggtgcgatctcggctcactccaagctccgcctcccgggttcacgccattctcctgcctcagtctcccgagtagctgggactacaggtgcccaccaccaagcccggctaaatttttgtgtgtgttatttattttttttttttagtagagacggggtttcaccgtgtaagccaggatggtctcgattttctgacctcatgatccgctcgcctcagcctcccaaagtgctgggattacaggcgtgagccaccgtgcccggccttgatgacaaacatttctagtagttatgaaaaagtcctcagaaaaccaatagaaggccaggtgcggtggctcacgcctgtaatcccagcactttgggagggcgaggcgggtggatccatgaggtcaggagatcgagaccatcctggctaacacggtgaaaccccgtctctactaaaaatacaaaaaattagccgggcatggtggtggcgggcgcctgtagtctcacctactcgggaggctgaggcaggagaatggcgtgaacccgggaggtggagcttgcagtgagccgagattgcaccactgcactccagcctgggtgacatgagagagactctgtctcacaaaagaaaaagaaaaaaaaaaaaaaaagaaaaccaatagaaaggctgggcgtggtggctcacgcctgtaatcccagcgctttgggtggtcgaggcaggtaggtcgcttgaggccaggagatcgagaccagcctggccaacatggagaacatggccaactcgtctctactaaaaatacaaagattagctgggcatggtggtgcatgcctgtaatcccagctactggggaggctgaggcaggagaattgcttgagtctgggaggttgaggctgtggtaagcagagatcgtgccactgcactcacttcagcctggatgacagggcaagaccccatctcaaaaaaaaaaaagaaaaaaaaaaaaactaatagaaaaaggtgctaggtgcgatcgtcctacatttgaccttgggtctccaagtttagctttctaacacaaccggctctgcctttcactcatgactcccctaagaagaatacggcacttgtggcagaggggaaacctccgaggtggacatctgctgtgtttcaaaggccgatatctattttctcatttggcaacagcaacccaacccagtttctcataaggatccctctcaccctcagtcccatggcccttgccctacagctgagggtgtggcatgtggctcacatatggctccttcctctggcccaaatggctggaggaaaactatgtctaattttcctccagccacagttctcaggtcaatgaaacacagtaacatctctgcccaggctgctgtttgagtggcatgtgctcttatcctccttggcaggaaatccgcaggctgggctgctggcagccatcctgcatcgtaagagggaagtctatctgaggatgggctaacacagagaaaatgaagctgagaggggtggacagaaagcccctggatcaagctgtatcttaagcagccttatcctggaatttttctcataacattttttttggtagagacagggtcttgctatgttgcccaggctggtcttgaacccctggcctccaagtgatctgtccacctcagcctcccaaagtgctgggataataggcatgtgtcactgtgcccagcctatcctgggacttttcaatgactgacttcagcaaataaattcccagtctcccccagatcccaaaccagttcagatgggatcttctgtcctttataaaggaaacattactaaattgaacctttccctgtggtttctctggaggggaactagtgtatggggatgactggctaaaatggaggtgatattactggtctcagcacttacaagtccctgatggcttcctcctaaacactgatcacccttggggtggaaaactgacctccaggaaaagtggaggagacagaagagagaattacctgcatgggcgctccgcaactgttgcaacagaatgcttcccacctgggccctgcagccatcctgtgtgcctcagtttgacaagctggacaggcgcagtcaaagaaatactgagacctcagcttctgctgcctttcggcaacccccatccggctcttgtgaggccctggagggagatcaccgtcagccaatattgaaagcaagagagagtcaaacactacgtaaaaaccttcagcttagcagagggtctggacaattacctatcatgtgacagctaacctttacccaaatatttgtggaactggatactaaaataagcttccaagttgctgagacaggaagaaagagaagccaagaagttgttcctagcccattttcagaataggaagtttatagtgattaaacagcgagacatagtttagccgcaatagggccctagcacgaaggccattccttccatcctcccttccttgtttttggcctaagtgttcactgcctcttccaggaagcagacagtagacaggtgaagtcacatgcctggtggcttgctgacttgcgtccccgtccttttctgttggagaagggcaggatggcagtgcggagggatggctcaccatagcagtggagaatctcttgcccctttctaatccgctgtgacgcccggatggtggcgacagtgctaatgaaggacacgctggtgttggggctacaggagtggttcaggaggctgataacagggaagatgcctgtggcaaggcgcacctgcctgctgtcggtaacgatgctccctttaggtcctgaaagggcaagaggaaagaaggaaaaaggtgtcagcacatgagccctggccttgccctctgttcctcagaagatgagctgggcagctaggcctgcagcccgtgtgagtcatggctccacagccagatccaatataaatcagatgggacatgactcacggcaagctccagtccccaggaagcaaagtggatgaacgcacacaaagtccactggagtcctggaacctaacgactgtgtctctacaccacgaaatagccaaagataagaacttataaagaagtaataaaaaagggatgataagtagggagcgttctagatagtttcataatgttctcacatagaaaccagagcccctgttgaggtgacttcccaaagacttttagagcccaagggcttttgtttatctggtctttggttggttaacagaacaagcgacctagttactaccccaaactttatatatttaagcaggccaggcaccagggctcctgcctgaaatcccgaggctcacgcagaagaattgcttgagcccaggagttcaaggccagcctggacaacacagctagatttggtctctaaaaaaaaaaaattaaaatattagccagctgtggtggtgcacacctgtagtcccagctactcaggaggctgaggtgggaggatcagttgagccctagagagcgaggctgcagtgagccaggattgcaccactgcactccagcctgggtgacagagcaggccctgtctgaagaaaaataaataaaaatttaaaaaaagttttactctaattgtaacatttattatttttttcttttttggtcttttcaggcccatagtttactttaaaattttgttcattttggccgggcgcggtggctcacgcctgtaatcccagtactttgggaggccgaggcgggcagatcacaaggtcaggagatcgagaccatcctgactaacacggtgaaatcccgtctctactaaaaacacaaaaaattagctgggtgtggtggtacgtgcctgtagtcccagctactcaggaggctgaggcaggagaatcgcttgaacccctgaggacgttgcagtgagccaagatcgtgctgctgcactccagcctagacaacaagagtgagaccccgcctccaaaaaaaaaaaaatttgttcatttcagaaaagaaagcatggtggataattagcactttaaaagtccacctgtaacacttcacttagccagaggctctacctgtgctggcttttctcaaagccatctgtcctaggagtatgtacagtaaagataaccttgggcacacagaaacgcttaaattatcttcagtagtctcaatttaagcatgaggcaaattgtgtttctaacaaaacaggttggaagataaaaaataccagtatttaaaaggaaacattcagttttctggaaaactggaaaaaaaccatcaaataactgtgatatcaccgaatatatgccaggaatctcaaaaaaaccactcaccaggctgggcatggtggctcatgcctgtaatcccagcactttgggaggccgaggcgggtggatcacctgaggtcagaagttcgagagtagcctggccaaaatggcaaaaccctgtctctactaaaaacacaaaaattagctgggcatggtggcatgcgcctgtagtcccagctactcgggaggcgaggtacgagaattgcttgaatccaggaggaggaggttgcagtgagcccagatcacactgctgcactccagcctgggtgacagagcaaaactgtctcgcaaaacaaaaaaaacaaattcaccaaagaaatagtctaggtacaaatgtaatggataaagaaaatattatgaaccattatgtgaaaatgttttataggccaggtgcagaggctcacgcctgtaatcccagcactttgggaggccaaggcgggcagatcacttgaggtcaggagttcaaca

SEQ ID NO: 74 - DNA, 39601 bp, Homo sapiens
tgttgaactcctgacctcaagtgatctgcccgccttggcctcccaaagtgctgggattacaggcgtgagcctctgcacctggcctataaaacattttcacataatggttcataatattttctttatccattacatttgtacctagactatttctttggtgaatttgttttttttgttttgcgagacagttttgctctgtcacccaggctggagtgcagcagtgtgatctgggctcactgcaacctcctcctcctggattcaagcaattctcgtacctcgcctcccgagtagctgggactacaggcgcatgccaccatgcccagctaatttttgtgtttttagtagagacagggttttgccattttggccaggctactctcgaacttctgacctcaggtgatccacccgcctcggcctcccaaagtgctgggattacaggcatgagccaccatgcccagcctggtgagtggtttttttgagattcctggcatatattcggtgatatcacagttatttgatggtttttttccagttttccagaaaactgaatgtttccttttaaatactggtattttttatcttccaacctgttttgttagaaacacaatttgcctcatgcttaaattgagactactgaagataatttaagcgtttctgtgtgcccaaggttatctttactgtacatactcctaggacagatggctttgagaaaagccagcacaggtagagcctctggctaagtgaagtgttacaggtggacttttaaagtgctaattatccaccatgctttcttttctgaaatgaacaaatttttttttttttggaggcggggtctcactcttgttgtctaggctggagtgcagcagcacgatcttggctcactgcaacgtcctcaggggttcaagcgattctcctgcctcagcctcctgagtagctgggactacaggcacgtaccaccacacccagctaattttttgtgtttttagtagagacgggatttcaccgtgttagtcaggatggtctcgatctcctgaccttgtgatctgcccgcctcggcctcccaaagtactgggattacaggcgtgagccaccgcgcccggccaaaatgaacaaaattttaaagtaaactatgggcctgaaaagaccaaaaaagaaaaaaataataaatgttacaattagagtaaaactttttttaaatttttatttatttttcttcagacagggcctgctctgtcacccaggctggagtgcagtggtgcaatcctggctcactgcagcctcgctctctagggctcaactgatcctcccacctcagcctcctgagtagctgggactacaggtgtgcaccaccacagctggctaatattttaattttttttttttagagaccaaatctagctgtgttgtccaggctggccttgaactcctgggctcaagcaattcttctgcgtgagcctcgggatttcaggcaggagccctggtgcctggcctgcttaaatatataaagtttggggtagtaactaggtcgcttgttctgttaaccaaccaaagaccagataaacaaaagcccttgggctctaaaagtctttgggaagtcacctcaacaggggctctggtttctatgtgagaacattatgaaactatctagaacgctccctacttatcatcccttttttattacttctttataagttcttatctttggctatttcgtggtgtagagacacagtcgttaggttccaggactccagtggactttgtgtgcgttcatccactttgcttcctggggactggagcttgccgtgagtcatgtcccatctgatttatattggatctggctgtggagccatgactcacacgggctgcaggcctagctgcccagctcatcttctgaggaacagagggcaaggccagggctcatgtgctgacacctttttccttctttcctcttgccctttcaggacctaaagggagcatcgttaccgacagcaggcaggtgcgccttgccacaggcatcttccctgttatcagcctcctgaaccactcctgtagccccaacaccagcgtgtccttcattagcactgtcgccaccatccgggcgtcacagcggattagaaaggggcaagagattctccactgctatggtgagccatccctccgcactgccatcctgcccttctccaacagaaaaggacggggacgcaagtcagcaagccaccaggcatgtgacttcacctgtctactgtctgcttcctggaagaggcagtgaacacttaggccaaaaacaaggaagggaggatggaaggaatggccttcgtgctagggccctattgcggctaaactatgtctcgctgtttaatcactataaacttcctattctgaaaatgggctaggaacaacttcttggcttctctttcttcctgtctcagcaacttggaagcttattttagtatccagttccacaaatatttgggtaaaggttagctgtcacatgataggtaattgtccagaccctctgctaagctgaaggtttttacgtagtgtttgactctctcttgctttcaatattggctgacggtgatctccctccagggcctcacaagagccggatgggggttgccgaaaggcagcagaagctgaggtctcagtatttctttgactgcgcctgtccagcttgtcaaactgaggcacacaggatggctgcagggcccaggtgggaagcattctgttgcaacagttgcggagcgcccatgcaggtaattctctcttctgtctcctccacttttcctggaggtcagttttccaccccaagggtgatcagtgtttaggaggaagccatcagggacttgtaagtgctgagaccagtaatatcacctccattttagccagtcatccccatacactagttcccctccagagaaaccacagggaaaggttcaatttagtaatgtttcctttataaaggacagaagatcccatctgaactggtttgggatctgggggagactgggaatttatttgctgaagtcagtcattgaaaagtcccaggataggctgggcacagtgacacatgcctattatcccagcactttgggaggctgaggtggacagatcacttggaggccaggggttcaagaccagcctgggcaacatagcaagaccctgtctctaccaaaaaaaatgttatgagaaaaattccaggataaggctgcttaagatacagcttgatccaggggctttctgtccacccctctcagcttcattttctctgtgttagcccatcctcagatagacttccctcttacgatgcaggatggctgccagcagcccagcctgcggatttcctgccaaggaggataagagcacatgccactcaaacagcagcctgggcagagatgttactgtgtttcattgacctgagaactgtggctggaggaaaattagacatagttttcctccagccatttgggccagaggaaggagccatatgtgagccacatgccacaccctcagctgtagggcaagggccatgggactgagggtgagagggatccttatgagaaactgggttgggttgctgttgccaaatgagaaaatagatatcggcctttgaaacacagcagatgtccacctcggaggtttcccctctgccacaagtgccgtattcttcttaggggagtcatgagtgaaaggcagagccggttgtgttagaaagctaaacttggagacccaaggtcaaatgtaggacgatcgcacctagcacctttttctattagtttttttttttttcttttttttttttgagatggggtcttgccctgtcatccaggctgaagtgagtgcagtggcacgatctctgcttaccacagcctcaacctcccagactcaagcaattctcctgcctcagcctccccagtagctgggattacaggcatgcaccaccatgcccagctaatctttgtatttttagtagagacgagttggccatgttctccatgttggccaggctggtctcgatctcctggcctcaagcgacctacctgcctcgaccacccaaagcgctgggattacaggcgtgagccaccacgcccagcctttctattggttttcttttttttttttttttctttttcttttgtgagacagagtctctctcatgtcacccaggctggagtgcagtggtgcaatctcggctcactgcaagctccacctcccgggttcacgccattctcctgcctcagcctcccgagtaggtgagactacaggcgcccgccaccaccatgcccggctaattttttgtatttttagtagagacggggtttcaccgtgttagccaggatggtctcgatctcctgacctcatggatccacccgcctcgccctcccaaagtgctgggattacaggcgtgagccaccgcacctggccttctattggttttctgaggactttttcataactactagaaatgtttgtcatcaaggccgggcacggtggctcacgcctgtaatcccagcactttgggaggctgaggcgagcggatcatgaggtcagaaaatcgagaccatcctggcttacacggtgaaaccccgtctctactaaaaaaaaaaaataaataacacacacaaaaatttagccgggcttggtggtgggcacctgtagtcccagctactcgggagactgaggcaggagaatggcgtgaacccgggaggcggagcttggagtgagccgagatcgcaccactgcactccagcctggagaccgagcgagactccatctcaaaaaaaagaaatgtttgtcatctaaagtcctggccccaaaaagcgacaagaggggctatagaagtggaaagaaattgtgcactgtaccagttctgttccaaaaatgaaatctcaggtgggatcagctactgctgatacacttcattagaattgccgccattgccgccatcaaacaaaattcgctcagactttcgtcacgatgtattgttacaggagtctctttcccccatgaggtaagaaactatggagcagtcctgtaatgtaagcacaggcggtgttgataactgaccctggcattggaataaagagaaaactgacttccacagggagatgacgtgctgcgctgtggcagcagatcttgtgcagaatccgccgtcagcagggaccacctggtctctcggttacaggacctacagcagcaggtcagagtggcccagaagcttctcagagatggtgaactaggtgagactggctccctgctttggtcctccagccccttcccttttatttgttctgataccgttttggactcagggatactcagtactgatgggagaattggatgtaattatccccatgccagccacaagatggctatataggccagtgagtccaaaccctgaccagctttgttactgtggggcccttgaaaaggggccaggtgatttcagctgttgttttcttctgcatctgattgctaagttgaagtacccctgccaactaacgggtcatcgctgacatccgtgagctgtgtgcagttccagaagttgagtgtcatttattttaattccagggcctagtgatgtaacttcctagaagggcggttcttccctcctcagagctagtctctgctagagagcagtggggcgtgagcccagctgataggagtgtcttgcttttgtctgagacttgcggagctccccattgcccttgaaaaccctgccttagagcttgacatcatgggatttttatttaccctgctttatgaaagttgacctttagcttagatttcagggtcaagagaaatcatggccgtacgtgaaaggtagagttggtcgagttgggaagttaatgttgaaaatacagtgtaaatgtggggaggcctcccctagcgcctttctccactgacagagaaaacagaagaaaacagcagctttattggaacagacattgtgcgttggtgacaacccagggaggccagggggaatttccacattcagcccagctgattcagaggatttgagacctggattctcattcctaggactgggcttctgtctatagtgagacgtctttcctctgcattgacagagcgagctgttcagcggctgtcggggtgccagcgtgacgccgagagcttcctgtgggcagagcacgccgtggtgggagagatcgcggatggcctggcccgggcctgtgctgccttaggtacagcatgagccttcacgttctgcgtcgggaacagtctgctgtgggcacttcgccgtggccccggccttgtctgcctggttaccccccgctctgtaaactgagggtgctccccctctcgttccatttcctccccctgaaaatatgcatccacagttgacagtggttcttttctggaacaagatttttctcttctcacaggagactggcaaaagtcagccacccatctacagaggagtctctacgtggtggaggttcgccacgggccgtccagtgttgaaatgggccatgagctcttcaaattggcccagatctttttcaacgggtgagtccctttcccacttcacagggcacacactgttcctttcctaggctcttctgggtattactttttttctatggtgtttttaaaagcatgttgaaacttctttatttcctctttaggagagatctttgccttctgttttgctaacaaacataacgctttagaatttcctcctgggaggcggagcttgcagtgagccaagatcgcgccactgcactgtagcctgggcgacagagcgagactccatctcaaaaaaaaaaaaaaaaagaatttcctcctgggagatatggggaaagcttttagatctcaagtgagtttcccagagagaacttggccaggcagccccacccaccctccagtatagctctccttctggttgttctctggttcgtcacagcccctttggctgtctcattcccagcactctcagctccaggctctctgccttctccctactctgcatcctcttccttttaaagcgtttgcttgaaccagggctgattttacccccagacaacatgtggcattgcctggagacttttttttttttttttttgagaaggggtcttgctgtcttgcccaggctggagtacagtggctcggtcacagctcactgcttcctgcaactcctgggctcaagcgatctctggagacattttggattgtcatgacttggaaggggggtgctgctggcatctattcgaaagaggccagaggtgctgctaagcatcctcccgggtacaagacagtgccccccccaccaaccccagcaaagaaggagccagcaacagtgtcaatagtgtcagggtcgagaaaccctgcttttttgctgctgttgtttgttttttgttttaaatcccctgttctactttgaaggttaaaaggaaagaacagcacgctgatgagctgatgccaaatccacttttgctactgagaccatttagggcccaatttcaggatttccgggtggaacctccaaccctggtaaagctgcccttggtgtatgtggctatgagaaagtgcttaaagcttcaacctaaggctgtgctgagtgggcctggtacccaagacacagagacattctgtttggtcagagagagagaaaagggctgcagagttaggtcagaggtcagccctaagatggtcaccctaaaatgaaaactgctatgtaaacctgtggtaaataccagatgaaaactttgaggccgggtgtggtagctcacgcctgtaatccagctgcccaggaggttgaggcaggagaatcacttgaacccgggaggcggaggttgcagtgagccgaggtcgcacaaatacctgggcgacaagagtgaaactcttgtctcaaaaaaaaaaaaaaaagctttgagatttgcctcgtgttctcaggatcctggcgtctatactatcttttataactgttttctcacacttttgttttgcagcgtgtttgtgacagtgtcttacttactgttctagattgtaggatccttgatgacagaaatgatcttacattcttcacggtgtgtgagtaggccctcaattaacatttgcctcacaaatcagtgaactaactcctcttacctcccttggctcaggtttgcagtacccgaagccctgagcacaatacagaaagctgaggaggttctgtcgctgcactgtggcccatgggacgatgaaatccaggagctccagaagatgaaatcctgtttgttggacttaccacccacccctgtagggcctgcattgtagggttccaggaggattttgacccacagaaaaggagcccatggaacacaagttaaagaggttttgctggccaggtatggtggctcacgcctgtaatcccagcactttgggaggctaaggtgggcggatcacctgatgtcaggagttcaagaccagcctggccaacatggtgaaaccccatctttactaaaaatacaaaaaactagccaggcgtggtggtgggcacctgtaatcccagctacttgggaggctgaggcaggagaatctcttgaacccaggaggcggaggttgcagtgagccgagatcgctccactgcactccagcccaggtgacagtgtgagactccatctcaaaaaaaaaaataagaggccgggtgcggtggctcaagcctgtaatcccagcactttgggaggccgaggcaggcagatcacgaggtcaggagatccagaccatcctggctaacacggtgaaaccccgtctctactaaaaatacaaaaaaattagtcgggcgtggtggcggacgcctgtattcacagctactcgggaggttgaggcaggagaatggggtgaacccgggaggaagagcttgcagtgagccgagatcgcgccactgcactccagcctgggtgacagagccagactccatctcaaagaaaaaaaaaaaatattaagaggttctgctgccagatgtgggttctgtgggtcgggtgtgggttctgtgggtcgggtgtgggttctgcagaccaggtgcggattctgtgtaggttctgcaggcccagtgtagaggctcacacctgtaatcccagtactttgagacgctgaggtgggaggatcacttgagcccaggagttcaaaaccagcctgggcaatatagtgagaccgtatcactacaaaaaagtttttttagttcaccgagcatggtggcacatgcctgtagtcccacctactcgagaagctgagatagggtcacctgagcctggtaggctgaggctgcagtgagccaagatcgcactactgcactccagcctgggtgacagagtaagaccctgtctcaacaaaaaaataacaggttctgttgctgctgagctttcgtcaggaagataagactttcccaacagtccgaagcctaggatatgagggctgaggaggactcaaaccgttgcagtcagagagacacctattttggtgaatattttttgaaatagttaagtggcctccagtacaaactcccagttcccagaaaagacttaaaactagtatctggagattccaagtcctttaaaaggattttagctgatctgcaggcatctggatgttagcctggggttttggctggattccacctcgctcagtgatgatagtctgtttccctggaacattcctgtggttttagtagtaatgagatgtgtgcaccactccagtgggaactgaagctcttagtagttacattgtaattaaaaaagaattataaaacaagaaatcagcaagcctgcttacctccagagacacaccgttccacttacagtatctagcttcctcgactcctttgttaaaatcgtggagtatgaaccgtgaccagagaagtaaatatggagccgttttattgagcagtttcctccagggatgacggctgtcagtgtgtttcctgccagttttccagtccttactctctgcccttcattctgtactcttggcagagtcagtaaccaaccactaataaaatcaaagttgtagtaaagactttataacacatatgcctccttctgagttgttggttttgttttgttttgttttgttttgttttgtttttgagatggagtttcactcttgttgcccaggctggagcgcaatggcgcgatcttggcttacggcaacctccgccttccgggttcaagtgattctcctgcttcagcctcccgagtagctgggattacaggcgcccgccaccacgcctggctaattttgtatttttagtagagacgggatttcactatgttggtcaggttggtatcaaactcccggccttaggtgatttggcctcccaaagtgctgggattacaggcgtgagcccggccctttttttttttttttctttttttcttaagacagagtctccctctgtcaccaaggctggagtacagtggcacagtcttggttcaccgcaacctctgcctcccaggttcaagcgattctcctgcctcagcctcccgagaagctggcattacaggcattcgccagtacgcccggctaattttgtatttttagtaaagatgggatttctccatgttggccaggctggtcttgagctcccgacctcaggtgatccgcccgcttcggcctcccacagtgctgggatgacaggcgtgagccaccgcgcccggccctgagttctatttgttgtcaagcctgaaaagagactccttttctccaccagacctctccaaactggcgagtagaatacagacagtatgagaactggaggctgcaggggattctaacaatgctgagggtatggacgttgctgtttgtggttcagatttaagagacagaaggcagaaggtagggatgatagctgccttccaccaggatgtgtagcgacagcccagaccccgttccagtcagaaggttacgggattctctaggtcggaaccctggttgctgtgttaccactggtgccaagtagttgaggtgcattcgtggaaaagaatgccagatccacgctgcttttgaaagcttgcccaccctcaccatgcccaagtgcccgttggttgccattgcattatgatcaggaaatcagtagccccagagatacctggcaatagctttttgagaatctggaatacagttagcactcaaacatttgtagaatgaagggcagtagaattatcatttctcctcctgtctaataactgtgacaagggagtggccggtgactttttttggtagagctttttcaagaaaaagtttagtcctacggacagttcggtagttattctacttcagacactgggcatgtttcatgttcttcaaaaagcccagttatactttggttttttgttgtttgagacggagttttgctcttattgcctagattggagtgcaatggcgtgatctcggctcactgcaacctccgcctcccgggttcaagtgattctcctgcctcagcctccccagtagctgggattacaggcatgtaccaccacaccctgctaattttgtatttttagtacagacggggtttctccgtgttggtcaggctggtctcaaactcctgatctcaggtgatccgcccgcctcggcctcccaaagtgctgggattatagccatgagccaccacacccggctgtactttataaaataggcatacctccttacaaagaatatgttcagaatctttacgtatcgggtccatttccttaagttacaaatggcctctcctatctgtccatgtgttgtttacgagcaggcttccctgattatgggggcaggaaatggcctcccgggaggatcactgatcctagtacagaaatacccccagagcagagaagctgtccgtgccttatccaacacaggtaactaagagttcttatgaacggtgacttcctgcagtgtttagataaaaccaggctagaagtagaggaccaccaaattcctcaagagctgtttctcttcatatgatatttcgcatagctcaaaataggaggaggaacgaagtaacagaagttagggataaagctcttttattgtatgcattgaaaccttacaggggcagccttcgtgtcctgtggaatctgctgtccctcgggttttcttctagggtattggaatattaaactgggatattaggggcccctggggtccagaatcttgccaatgaagagaagggcccctgtgtctgtgtccctcagtacgaagatgaaaggctggttaaggtgatagtccagcgggaaggtgaggtgggcaggctgcagccctgggctgggggtggttcccgccccatcctcgttccactcaaagccagcccggtgttccacctgagtcagcttgatgggtttgcctgtgatcttgctaaagtctggtgaatcaaacaaggattgcagctctgtagagatggagagagatttccgttaaaaccctgccttccccaacaccccaaccaagggatccctttgcaagcaagctgggatggcgcagcactgttgactttctctgaggcctgaagaggtctgagctgaccgagggtggagtgacttgcccaggagcatttagcaagttaggtcaagatgagaaaacaggtcagacagactcgtcttgagaggcagtgttgtgagcgcctgtcagggaggtctgctcgtgaggctgaggaatgagtctgatgagagaaggcagttcagccttcccttctggcacgatgaggattaaggactcatccacggcccccctacaagcctgtggagcccttgcgttctgcttagcacagtggaaggcccaaagaccctgccccaccccatccacccaccaagagcgaaagggtcttcagacatactcatctcctgcagggacttggtgacttcgccttcataactcagcttcagcttggggacagtgaggaccgcctgcacggtcttcagttctcggtctatgtcatgaatgaactcggaggtgaggctctcctctatcaaggtcaaattctgggtcactttcaggggcaggaagaagatgatactcatgcttccggtcaagggcagctgggcaatctgagacaagtgagaaagcatgtggttagtccttcagagcccaaaagccggggacagacacagccaggagctgccttccctctcccgtgacggggccctggtctcgtccttcatccagcccctcatctatttaacaattccccttccaggttatagctttctggcagtgagccatctcctgaggtttcttcagaaaggatgctgttggcctttcttaccttggcctaataccaactgaagttgtctgctgaaagaatgttctcctgtggtttaaggagctagaattgaatttcaggtctttattttctcccaaagtccatcggccaacatttactgctcatttgttaaatagagagcactggactaagacagggagaaccggggataggaataccgaaggggccgtaagagggcttggagacttcaccccatccacccaccaagagcaaaagcctcctttgaacagaggctcttaacctaaggtccatggaacagatggtgtcagggatcccaagagtctccgaaatcgttgacagaaacgtgtgtgcacacctggcggtgctccctcgggtttgaggcactgtcgtcagattcccagagagatccgtgtgatagccgtggcccaagaaaggttaacagttacagacttagaactaaaagaagtcaggtacactgaaagccttagaatgccaacgattggccaagcgtggtggctcatgcctggaatccctgtgttttgggagaccgaggcaggcggatcacctgagtttgggagtttgagaccagcctgaccaacatggagaaaccccgtctgtataaaattagccaggcatggtggcacacgcctgtaatcccagctactcaggaggctgaggcaagagaatcgctttaacccagcggggcggaggttgtggtgagccgagatcgtgccactgcactccagcctggccgacagagcgagactgtctcaaaaaaaaaaaaaaagatgccaacgatttggagtttgtcattatttttcaaagtttggctttaaattctagaaataggagtctcaagagaacaaacatgtgggtgcccagtctgagggcccatttcctattaccttattcgtccttacaacaaaccctgggagggtaagtgttggtaacgatcccctgccccatcttaagaggaggaaagctcagacatgttattaacctgctcaaagtcacacagcaggcgacatgtagacagctgtcggatctcaaaggtcattttattcccactaccctgttttgcttctctatcctctccctccatccaccccccaccctgcccctatccctacagaccttgcagctgagatctgaatccaagccatagcgtaaaacagccttagggtccgacatcatggggaccctcacggtcctctcttcatccaagtagaaatcctcgagggaagtctttctggagtcaaactttgttacccactgccctggaaagaagtgtatgacatagtctgagccccaggagaccagaaagacagtggcgccatgctgtgtccccagagcacgttgttgaaaattgccccactcaagggagcttagctgtcaggggctctgaggcctcagggaataggcctatctcagtgtgtgtggcttggagcctacagttatttccaggaccccaagtgcccttcaccagcaaactccgatggcaagacgttgatttggttgattagagtctagattgtacacgttctgtgatagcctgcaggaaaagtaaagtggtagccgggcatggtaactcacacctggaatcccagcatattgggaggccggggtgggtggatcacttgaggtcaggagtttgagaccagcctggccaacatgaaaaaacgctgtcctaaaaatacaaaaatggccgggcacggtgactcacgcctgtagtcccagcccttcaggaggccaaggtgggcagatcacttgaggtcaggagtttgagaccagcgtggccaacatggcaaaaccccgtctctactaaaaatacaaaaatggccgggtgtggtgcctcacatctgtaatctcagcactttgggaggccaaggcggatggatcatctgaggtcaggagttttcgagaacagcctggccagcatggcgaaaccccatctctactgaaaatacaaaaactagccgggtgcagtggtgggtgtctgtaatcccagctactcgggaggcagagacaggagaatcacttgaacctgggagccagaggttgcagtgagctgagatcacaccacagcactccagcctaggcaaaaagagcgaaactccatctcaaaaacaaaagaaagaaaagtaaactggtgtgcactcctacagcagtgtctctgggagacagtcaaagaaggtctgagctgggaaggacctctgaggtcctctggattaagtcctcttgtagctgaaaacaggccaaagccaaagaggtgaagtaactggctgacgctctggaagccagctgatggccaagcccctttagtttaatgtgacctataatatcctggacccagagctgttccttcactcactagacatcagtgcttgaagtaggaagccgtttggattttgtccaggctcgggggccgctcttgctggtgcctcagatggttacaaagcgttttaagggagagtttgcccaacccctccccctaccccaggccaccccacaaggccttatctgaacagggctggccccacacaagacccgtggaacaagctccaaacacatcaccacagcctagaaggatgtcgttggccacctgccatgtcttgggtacagaactagagctgttagaaaacttggagacaacataaaaaggtgtctatgaagtagatatattatcctcacgttaaaggtgagaacgtaggcccagaaaggttatgaaatgtgtgcagagttcctcagctagtacaggcagagctgggatttaaaccttgtctgatttggccagcgcagtggctcacgcctgtaatcccagcactgtgggaggccgaggcgggtggatcatctgaggtcaggagttttcgagaacagcctggccagcatggcgaaaccccatctctactgaaaatacaaaaattagctgggtgtggtggcgggcgcctgtaatcccaactactcgggaggctgaggcaggagaagcacttgaacctgggaggtggggaggctgtagtgagccaagatggcaccactgcactccagcctgggcaacagaatgagactccatcttaaataaataaataaatcttgtctgactcaaaagctgggaaagccccaaacagacccagtgttcattcttcctccctctctgctcttctgtctccacaagtctctcactctatagacattcacgccttgccttggatttgatgacaagcaggtaagcttcaggcaagcacagttcccagatcctcccccagctgtgacccagactccatgctgggcaaggtctttgacacctccctttccaagccccttctgatgtctgccatccatccttggtcaaacaagaagtggaaagttggacatggtaatcccagcattttgggaggccgaggtgggaggatcacttcagctcaggagttcgagaccagcctcggcatcatagtgacaccctgtctcttaatttaaaaataaatgtaaaagggccgggcgcagtggctcacgcctgtaatcccagcactttgggaggctgaggcgggtggatcacgaggtcaggagatcgagaccacggtgaaaccccgtctctactaaaaatacaaaaaattagtagggcgcagtggcgggcgcctgtagtcccagctactcgggaggtcgaggcaggagaatggtgtgaacctggaaggcagagcttgcagtgagccgagatcgcgccactgcactccagcctgggtgacagagcaagactctgtctcaaaaaataaataaataaatgtaaaagggccgggcgcggtggctcatgcctgtaatcccagcactttgggaggccaaggtgggaggattacttgagcccaggagttcgagaccagcctgggcatcatggcaacaccttgtctcttaatttaaaaataaaaagggctgggcgtggtggctcaagcttgtaatcctagcactttgggaggctgaggcgggcagaccacctgagctcaggagttcgagaccagcctggccaacatggtgaaaccccatgtctattaaatacaaaaaattagccgggagtggtggtacatccctgtaatcccagctactcgggaggctgaggcacaagaattgcttgaacctgggaggcggaggttgcattgagctgagatcgcaccactgcactccagttaggactacagagtaagactccatcgaattaattaattagttaaaatacagtaaaataaatgaaaaagaattggagacgcgctcacccttgaagtgcgccacaccgagaaggagaatgctgatctcatcgggaatttcctttgtggacctggcgagcttccctttcatctgcgcctgcacccagttgttgatctcttgcaggtccaagcgagggttgcccgtcaggactctgggcctggtcccatatgacttttccagaggtgccacaaagctggattttatgcgcagctctgagaagaggcggagcagaggttagcgtatgagactcgacgacaagcatcccgtctttgagagcctgccaggctcgggttctggtttagcgctcagcaggccctgacttcccagccagcatcttcctgtgacttgccaggacttctgctggcatccccaggcactggccaggggggcagcagatttccccacatcgcgccactgccctccctgcccctcccaccgtctcctgcagcccacttcctctttctgagcctctttgggctcacgggcccttcctccacaccagtgccaggccaggcctgggcacacatgatctattgtttagaaacgggccgagcgcggtggctcacacctgtaatcccagcactttgggaggtcgaggcgggcagaacaccaggtcaggagatcgagactatcctggcaaacacggtgaaaccccgtctctgctaaaaatacaaaaaagattagctgggcacctgcagtcccagctactcgggaggctgaggcaggaggatggtgtgaacccgggaggtggaggttgcagtgagccgagatcacgccactgcactccagcctgggcaacagagcgagactccgtctcaaaaaaaaaaaaaaaagacccccccagcctgcagcatggagcccacatgcctcaggcaacttgggctgcaaaggcgactcactcttctcaaagacgatccgggaggcactcttgaggttcttctggggggcagtgaccgtgtcaaggagctccttataggtaccatggatgtctgggctgctgatcaagtcatagtagagagcccggtgaatgatggattctgttcgctgctccgctcctgccagagacaaggatgtggacgttgataactgcacaccagggccccaaatcaagccccctcccagaacacagacactatactcatcttttttgtctgctgagagcccaagtaggctgatcttcaagacaatctaggtggccaaggaattttcatccttagagattttcctgaagtaggttaaaggcatcaggcctggaaggtgggagtgagggagtgagaggtaccagtccctgtacttctcccatcatagcccttaagattattctggccaggcgcggtggctcacgcctgtaatcccagcactttgggaggccaaggcgggtggatcgcttgagcccgggagtttgagaccagcctaggcaacatggtgaaaccccgtctctactaaaaatacaaaaattagctgggcatgatggcaggtgcctgtaatcccagctactctggaggctgaggcaggagaattccttgaaccagggaggcagaggttgcagtgagctgagatcacaccactgcactccagccttggcgacaaagcgagactccgtctcagaaagaaaaaaaaaaaaaaaaaaagactattctgtagtgagctggtattagttcccctgtgaacccagctgtgtcctcggtgagggcaagcccacacctgcttgtttgcagttacatcccaggaacctaggctagcaccagcttggttaaggaatgcaagaatgtgccttgaagtcactgtgtcaataagcgaaccctgaggccaagcgccatgtcagtggtgcccagcccctttcggggagctggggaatcgtgtgtgtgcagcccctgagctcctgcttacacagctgggacccccaggccaggcccctggtgctacttcacccctcgctgaactgaaatgtcaataaactcagccacgtttacgcagaggccacagggggcctctccaggtctgcctggggcttcctgcatctgagcactcacccagcgagagggccgagagggccgtggccacactgagaggagacaggagcacgttggtcgtggggctcgtgctggatcgcacccggtacaggtcatagccgaagttggagacagccgctgccagcttgttcacggggactttgaagaaaggatcctcctcctccaccagcgcccctgtgctgtcggggtctggggagccctggcaggagacaggaagtcttgggtttgagttcagggactcgcagagatgcacagggactgtctcctcacggctttgtgtagggtggtggttctggccccttggggctgtccttcctaatttttctgtgtttggcctaaaacgggaatgagttttactccctgatcacgcatgagctctctgtggagagacagcgcagaagagagatcagctgttttttttttatttgagacagagtcttactgtgtcacccaggctagagttcagtggcgcgatctcagctcactgcaacctccacctccccggttcaagcgattttcctgccttagcctcccaaatggctgggattacaggcatgcgccactgcgcctggcctcatggccaggtttaaacacttgtgacctataagccgaaacctatgacccacttttttttttttttttgagacggagtctcgctctgtcgctcaggctggagtacggtggcgtgatctcggctcactgcaagctccgcctcccgggttcacgccattctcctgcctcagcctcccgagtagctgggactacaggcgcccaccaccatgcctgggtaattttttgtatttttagtagagacggggtttcaccgtgttaggcaggatggtctcgatctcctgaccttgtgatccacccgcctcggtctaccaaagtgctgggattacaggcatgagccaccgcgcccagccccatgacccactttttaaaaaccatcagccgagtggctcacacctataatcccagcactttgggaggctgaggtgggtgaatcacttgaggtcaggagttcgagaccatcctgggcaacacggtgaaacccgtctctactaaaaatacaaaaaaattaacggggcatggtggtgcatgcctgtaatcccagctactcaggaggctgaggcacgagattcgcttgaacccaggaggcagaggttgcaatgagctgagatagtgccactgtactccagcctgggtgacagagtgagaccctgtctcaaaaaataaataagtaaataaaaataaatataaatataaaaattgggagccaggtgcagtggcttatgcctataatcccagcactttggcaggccgaggaagatggatcacttgagctcaggagtttcagaccaacctgagcaacatggtgaggccccatctctactaaaaatacccaaaaaattagctgggcgtggtggaacgtgcctgtggtcccagctatttgggaggctgaggcatgagaattggttgaactcaggaggccaagattgcagtgagccaagatcgcaccactgtactccagcatgggtgatggagtgagactctgtctctaaaaaaagaaagttaaaaaaaagaactcagtttttctttctttcttttttttttttttttgagacggagtctcactctgtcgcccaggctggagtgcagtggtgcgagctcagctcactgcaacctccacctcccgggttcacgccattctcctgcctcagcctcccgagtagctgggactacaggcgccccccaccacacccagctaattttttgtatttttagtagagacggggtttcaccatgttagccaggatggtctcgatctcctgacctcgtgatccacccacctccgcctcccaaagtgctgggattacaggcgtgagccaccgcgcccggcccctcactgcagtcttaatctcctgggctcaagtgatcctcccacctcagcttcccaagtaggtagtaccacaagcacttgccaccacgcctggtaatttttgcttttttgtagagacaggggtctcactatgttgcctatgctggtctcaaactcctggattcaagggatcatcctgctccgcctcccacactgctgggattacaggtgtgagccaccgcacccggcagaactgagtttttatttccgcccattgccagcccctgtcgagtaggtgtttggtagatgagaaataaatgagtggccacatggccctgtagaatgggtgtttttatcccatttcataggcaaggaagcaaagactgaggtaagggttgtctagggtcacaaagctaggaagagggagacgcagaattcatactctgacctcacgaaagtccagggctctcgccaagatgcccagctgctcttgtccctcaagggtgggcctccgccaacactcaccccataacactcatatggcccaggcttccctccatgtgcctgtatctgccttgggaacccagctgcgccctttctgggcaggagagaggtcactccataccctcactccctgccacagcctggtcagtatccgaacaaatgtccgggaacatgacctgctcagtggagcccccactaggaagacaaggtaatgagaaaagatcctggccaggtgcggtggctcacacctgtcatcccggcactttgggaggccgaggcaggagaatcacttgaggtcgggagttcgagaccagcctgaccaacatggagaaaccccgtctctactaaaaatacaaaatgagccgggcttggtggtgcatgcctgtaatcccagctgcttgggaagctgaggcaggagaattgccctggacttgttaaaagtgcttcagatttttactcttttgggatcttattcatgtccctactccatcccctgaaaggcaaggcaagacattttctctctgttttgctgctggagaaactccagccctagagaaataaaggcccaagcctggcctggaacctgggtccgggttccctgtcctgtttcccgtgctgcctgccaaggaggggcggggaatgctgaccacgccctccccgcctgcctactgacctcctccggggggctggcagggttctggcagctgctgtgcccgaggagggctccaatgcagaggagtagcaccagggcctgcatcctggggcctgcaagaaaagaacgaggcagcaagccgctctcccccgacactgcactgccccgctaccccttcctggccaccccagccaggacccaggggttgggcagggctagtcactttcccccaccccctgcagcgaccacccctcacccctccaggcccccagaagtggaccctcagcttgatggcccatccctcccagcaaggttctcccgcccctccccctgcctcagggcccacagtcataccataagcttgtgcttttgttccactgtctgcgtcaggggaccctcctttaagcctaaagcttttatttatttatttatttatttatttatttatattttattttttgaaacagagtctggctctgtcgcccaggctggagtacagtggagcgatcttggctcactgcaacctccgcctcctgggttcaagcgattctcccgcctcagcctcccaagtagctggaattacaggcacctgccaccatgcccggctaattttttgtattttaatagcgatggggtttcaccacgttcatcaggcttgtctcaaactcctgacctcaggctatccacctgcttcagcctcccaaagtgctagggttataggtgtgagccattacacctggcccctgaaccaatagcttttaaagatccagagcagtggggccccagccccagcagggcttctccacgtggagtatggcccagcacaagtgtatgctaaagctttgtcctggaggcagctgacccactccggtgataagactttgggcaacccctcccaggagaatggggcagaacccaggtctcctccatggaatcaccggataccaagcatagaggcacccagtccggcacgtgctgtccctccaaattctcaagctgtctttggacttctgtggcctcacaaggcagctcattcccttctcccacagttccctttcaagagctcttcctcccatggttaggagtgcagggcctagggtcagagatcctgggttcacatttgaaatttttttttttttttttttttgggagacaagatcttgctgtgctgcccaggctggagtgtagtggctattcactacacaaccatagcactccacagcctggaactcctgacctcatgtgatcctcctgcctcagcctcgtgagtagctgggactgcaggcgcatgccatcacacatggtctcagtgctgtgtcttagtagctctttaaatcaccattttttctcttgtaaaatggaaataaaataacctactattaaaataaaacaactaccgagcacagtggctcatgcctgtaatcccagcactttgggaggctgaggcaggcggatagcctgaggtcaggagttcgagaccagcctggccaacatggtgaaaccccatctatactaaaaatacaaaaagtagccaggcgtggtggcaggcccctgtaatcccagttactcaggaggctgaggcaggagaatcacttgaacctgggaggcagaggttgcagtgagccgattatgccactgcactccagcctgggcaacagagcaagacttagtctcaaaaataaataaataaaataaaataaaataaaatagccaggcatggtggcacacacctgtagtcccagctacttggagggctaaggctggagaatcacttgaacttgggaggtggaggttgcagtgagccaagatcgcaccactgcactccagcctgggcaacaagagtgaaaactccatctcaaaaaaaaaaaaaaaggccaggcgcagtggctcaaacctgtaatcccagcactttgagaggccgaggcgggtagatcacctgaggtcaggagtttgagaccatcctggccaacatggagaaaccccatctctactaaaaatacaaaaattagccgggtgtggtggcgcatgcctgtaatcccagctacttgggaggctaaggcaggagaatcacttgaatccaggaagtggaggttgcagtgagctgagatcgcgccactgcactccaggctgggcaacagagcaagactccatctcaaaaaaaaaaaaaaaaggaaaaaaaaatgtagaatctgaacagcgttgtctcccctgccctggcccccaacacatcatccttcattatccatttatatacacaaacatccacccacacagcacacacactttttgacttcccagaacaaagtggatcagaaaatttgggaggacgttgtgtgattgttggctctcgtccttcaaattaaatcagataatccactggacaatatcgtgaggcatgaaagaagattgcctttgagtttactcagcttaaggcaggacgggcagcaggaagcagcctggttttctttctaaaccccgcctcgagccgcagacctctgcgttcccagccagctgctcttgcacgtggctgccctgacatgcagggagaaaactttcgtgtagacaacaggaaaagctttctgcagcgcaagacagaggcctcaccaccatccaggcctacagctggtctccacccggctggggccagccccacccagctgccaggagcctgcctcccctgagcctctgcagactggtttattagagaccaaaaattcagtgaggtacacaggaggcaaggctagaagagaagttgttagttctagttcctctggcccaagtaagaaattaagggaggagacaggctcatcccggcatagttttttttgtttttgagacagagtttcactcttgtcgcccaggctaaagtgcagtggcgcgatctcagctcagtgcaacttccacctcccgggttcaagcaattctcctgcctcagtctcctgagtagctgggattacaggtgcccgccaccacacctggttaatttttatgttttagtagagatggggtttcaccgtgttggccaggctggcctggaatcctgatctcaggtgatccaccagcatcccaaagtgccaggagtacaggcgtgagccaccatccctggccattatcctggcatagtatttaaggaaactaaagtcacaattcaaatggacttgaaggagcgactttagtcttggtgcctacagaatctaagcccaaaccccagatcaggtggtagatgattgtcacaatgtgggtaggctgaggtgaggtgagggagcctggcagggaagggacatgggtccaaaggtggccccgagctagacacagggacccagagtattaacggcaagtctgaatcctccacttcaagccatctggataagggaagaggagagatgattgaaaaccctacaagggcagtgagagggcaagcgtgggggtctgcatggacgcccctcagcacacacgcaataccctgtccacagtggttgctcatgggctgagcaggcgaccgctggctggctgcagccacagacaatgatgccatcctgtccaaagggcagtatccaagccccgctctcgtcctagcaggcgggggagggctcagggagaggtagataccctccctgctgggccaaggtcaggccttattttctgacaattgcccacatcaagaaacacagaagcttttgtgatcttgcctccacgtgaggcggatcaactcaagccaatacatgtgtttcagattaagcccagttaggagacaaacagcctccaccgccacctccccctcttcccagaaccgcacagccttcagccacatggcagtgggcctcggagatagcatggggaagggcacctccccctcccctggctctccggaggggattgaggggtcctctctggcccacccatggtgacccagccccaaacaatgtttcctgaagctttagaagctgaatgagtcagcccagggtgccgtggagttgcacttccccacaccccagaagcagcagccccaagaataggactccctgccctccaaccccacggaacctgggggctaacgttgggttagctaacaccgggtggggggcctaggctggacaggggcggggtttctgggaatcctgctgagacctacccctcccagtggcttggcaggcagcagaaagggttcatctcggacggcccttgtctccagcactggcagctgggcccccatgccctatacacctgccggcctaaatagtggtcattgtttgccggaggccacaacctcattggtcgcccagccttgactcacgtagccaaagagagtgggtgggggctggctagaaggacccagctgtcctccatcccagccctcagccagggcgccgaggccagcggtttggtggtgctgggaaattgccttaacagtcagcaccagctgattttgaaaaagtagcagggagccgagggagcaggggccagggctgggctgcagggcggccgccttcctgactgcccttggtggaagcagctcccgtgagcctccttgcctcgggctccagtcttggggtgctgctcagacccgacccagcagcttagctcccctttcctccccatgaccgcccctccgctgtttcccactcacttcattcaaaagcctttccagcctcttccgtcggtgcagtgggatttggggatcactgggtcctggccttcggccttgtccccccagctccctctgccctctctcatccactcacccttttgcccaaattgcaggggctgctgtctccgcatttcctctcccttgcacccctcttttctgctccctggagtgcccctgcctctcccctgtccccccagcccaggggagcctctcccgccgtccctggcatcagagcagccagggagctgctttacctgtggatacgctgcagctccacacccagcctagtccctctaagcctgcacactgagggggctccagccagcacagagctttttttgctgccttctaatccagcgtccagcaggcttcagattacagctactcctttcttaaagcgacctgcactcaatttggattctgtgattgcatcactgtctcgtgttaactttaacccactgctgcaccaccatccattacgcctaaggcgcacacatttgcacaccttcctcttcctttagattttccttcaggggccgggcgcaggggctaacgcctgtaatccagcactttgggagactgaggcaggtgcatcacctgaggtcaggagttcaagaccagcctggccaacgtggtgaaaccccatctcacctaaaaatgcaaacaaagctgggcgcagtggctcacgcttgttatcccagcactttgggagaccgaggccgggggatcacctgaggtcaggagttcgagaccagcctagccaacacggtgaaaccccatctctactaaaaatacaaacaaaattacccaggtgtgttggcgcgcacctgtagtcccagctacttgggagtctgaggcaggagaatcacttaaacctgggaggcggaggttgcagtgagctgagatcacaccactgcactccatcctgggcgacagagcgagaccccgtctcaaaaaaagaaaaaagaaaaaaagatagaaaaatttctcaatatagtgacaaccttatatttccgcctcagttctttcccgtcaccataaccaccatcttgaatttgatttttattattttcgtacatttctttttacttttaccatgtaagtttttgtccctaagtgatatatagtatcagtttgcatgttcttaaaccttaggtcaatgtatcacactgttcttttttttttttttccaatggagactcactctgtcacccaggctggagtgcaggggtgcaatgtcggctcactgcaacctccgcttcccgggttcaagaggttctcctgcctcaccctgctgagtagttgggactataggtgtgcacgagcatgcccggctaatttttgtatttttagtagagacagggtttcaccacattggtcacgcttgtctcaaactcctgacctcaggtgatcccgcccccctcagcctcccaaagtgctgggattacaggcgtgagccaccgtgcccggccattgtcttttcatgtttatggcaggggtgtccaatcttttggctcccctgagacacattggaagaagaattgtcttgggccccacgtaaaatatgctaacattaatgataccgaatgagctaaaaaaacaaaaaacaaaacaaaacaaaatctcaaaaaaaatctcataatgttttaggaaagtttacgaatttgtgttgggctgcagtcaaagcttttctgggccacatgcagcctgtgggtcatgggttacacaagcttgttttaaaacaagtttttaattttaacaccaacattttcaatcttttcttttataatttgtgcttcttttggtatcttttttaaaaaatctcttcttccccgagatcacgaagggattcatctatactttcttctaaaacgtttacaattttaggccgggtgtggtggctcatgcctgtaatcctaactatcgggaggctgaggtgggtggatcacctgaggtcaggagtttgagaccatcctggccaacatggtgaaaccctgtctctactaaaaaaaataaaaataataaaatatttacagttttgtctattgtatatgtgtttgtattagcttttgttttgtttttttgtttgttttgttttgttttgtttgagatggaaccttgctctgtggcccaggctggagtacagtggcacaatctcggctcactgcaacctctgcctcccaggttcaagcgattctcctgcctcagcctcctgagtagctgggattacaggagcacgccaccacgcccggctaatttttgtttttgtttttgtttttgtgttttggtacagacagggtttcaccatattggccaggctggtcttgaactcctgaccttaggtgatcacctgcctcggcctcccaaagtgctgggattacaggagtgagccaccatacctggcctgtatttgctttttaaagcagaatactatttccaaaaggatacaaaaaagagatgaaaaacactgcatcccaagagtagaatccagtgactggaaatcagaatgagaggaaggcttttcactgggtgctttttgttgcttttgagttgtgaaccacgtgaacaaaatacctattcacaaataagcaaatcatttaaataagtccttagtaaagtttctgggccaggtgtggtgactcatggctataatcccagcacacttgagcccaggagttggagaccagcctgggtgacgtggtgaaaaatgcttgcctctataaaaaataataataaataaaaatcttaaaatcataaattatacagaagagttctcttttgtccgacccctgttagaagaatgtgtcctctcctgcagggtcagcgtgtccggccctcaaagatccttccccaccttcttttttttttgagacggagtctcactctgtcccccaggctggagtacagaggtaccatctcggctcactgccacctccacctccaggattccagtgattctcctgcctcagcctcctgactggctgggattacaggcacgtgccaccactcccggctaatttttgtagttttagtagagatggggtttcaccatgttggctaggctggtctcaaactcctgacctcaagtgatctgcccacctctgcctcccaaagtgctgggattacaggcacgagccaccgtgcccagctaattttttgtatttttagtagagacggggtttcatcgtgttagccaggctggtctcgaactcctgacctcaagtgatctgcctgcctcggcctcccaaagtgctgggactacaggcgtgagccaccgtgcccggcccccgacttctttaaaagacacttccttgacgctacatcccctaaagccactgcccatttctcggtgctcgctcagagccgctctggaaggagcagtttcctcttttgtctacgctgcctcggctcccatttcaattctagacttgtgtctgtggccacttctccactgaaattcctgtcaccaagttcatgggtgaccttatgtcaactggcagtggacacctccgtccttggcaggaggcagtagacagttcctcctccttgaaaccctcactgtccacactcttccctttttctgccacctcacacaccttaccttttctgccttctctgctggcttgatcctgagaccccttttcttctacatctccccttaggcaatttccatcaattccatgacttttttttgtttatttttgagacggagtctcgctcatgtcgcccaggctggagtgcagtggcgcgatcttggctcactacaacctctgcctcccaggttcaatcaattctcctgtctcagcctccctgagtagctgggactacaggcaggcaccaccacacctgcctaatttttgtatttttagtagagacggggtttcaccgtgttggcccggatggtctcgatctcctgaccttatgatccgcctgcctcggcctcccaaagtgctgggattataggcatgagccaccgtgcccggcccagttccatgacatgaagcacatctgcatacccccaaatagacaattctatccctgatcaaatattcaattgcctgcttgacattaaagatgaatagatgccaagcacagtggctcatgcctataatcccaacatttgggaggccaaggcaggaaggttgcttgagcccaggatgtcaaggctgccgcgaactgtgatcgcaccacggcactccatccagcctgggcgacagagcaagaccgtgtctcttggctgggcgcggtggctcatgcctgtaatcccagcactttgggaggccgaggtgggcggatcacgaggtcaggagatcgagaccatcctggctaacacggtgaaaccccgtctccactaaaaatacaaaaaaatagccgggcgaggtggcgggcacctgtagtcccagctgctagggaggctgaggcaggagaatggcatgaaccccggggggcagagcctgcagtgagccgagatcgcaccactgcactccagcctgggcgacagcaagactccgtctcaaaaataaaaaaaaataaaaataataaagacattgtctcttaaaaaacaacaaaaaacaaaacaaaaaagaaaacccgctatgttaggggaagtcagaagagttctgtttcttgagctgaaccactatgttactggcagtcaggaggagggagaagggttcgtctcttgagctggtgatggttgcacagcggtatttggttcatggaaacattcattaagcttacatatagttaagacttgtgtactttgcatattatatttcaactacaaattgtaaaggaaaacacacttcagcagcttcccttcatacttggaataaaatccaaacccttgctctggtctgcaaggaccctcgtgatctggccccgcctgtgtctccagctccatcttcctggttttctctgactttgtcacactctggtcacactggccatctttctgcttctccagtgatccaagccctttcctgccccaaaggcctttgcccgggctgctgcctcttcccctgtttctgaacggtcaggtcttcataccgtctatctctcagctaaatgtcccctgggaaaggccaccctgagttactcagtatcccaaaagctctccaatttccttcatagtacgtctccttctgttttctgtatctggtccttttttttatttttattcttttttttgaggcagagtcttgctctgtcgcccaggctggagtgcagtggcgtgatctcggttcactgcaacctctgcctcctggggtcaagcaattatcctgcctcagcctcctgagtagctgagactacaggcgcccgccactgcacccagctaatttttgtatttttcagtagagacggggtttcaccattttggccaggctggtcttgaactcctgacctcatgatccacccacctcggcctcccaaagtgctgggattacaggcgtgagccaccgcgcccggcctggtccttttttttttcttcaggcggagtcttgctctgtcgcccaggctggagtgcagcgtctacctgttcgttgctgcatccccagggcttggtattctgctgggttcatgggaggtgctgaagaggtacctgctgggtggaggttacagtgaaggcagccagaccagagacagggagagcctagcaggcaatgtcagggatcccaggaagtgaagacgaggcccagactggggcactgggagctgcagtggagaggaggggaacgctgagaaagacttgacaagtgctgcagggcatagtggctcacaccactctgggaggccgaggcgggcggatcacctgaggtcaggagttcgagaccagcctgaccaacatggcaaaacccggtctctactaaaatacaaaaattagcagtgcgtggtggcgcatgcctgtaatcccagctactcgggaggctgaggcaggagaattgcttggacccgggaggcagaggttgcagtgagccgaggtcgcaccgctgcactccagcctgggctacagagcgagactctttcaaaaaaataaaaaggacacacttgacaagacaaaaaacactgtgtttatcgtgtccctagagcctaaaggatctgtcctgagctcctctctgactcctactcctcctcccactcactctctccactccagccccaccgtcccctacttgtcttgagctcctcggcaggacctctgcacatgccgttcctcggccaggccacgcttcgccgggacctccatagtgccctccttcttccccttcaaggccgtgctctcgtgtcaccttctcacaaggcttttcctcccagccccgccccctcccccacttcactttcaccattgctctccggcagctcatcctcggacagaccatgtatttccctttgttgatttactatctctctctccacacggctcgtttgcaagaagcaagactccatgccaggcctctctgacttccaggggcttgctcttaaccgctgcacattagggctccaggtggccgctgccacgtggaccccctgcacctccagcagggaagcgtgcccacccacatggtcacccacgctgccccagctcctgggctctggcacagaggaaggtgtcagccctgtgccaaggtttccccacctgcttcccccaaatcctcaggcactgactgtctccagctggagctgggtactcccggcagcctgcccccggctggcgggcaccagctcctggcagaggggctggtgtgtaattagaagctccacaaactccctaattgccagttcttctcccaaaccaggaggctggcgctgttctgagccgccctgttgccggctgcctgaggcatagagagaagaagaagccaggagcagagccaggctggcgtggaggtgtcccgggggagggctggcgaggtcagaggggaccacggggtggaggatgcctggcgagcggccagaggccaaacgtggcactgcgcgggctgccacccctgctgggcccagggttcctcagcacagtccaccctgcggccgcctccctgccttccccaccatcctcacttgtccccacccatgcccagaacggtgacatcaaaccagccaggcccattcattctttattcaggtggcataaaaatcactacaaaaaccttacaaaagagccttaaggagctcatgggatccttccctgcctcggttcctgagctcccgggcagaggagggagacaggagaggaaggaagggaaatgctggcagtgttgggatctcgaggagccgtgggaagtctggcgtgacaaggcacagggggtaggatggaggctgatggactctcggcaggttaggccacagccaggctgtgccagacacgagttccacgcggggctgaggacaacgcttcgcctcccgagccaccaccagggcccgtctctccccaccctagcctaggtgtcccgggacaagtccaaaggcagccctctccccctccctttttctctggtaaacaaaagtcggggtgtcccagctgacgtggggagcagctaacctgtctcctggcagaactagaagcacctccctcctgcccaggccccggtgcaggacaccctctgagcctgtttggaagaaagatgagggtcaggctcccggctccccgatgcctgccctcctcccagccgcgccccccccccaccctaaactccccaagaggtgttgggaaagaatggcctctctcagactgcccccggcccctgccccagtgccacaaagccggttggaaagagtcacatgagtggagaggctggtccaggcagggactctggatgccacagccacggcccctcacttggggctgccaaactgggggtaatcctcctccatggggggcacaagttttaagtcagggccgaaaagcttgtctccgcgggggaagcctttcaggctctggaggaagtccttgttgcccggggaatcctgctgttccttgagctcccgcggtgcactggggttggggttcctcacgctgcccacgaagaggggaaggcctgtggtgtcctcgaagatgaagaagaggaaggggcggttcacgctgaaggaggacagggacatgcgggacatggcaatgctggtggccgccgccgcctccacgccgacctcgctgagctccagggtggactgatgctgcacgccggacaccaccaggctctgctcggagatcccacgcaggtctggggcctggaacaactcctgcaggcctgcccagggccagagatggctggtcagagctgcccttggcctcacaggctcctggagctgcttgggagggtgtctgagatcctggccagggaacagcttgaactcacagatacctgcttcattcctatccggtttccaagactcagcttaaacaccacctcctccaggaagccttccctgatccccagctctaaagtccaaccaaggtacattttcagtgttctcccaggtgagctggagagaagccctctctgtcttatcgcttatgctgtagtaagtatgtgattgctcgtctgcccaccccattagactcagctgtttgtacatggtgggctcccggtacctggtacagtgcctggaatacagcagctgcttagcaaatggctgaaggatagatgctttatttatttattttagttattataatttttttttgagatggagtctcactctgtcatccaggctggagtacagtggcgtgatctcggctcactgcaacctcctcctcccaggttcaagcaattctcctgcctcagcctcccaagtagctgggattatgggcatgcgccaccacgcccggctaatttttgtatttttagtggagacgggtttggccatgttggccaggctggtctcaaactcatgacctcaggtgatccaccctctttggcctcccaaagtgctaggattacagacgtgagccaccatgcccggcctttatttttatttttgagacaaggtcttagttcttttgctgaggctggagtgcagtggcacaattatggctcactgcagcctcagccacctggggtcaagagggcctcccacctcaacctccccagtagcatgcaccacacctggctaatttttgtattttttgtagggacggagtttcaatgtgttgcacaggctggtgtcggactcccgggctcaagcaatccacccacttcagcttcccaacgtgctgggattacaggcatgagccactccacccagcatttctttaacagtgtgacaccccagcttctcctccttccccttccagggaagccagcgaggctcacatgccatcccaggctctctacccagactctccttgcaatgcgaggtcttgggcagcaaagcagagccccattccccgggccaccccaacttcctctaggacagagggtctgggggctcatattcaaccctctccccgctcccgaagccctggaaaagagcaggacacaggacagctctgactcagctccactgccagccagacgcttcctccttacccgccctgcccagcctgacctcgggggctcgcccgcaccctcctccttacccagctggctgagggtggccaccaggtccatttggtgtttcagatacagcttaggcagccggaccttggtgggcctctcccacaccagaggtgggtgcagggtgtcccaactcaggttggccagtacctgggacacgttccattcaaagtgggtgggtacaaggaccacaaagctcatgttgttcttaaaggggaaatgagccacctacagaaaagggaagggaagagcatgaggacagaaagccccgaagctaagtgggggtggggccagcaggtgctcctaaggcagacaatggggctcctggccatcctgccaggcgtgtgactgaccccactgctcctccacttcctcacagtggggtggagtcatactacctgtcccactgcaggcggacacgtaaccgaatgagatgcttttaaagtttctagcagtgtggccgggcatgggggctcacgcctgtaatcctagcactttgggaggccgaggcaggcagatcacctgaggtcaggagttcaagaccagcctgaccaacatggcaaaacctcatctctactaaaaatacaaaaatgagctgggcttctgtggtgacgggcgcttgtaatcgcagcaactcgggaggctgaggcaggagaattgcttgaacccgggaggcagaggttgccatgagccaagatcaagccactgcactccagcctgggggacaggagtaaaaatccgtctcaaaaaaagaaaaaaaacaacattgtagcagtgtccgctgtcacagacggtgctcaataatacctggtggttttctctcttcaccggctaccagctggccgtgtgacccggcgtaaggaatcgcctgtctttgtctcagcttctccagatgtaccacagacagggtcactggctgtcataccacagctgggttctgtgggtgagccactgccgagtgctgcccgccccaccctcccacacctccctcttgtgactttgccagctgtgtaaatatattgtgatttggcttaagatttctttttttttcttttcttttgagttggagtctcgcactgtcgcccaggctggagtgcagtggcgcaatctcggctcaccgcaacctccgcctcgtggattcacgccattcttctgcctcagcctcccgagtagctgggattacaggtgcccgccactacgcccggctaattttttgtatttttagaagagatggggtttcaccgtgttagccaggatggtctcaatctcctgacctcgtgatccacctgccttggcctcccaaagtgctgggattacaggcatgagcctgtaaaccacacccagcctctttttttttttttttcaagacagagtttcactcttattgtccaggctggagtgcagtggcatgatcttggctcactgcaacctctgccacccgggttcaagtgattctcctgcctcagcctcccgagtagctgggactacaggcgctcaccatctcacctggccaattgatgtatttttagtagagacggggtttcaccatgtgggccaggctggtctcaaactccagacctcaggtgatccacctgcctcagcctcccacagtgctgggattacaggcgtgagccaccgtgcccagccattaagatttgatttgaagggattctgcagcaaaagcagtgtggacaccacagggctcgagggcctcctgcagctgtgactccttgggttccaggcagagtacccgtgtggagaacccctgcccgtgggaggataagccccgggttctggctgtttgggcctgtctgcagagggcctgaggacaagaaaggctgacggggcctaaggaaaggagacgaaggatgaaggaagagtacgcaggacacagcctggaggaaaggggaagcaggaaaggggagcctcggggaggtggatcagactggcctttcagaatgagctgcagggaagccaggacgcgttcccgggccagcctcacccacagccccctcccaggagggctgcccaagtggcttctggctcctccctgcagaagtggctgtgctctgtgtcacacttgccttgggaagctaacaaatacagccatctcagccacagctgtctggcccggggatcaatacccaggccaaggggaccacatttaggctagaagcaagagaggccacacctgagacagcctggcacggaattttatccaatcagagctgggcgcagtggctcctgcctataatcccagcactttgggaggccaaggcgggcggatcacttgaggtcaggagtttgagatcagcctggccaacatggtgaaacctgtctctactaaaaaaaaaaaatacaaaaattggccgggcacggtggctcacacctgtaatcccagcacgttgggaggctgaggcaggcggatcacgaggtcaggagattgagaccatcctggccaatatggtgaaaccccgtctctactaaaaatacaaaaattagctgggcatggtggcgggcgcctgtagtccaagctactcgggaggctgaggcaggagaatcccttgaacccgggaggtagagattgcagtgaaccgagattgcaccactgcactccagtctgggcgatagagagaaactccgtctcaaaaacaaacaaacaaacgaacaaaattagccaggcgtggtggtgcatgcctgtagttccagctactcgagaggttgaggcaggagagtggcttgaacccaggaggcagaggctgcagtgagccgagatcgtgccactgcactccagcctgggtgacagagcaagactctgtctcaaaaaaaaaaaaaagaagtttatccaa

SEQ ID NO: 75 - DNA, 36595 bp, Mus musculus
aagagtcaaagtctgtcgggatgtgtagctcagttgttgagtgcttgcctggcatgcacaaagccctttgttcaacccttagcaacacataaaccaggcacatgaacgcacatccgccatccctagtacttttagatcgagataggaggaagaaaagctcaaggtggagaagtggctcagcagttaagagtacttactggcttctcttgcagaggaccagggtttgattcccagcacccaccatgcagctcacaaccagttcagggggaaatggtgccctcctctggactgtgagggtactgcaaggacacggtacacagacaaatgctcaggcaaaatacccatacacataagataaaaataaaccttaaaagaagttcaaggtcgttctgaattacatagagagtctgaggacagcctgggatacattagcatgtctaaaacacaacaaacttgggcttgttgtacagctctgtaatcccagcacttggggcagagagacgagagagaagtatgtagccatcatttctttctctttttaaaaaagattaatttatttattacatgtaagtacactctagctgtcttcagacactccagaagagggagtcagatcttgttacggatggttgtgagccaccatgtggttgctgggatttgaactcaggacctttggaagagcagtcagtgttcttagccgctgagccatctctccagccccaaacagtcatttcaaagccagcttgggatccatgagaccctgtgtccaaaaaagagggagctatgtgtagttacacacatcttagatcccagcactcaggaggcagaggcaggtgggtctctgcaagttcgaggccagcctgatttacagagtgagttccaggacagccagggctacacagagaaagcctgtcttgaaataacaacaacaaaaagatggcaacaccaaaaaaaaaaaaaaaaaagtggagagcaatgtaggaagacgactgatgtttacctacttctgactccatatacccatgagcaaacacactcacaccgatacaaacatatatgcttatgtgtgcacacagagaggtgtaaaagcattatctcatttggtcccatgtcaccttgcaaaggggtaagtggtattattccacttcaccagttaagtgaaagcatgctaaccctgaatttctggctcttgtctcaaaagtacagaagtaattttggcccagactccagacaggtccaggtgctgtctggtcctcatgttctctccttttcttatctgtaggtggctcatttcccctttaagaacaacatgagctttgtggtcgtgatgcccacttattttgagtggaacgtgtccgaggtactagccaacctgacctgggatactctgtaccatccctcgctgcaggagaggcccaccaaggtgtggctgcctaaactccatctgcaacagcagctggacctggtggccaccctcagccaactgggtaaggagcttggggatagggtgcccctaggtggtctgggcagagtacgggagctgccagtgtgcctgagccagaggtggccctgcttcctggatgggagcatttgatatgctcctctagactttctgtcctgtacctagcgcagatcctgatttaaaaaaaaaaaaaaaaaaaaaaaaaggtttctagaagtgttgtctagactgaggtctaacagattccaatcaaccgctgggttcaagtgttccctttagccaggatgctagacagatccacatagccttggggcagcactgaccagtcatctgctgttctgggcaggcctgcaggaattgttccagggcccagaccttcgtgggatctctgagcagaatctggtggtgtctagcgtgcaacatcagtctaccatggagctcagcgaggctggtgtggaggcagccgcagctaccagcgtagccatgaatcgaatgtccctctcctccttcactgtgaaccgacccttcctcttcttcatcatggaggacaccataggcgtgcccctctttgtgggcagtgtgaggaaccctaaccccagcgcgctgccccagctccaggaacagcgagattcccctgacaacaggctcataggccagaatgacaaagctgacttccatggaggcaagacctttggtcctgacttgaaacttgcaccccgcatggaggaagactacccccagttcagctcccccaagtgaggaggggccctgggcagcagcatcctgagtccccacctggatcagcctctcagctcctgtgactctttctaaccagctttgtgggatagggtgggaccggaaggaccatcaccagtgtagaagctgttctcttgcagcaggtggggtggggcctggaggaaggcaggcatggggaatcttcatttcttcccaaggggctcagggggtgatcttttgtgggctggcacttgtggacacagttttggctagaggtaggttaggcaagtccctaacttagggtccctccacatttgtaagcagaggctggagaggccatctttagacatattccagacaccctgggtgggaaaaggagagacaagtgttggtctcccaagcttagactggccttggtgttatacttcatggttggaggctgacctaccctacaagagtgtcccttgctgaagacattcaggtccccaacctgtgtcctgtcacccaagtcacccctctggtatttggagatgccaacactgccaggagtcttcctccttcttctctctcttgtcctcccctgccaggaatcttggggactgaggcaaggaagggaccctttagctcccaagactcttttgtaaagtttttgtagtgatttttatgccacctgaataaagaatgaatgggccgggctggtttgacgtcacagttctgggcaaatggatgtggctgggaggcacccacggggcagattgcactgagccctctctgtgccacgtttggtccctggccacatgccagtcctctctaggtctactagggctacctccatgccagcctggctcagctctcagccttttcctctatgtgtgcctcgggcagccggtaacaaggacagctcagaactggcaattagggagctagcgggtttctaattacaccctagtcgctatgccaggagcaggcgcccgccagccggggccaggctgacagctggaggctggcagtgtctgagaattttggggatgtagttggggatacttggcaccgggctggctacttcctgcgagagagtagaagctggaggcagaagtggtgtgcttgtgaatggtgagagctaccctctggggtaggcacatctccttgatgagatctcctgtgtgtccgtgtggcaatagccctctggagccccagtgtccctgggcagtgtccggtggggaggattagaagggtaagaagtccctggtgtaggatcctgatgcagctaagtgtgtatgtgcgtatagggtgggggtgggaggtggagacactagggaaatgtgtggtatatcagagggtgagggtccctaattgagacacgaacagtggagtcaggagcaagcctatccagcaggtgacaccaatcagagcaggagccaaaggaggtgatggagagtacctcagaagtttcaggaagagaactggggggctgctggggagaggagaagcaagagcagaaggtctgggctgaggacatgcgcagaagtccaagatgagcagagcatgaggctggggaggagggaggaaggaggagggaggaggaggaatcagtagctgagtacaggacctgcagctctaggaccacacaaagagaaaagaggtctgctatctacttttattttgtgtgtataagtattttatctgaatgtatgtttgtgtgtcatacgtgttcaatggctatggagaccagaagagggcgtcagagtatctgaaactggggttgcagatttctggtataccatatgggtgctgggaaccgaacctgggtcactgagagagcagcaagtgctcttaactgatgagccatcttttctccactcactcactcactcactctctcctcccttcccttcctccccctccctccctcccttccctccctccctccctccctccgtccctccctcccttccttccttccttccttccttccttccttccttccttccttccttccttctttccttttccttttgtttttttgtagacagggtttctctgtgtaaccctagctgtcttggacctcctttgtacaccaggctgctcttgaactcacagagatccacctgcctctgcctcccaagtgctaggatcaaagacgtgtgccaccgctgccaggcattccctgactttttttttaaaagattttaattttagttttaattatgtctaagtatggccgggcggcggtggcacacgcctttaatcccagcatttgggaggcagaggcaggcgaatttctgagttcgaggccagcctggtctacaaagtgagttccaggacagccagggctatacagagaaaccctgtctcaaaaaacaaaaataaaaacaaaaacgaaaaaaaaaaaaaaaaaaaaagaaggctggttagtttgcctacccagggtgcagatcaaagtcatagaatttgcggctagaccacaggggataagagaacgacagactcaaggatgatggcatttgtccttttaatttccaagttcctgtgagaaatgggtaggggtggtgcctttgaccgagccaggaagcagaacaattgtagggtggttgggagatttgctctttaaacatgttataatggcaatgtccctctgatacaggacaatcacacgccccattttgcctgggaaaaattagagttatttctgtcacttgagctaattagtagcatccagtcttgctgttggaagtgtcccatgagttcattcctgggctaccaagtggatggatctgggagtcatagcaccgctgactctggctttgaggtcatccattttgaatggcaaggagttgactgaatattttggtaagggctggaagtgtatatttgacagcacagagatgctttaagtcatggagctagagactggatggagctcctgctgagcatgtgcaaggccctgggttttctccacagtgggggcggggggaccctgaactagaagagatcctttaaggagatattttgttcatagaaaggaaaagggtccaaggatcaacaagcagagacagagaagatagggtacttaagggtgggagaaaatggcgacaagagagaagaagctccgagaagacagagctctgctctgctgcctgctactgaggagagtttccgtgtggcagtcaacacaagtcacttgctgcagtggtttcagaggagatgagcacagaagcagaggggaggaggaagtgggagccgagactgtgtagacataagcgcaaacagctctttacttcatggcggtgagggaagtaggcagtgactttaggggtgtgtcacaaaaaggagaatttgagataatcgaagtccccccccccttttttcctgtgttcagattgaatccagggtcttgtatatgctggggaaatgctctacagtagactataccctcagtcctgagaccctgactctctttagactctctctctgtctctctctgtgtgtctctgtctctgactctctctctgcttttttgtatgttgtatgggagtagctcgtaccttgttgtctggttccgcagcaagttctaccagctgtgccttggaagtttagatcgtctgtctgttggactgccagtgttgtctaatttcctggaatcccacagaacctagactgaaaccacctttccagtagagggtgatctcttgtccagagcctttggcagccagttgcttccagaaggctttcccatcatgcatctgtggcagtaggcttggtaggagccctcttaagcagtcccctttttcaggtgcagccccaggaggcactggtgctggaacagcgcgaacacagtggattgagggccctccagacagctagaatgttcttgcgaataatgcctcgtgtccacagcttcatgcatgccaggcaaggaccctatcagagctgcacctctggtcctgtgggaggcgtttggtgcatgcatttagaagtagaacattgggctttcgcttcgggcttgtccacttttagcagtcagggctgatgcatgcggtcacacatgatgttagcattttctgtcacattgttcttcatagtcgccatgtatgatgggtagagttcctcattttccacacccatatggacgctggggttgtcacgtgattaattaattaattaatagtattttagagaaacgttgctgtttaatggtaaatctcagtagactccagcaccaggactggcatggagtcaaggcagcagggacggctgggtgaccccagggagcctcacatggcgaagaggatgaggaaggcgaccatcaaacagaagagtcccatggcctcagacagggcaaaccccagcatggcataggagaagagctgctgcttgagagactggttcctggcatagccaataatcaagcactgtgccaatgccagcccctgatcctgccacaccaactgtggcagccacagcaccaataaatttggctgctgtgttgatgtcctgggaaatgacattggtctgaaattcccatctgtccacctagagagaggagctgctgcaggcaggctgtttagatggggcctctggtctactcagggaagcagacacaggcctggttagacccctggtacgggagctgatcagaactggagaaatgagcagggccttggtggtctgcatttttcaatctcccagctttagttcttggtctcagcgctccacgagattaaattttatcaacctgataagagctgtagagatggctcagtacttaagagcacagactgctcttctagaggtcctgaggtcaattcccagcaactacatggtggctcacaaccatctgtaatgggatccaatgccctcttctggtgtgtctgaagacagctacagtgttcttacatacataaaataaataagaattctttaaaaagaagttcttatgctcttaatttgattattagcaatgataacattttttcttggtgatttggggactcaaacctaggctcccatttacttatttatttaaatttaaataataatacaagtaataaacatttaaataaatttttagctgggaattgaactcaggacttctggaagagcagtcaatgctcttagccactgagtcatctctctggtctcaggtctcccctttttttggcagggctttaggtaggatgtttctattatatcgccctggctgtcctggaactagctatgtagaccaggctggccttgaactcacagaaatccttctgcctctgcttcgggagagcctagattaaaggtaccacatgcagctgagggactttcatacaccagcgaagttgctctcgctaagcctcattcctagccctatggaacgcctttatatacacttagtgtccccttgggattcttccaagaattacttggccttattttttatttatttatttatttcaagacagggtttctctgtgtagccctggctgtcctggaactcacttttgtagaccaggctggcctcgaactcagaaatccgcctgcctctgtctcccaagtgctaggattaaaggcgtgcgacaccacccccggcttccttatttttttctttaaattattagttaaaattttttttgctagatttattttattttgtgagtgttttgcctatgtgcatgtctgtgcactgtatgcaatcctggtgcccacagaggtcagaagaaggcattggatcccctggaagtggagttatgatgttgtgagtcaccctgtgtgtgctggaaactgggctggagttttctgtaacagcaacaaatgcttatttatttcaagacagggtttctctgtgtagccctggctgtcctggaactcactttgtagaccaggctggcctcgaactcagaaatccacctgcctctgcctcccaagtgctgggattaaaggcgtgtgccaccaccgcccggctgttttgtttttttgagacagggtttctctgtgtagacctggctgtcctggaactaactctgtagaccaggctggtcttgaactcagaaattcgcctgcctctgcctcccaagtgctgggattaaaggcgtgcaccaccatgcaccaaattttttattgtattcacccagtgcctctcagctcctcccagatccacatgcacctccctaccccttcatccctggttttgatttttattgatgtgtatgtgtgcacacctgtgagtgatgctgatggaggccagaaatgggtgttggatcccagggagctggagttacagacagttttgattctcttggcttgatgcaggttctgagaacagaattcaggcccctgcagccttctcttgagttgtttctggttttctcgttgatttacactgttttgatgtggctgccttttctcttccttgtacagtatctacacagtgtgaagagagatttctaactttaatgttacattggtcgaccacctttttccttatagtttgtccttctttgggtgtaggtctttaggttggccttagatttccaacaactctgctgcttctgtctcctgaatgatggaattacatgtgcaccaccacacccaactcattgtctgtctttgcgtttctgcgtatgccatggattgcacgtatagatcagaaaataacttgtgggactcatttctctccttccaccctgtggggcttgggggttgactcatatcctcatgcttagtgacaagtactttttactttcagagacatcttttttctttcttacccctccacaacccccccatcccatctgccttctcccccatcccttttgcctctatgaaggtgctccccacctacccacccactcctgccccaccgctccagcatcctccaacactggggcatcaaacctccacaggaccaatggcctcccctcccatgctgtcagacaaggctgtcctctgctgcatatgcatctggagccatggatcccttcatgtgcagtcctcggttcgtggtctagtccctgggagctctgggtggtttggccagctgacattgttcttcctatgggcttgcaatcccgtctcagctcctccagtcctccccccagcaccctcactggggtcccgagctcagtctgatggttggctgtgagcatctgcatctgcattggtcaggtgctggcagaagcgcccagggaacagccactccagcctccaacgcatacgggagattgatgtgaactcctcatctcccttctacttttcaagtcctgagattacaggagtccaccatcctgcctgcctaggtttgctttatagagcatggtattgcttcaataacatggtgggcatgatgggctcatcttgcagaagcaagaggatcactgtgagttccaggccagcctgggctacatagtgaggcggggtctcaaatcaactgatcgatcaatcaggaacgatatcagtaccacctgtgctcagagtgtggcactggatgatgggagactgaatgagacgtttttcacagggcatctcttgctgcttttgaccctgtgtgtgggtgcacgcatgcgcatgtatatgcatgtgtgcatgtggacatgtatgtgagtgtgcgtgcacgtgcatacatgtatagatcagaggacaaatttgtggagtcagcacactccttccacctgggttccaaggattgagctcatgtcaccgggcttagactgcaaatgcctttgcccctaacacagggctttgcctagaggccctgcacaggttttatggaaagctggactctgactgttgactctcttcttcctacataaagagctgaaccttgcccactgcaaagtctcactggcccaggctctgctttctgtggccttcctgaggatgcttgtagagtcccctaaactttctcttttgagccttctctgaatggccattgggctttgttaaggcagcctacaaaacatttgttatataggtttagaaaggaatttttttttaaattagtgatttttagagacaggggtttttctgtatagccttggatatcctggaactcactctgtagaccaggctgatctcgaactcacagagatctacatgcttctgcctcccaagtgctgggatcaaaggtatatgccaccattacctggcccagaaagcaacactgttcatcagagtagctgcaacatgaagcatcccaaaatctttagcttcctggagcggatcccgtactacacggtcgacaggtcaatgtgcacgaactttgttccctaaacaagatcaacgaaaatattgttcttcagaaactaatcattacaagtatttatgtcatgtgggtgggtgggtgggtgggtgtgggggtgcacgagccatggtgcatgcggagggcagaggaccacatgtagaagctggctttccccttccgtgtggaggctttcaggcgaggtggttggcacttttacctgatgggccacctcactcgccaccttttcttttcttttattgttttatgagttttcatgtagcccaggctagcctcaaattcactgagtagtcaagactgctcttgaacttctgacctaccttccaagtgttgggatcatgagcaagtagcaccacaccagttatgaaaacattgagattaccttcagcccctgtgtagtcagcggtataggaaactgatgaattccaggggtagaactgggtttcctccccaagacctcttttgtagatgcaaataacccagattccaaatcccaaacacttttgtttttttggttcttactcattttagataaaggggggattcaacctggggtccccagtcactgctcctgtcagtgctttgaaactgaattctgagttctgacgccctagggcaagctgagtgcaagtgttctcctgtgcagacacctccagtgagggcctcctctgagggtgggtgtcctgcgcaccccatttcttcctctgctcagatgtttccccactatcctttcttttcttcttaaagatcttatttgtgtgtgtgtgtgtgtgtgtgtgtgtgtgtgtgtgtttctcttcaagacagggtttctctgtgtagccctggctattctgaaacttactctgtaaaccaaactggcccacagagctccacctgcctctgcctctcaagtgttggaattaaaggtatgtgccaccaccactgggctaaccttttatcctctctctctctctctctctctctctctctctctctctctgatacctgatgaggccaggagatagcgtcagattctctggagctggagttccaagcagtttcgagtccttgctatgtgagctgggaacagaactcaggtcctctgcgagagcagccagtgctcataagcactgggccaactctctagtccccaccccactgtcctttggaaccttcagagctgtcaggtacagtcccattccttcattttccaggtgaggaggggagaagaatcaccttgctcccacctgcagtgagccagagccaagcgcctggaagaacccagcatctccataccggctggctcacagtctctccatgcagcctgcctctcagccaatcctttcagatgttcaagttcagactcatgacctaccccaggctggcccaagtgcccctgaagttagccatcatgtcccaatgaaggtcccaatgaagagagataaagatccaagggagatgtggtgggagaggagggtggccaacgtgtggtcttggagccacatggcggaagggcagcagtgggttaaagttaacaccagacaatgatgcaatcacagattccaaatggagtcaggtcactttaagaaaagagtagctgtaatctgaagcctgctggacgctggttgagaggcagctactcccctcactgcttcctggagcccctcagagtgcaggctgtgagagaagctgccgcaaccacaggtaaggcagcgcctggtctagcctggggaagacagatatggaagaggctccctggctagagggactgggagtggcaggggcaccccagagagcagaaaagaggggtgcaaggaagtggaggtagggttatagtagcccctgcagtttaggaaccaaggtgaacagatgagaggggagagagaattggggggacagaggcccaggactctattagccgctcactgtagaccagtaggagaggctggactggggttttgaatggtgttgggaaaggatgtggtggtgggtggtgggaagcagggagctaagctctggggctggactcagcagtaccccggaggagctatagtcccataggctgggctcttcctgaagttgcttccaccagcagtgagcaaggaaggtgagcttcctgcagctcagcctgactccattcggatcgctgcttttcagaaccatcggtgctggttcccttacagcaaggagcagtgggctgcctgaggcctgctaggttctctgtccagcttcctctcattctctcttaccaaaagagctgggagacaaatgaggtcatggcctcttgcgaacaataagcaccatttagcctagctggtttgtggggtctggctgccctcctgcagcccttgcacctcctgatgtaagccacggcagggagtggtctgagtcaaaggaaagagacaggctttccaagagccagccactgtctggaccttagctgcccatcagttcagcctccagggctgagggggatgggtggggaccaaagagttctgttctgcagggctgacctttctgggggtgttgggaggtacaattatggggtatctcaggctgattcagattccaagatttcaggagggaaaaaccccaaactgtccagggggtgagcggcgtagccatgagccagccagcctgaaccccttgaaactgtccttgagccagtggagagagaggtgtcctcccctgcactgtccgcatattcactgccatgtggcttgaaggcagcttggctctgggaggaggaggagcaacatgtttgtctccgactgggtttaatctgaaacacatgtactggctcccacttgtcttctcagcttggatgtgagaccacaacatcccagtttctgtgcctcctgatttggggcacatgggaaggccaaccttgactcagagggggagaatcttgacccctctccccggaccctcctccccctggagcctagaaatctggcttggacactgccctttggacaggatggcatcactgtcctggtgcccctggctagccaatgactgcctccccaacccagttattgcagccagggccttgcatgtgtcctgtgcagcccctgctgcacaccctcactttctgccctttagagtctccatttccgttattcctgtggcttggggtggaacattcagacatccccctagcacctgtccctgcttgtagctcttggccagcattggacctctgtgtttccccatgcacatcagatttcccacctcagattcagtcctcagtctaaccacgtggtaacaaagatctgtgacttagactcccaccaccaccacccccgcccccgggaggaacttcaggggtcccatctgcaagggtatctcatttacttcctggtagaggatgcccagggtgaccatctcctcctgtctcagttgctacctacccagagggaccagaggtgcctctctgagcacctctctgataaatcagcctcctgaggctcagccaagggaggctgttgcctgtgatgggaggggctgggaagggaaacaagaagcctaaatctgcattgatttctttgttgttctaaggggtctctccctgagcagctgagtggcagtgcccctggatgagaacacagaggtccctaaaattcccaccgggagacctgctatagatgagggattagggagagccaggttggttcctgctggtggtgctgccaaaagcagagtgaacaaggaacgaggagtcttctcgttgttgcccttcatgtcccatggattgtctgacttaattttaaggaccatagctgatgatggcagactcctaacttctcagatcagatatttttctgggaagtcagaaaagttagtgatgcatgtgtctggcgagggagggcacgtgtacatgagaggatggtgatggagcggagggggcacatcagcatgtgcgtgctataggatgggtgagggcacactaggacagccagtggtcttttctgagtcgtgaaccctgtcttcctcccctagacctgactccaggggggcacaggaatgatgtgcgaggacacacagcccaggctgcagttttgtcttgtggtccaagtgccagatgagagtcagagcagaaaaggtcgttgcttagggagatagagggaaatgggaggtcccaccaaaaactggtgctgtttaacctgaaggaaggaaggctctggggctaagagccgtctccatgctaggaaggggaagaagacatagcccttcacaagagaagccagctaaagggacagttgagggcttcctgacccctggtgctgctaagggctgctaagacattgtgtaggcagatgtgactgtgcatgcctgtaacctcagcacttgggaggcagaggcagaaggatcacacgttcaaggggagcctaaatatagtaagattgtctcaaaaaggaaaaaaggagagatgttctaaaatgtaaccctcatagaagtaggtcaatactactatactttatacagagaactcatatactatactatacaatacaatactatacagtactatactatacaatactatactatacaatacaatactatactatacaatactatactatacaatactatacaataccatacaatactatactatactataccatacaatactatacaatactatacaatactatactatacaatacaatactatactatacaatactatactatacaatactatacaataccatacaatactatactatactataccatacaatactatacaatacaatacaatacaatacaatactatacaatgcaatacaatacaatacaatacaatacaatactatactatactatactatactatacaatactatactatactatacaatagtatgctatactatacaatactatatagtactatactatactatacagtactatactatacaatacaatattatactatactatactatacaatacagtaatatacaatactatactatactatacaatacaatactatactatacaatactatacaatactatactatgctatgctatgctatgctatgctatactatactatacaatacaatactatacaatactatactatactatacaatacaatactatactatactatactatacaatacaatactatactatacaatactatactatactatacaatactatacaatataatacaatacaatactatactatacaatactatactatacaatactatactatacaatactatactatacaatataatacaatacaatactatactatactatacaatactatactatacaatactatactatacaatactatactatactatactatacagtactatactatactatactatactatactatactatacaatactatacaatactatactatacaatacaataccataccataccataccataccataccataccataccataccataccataccatacaagtagggctttattctttagatagctatgaagtcccagagacaaggtttggtcccaggcagtgtggccctggttcataccctcttaactaagaattgctcttgaaatagaagaagggagtcaagtcaggcatgatggctcacacctggcattgtagtactcaggaggcaaatgaagtagggtagctgcaacttcaaggctagcctgggctacatacacaagaacctacctagaagaaagtgtgtgtgtgtctttaacataggctttggtcagagaactattggtggatagcaggaccagaccagatgttctgtaagtctatgacctgggctctgctcccatcctgagacagggttccaaatcctaccaaaggagctggccgtgtgcctccacggaaaagccttggtgtgtgtttgtgctagagcattgtcttggggcctgaagagcctgctgctgggtcttccctgtgctggagcttagatgggaaggtgggtctcctgataggaaccaacatgggggcacagctcaaggagaagtgcaggggcaggtcagggacggaagacctcaagtcaagggtccacttggggctgagagctggagggaggggaagggctcactctgcctgactcttgtccctgtgcagtgtgcaatgtgcagtggcaggggagggtgtgggtgaggggagtcgtttgctctcttgtttctcttgtagttccgggatgcaggccctggtgctactcctctggactggagccctgctcgggcacggcagcagccagaacgtccccagcagctctgaggtcagtagggtgggtaggtgggacagcagaagagacagtgcagggaggcagccctggatccagggtgggctttggccttcactcttctaggccttggttactttaacatcgagacaagaatatcttccctctcctttcaggatccagaggagctgccactatacggaggaagtaggggtggggtcatgtcacacaaggacaaggcagatgggcatattagacctggattgtgggctttaagtgtggcttaaggcttagtgaccttagacaatactgtcttgccactagccagtcacttattcctcacctactaactcccccttctctgttgggggtgaagcccaggccctcacacatgttacacacatgatgtagtactgaactctatccatggacacttcctttgaggttggtaggtacagattaaaatctaaaaatcccagcacttaggaggcagaggcaggtggatctctgaatctaaggccagcctggtctacatagtgagtcccaggacagctagagtcacatagcgaaatcctgtctcaaaacaaacaaacaaacaacaaaaaatcaaaaccaaaaaccaaacagaaaactaaaaaaaaagtcctccaaaccgaaaagcaacagggacgggaggtacagctgggtggccaagcatttgcctaacgtatgtaagagcccagctttgatccaaagccctgggaacaaaacaaaaaagcagaaagtctcataaggaagaggctgacactgaaaacaggtcagaaaacgacaaattcctctcgggtctagtcagaggggatggcttgtcaggaaagacagggagggcgtcacagcagaacctaggcagactaggaccagccagcaagctgaatagggaagactggtctgagggtgggtttctttgggggttggtggtggtgaggaagttccctgcagagggaaggggacagagaggggtggagacagacagacagacagacagacagacagaaacagacacagagtaggctagtagtcaacccagagtcattcctcaggccctctgaaacaggacccctcactgagatggaatacgctgattagttcaggctgattggccaatgagccccaggacctgcccatctctgcctccccagtgttgggattataagcatgcacccccgtgcccagctctggggactgaacccaggtccttgaacttgcatgctggtactttatctactgtgctatctccccagccctacaagttttattttaaagtgggccaggcttcaggttctcagaccacagttcaggtctggcaagcccttttgtgttgcccttcccactccccacctcccagcacacaggttgtggagtcagagagcacacactcattctgacctcagactcatggccccagggactagaggaccaacccaaccaggaggtgatgtactcactgtgcctccctactggtccttgtattctaacccagggctccccagtcccggacagcacgggcgagcccgtggaggaggaggaccccttcttcaaggtccctgtgaacaagctggcagcagctgtctccaacttcggctacgatctgtaccgcctgagatccagtgccagcccaacgggcaacgtcctgctgtctccactcagcgtggccacggccctctctgccctttctctgggtgagtgtcaactgaagaaggctgcaggtggacctgaatttcccccactcagagtttccatgctgccgccgtcagaggaacaggaaaggggcggtgggggccacacacacaatccctaccactttgtaagtggcactcgaccttggttccttaagtggcctcctatcgtgttttagtcatttaaccaggttctaggggtacagctgccgtgagcagagctggctcctcctcagaacagggtaggttacgatgggagaacttcaggaccacatcccactcttctctctgtagctctgataaccttgccctgtcttagagctcttcctagcaaggcggtcattatttctttccacgccctgaagatcttgtccagctaaaacatctgcaatatcggcctcctcgggctctcagaggacaaaaggattgatgtctaacgtccctatcctgatgcgggcctcacgggcagttatgaagcttggcatccttttctctctggcaggagctgaacatcgaacagagtctgtcattcaccgggctctctactacgacctgatcaccaaccctgacatccacagcacctacaaggagctccttgcctctgttactgcccctgagaagaacctcaagagtgcttccagaattgtgtttgagaggagtcagtagccccacccccaccccacctctcaaagtctatagagtctcagctggtcccccaactcataaagctgcctctgcttctgaagggcaggcacgccccattatgcctggcgtgaagttgcttcattggcctgggttgtctgtatgcttccatgatgtctaaacaataggctgtgtgtgctcaggcgaggcctggcactggtgggcaggaaagagccagtgagaccacagaggaacagaaagaggaagtgggctctgggagacagcaggagggcctgggacggggaatgcaaacggtggaatccactgttccctagccagggtctgggcaagccggcagatgccccagcaagtcaaaggaagatgctgagcaggaagctggggtctggcatgctttcaaagtgagggtgctgattcagctctcatctttgatctgtttcctctcaagaacttcgagtcaaatccagctttgttgcccctctggagaagtcctatgggaccaggccccggatcctcacgggcaaccctcgagtagaccttcaggagattaacaactgggtgcaggcccagatgaaagggaagattgcccggtccacgagggaaatgcccagtgccctcagcatccttctccttggcgtggcttacttcaagggtgagggcttccccacttgtctctggccgagtgtgtgtgtgtgtgtgtgtgtgtgtgtgtggtgatggtggtgaacctgaatgcaggtaccaggccagagggagatctgaaggccacagtgcttgtagcatatgagcatatcagaccaagtgtttctgaattagttgaccagtgaaatggctgcgtggggctgggcacagatctctggctttttgaatcagaccaggtttaatcctggctctgcccccatgagcccgtgtcctcatcttcacggtaaggataacacagctccctcccagacactctacaatacatgctgtcctgctctcagagcagcccccaactcctggagtcgcacccctgctcaagaactgctgtcaacttccttctagacagtggtaaggcctcaggagacccttccacaggcctcccctgagatctgttttattcttgtggcaggaatggtttgattaatttccattttacgttgctttgtgaccatcttatggagtagtagcaagagtggatcctaacttagaggaaagccctggggcttcctactccaagtccccaggggacaggagagcaggcacgtaccacacaccagcatattaaaggccactttaaacagaaggagcgtggtgatccaagtcagagagagaacacccacttatttctgagtttactacaggaggatagccagaacccgtggtgcatggagcctatggtctgtgccacacatgctgggacccagcggctcctgtgttcttgctgctgacagctcaggttgctttggccagtggacgcacagcgtggacctgtggcctttctggggacagtggctcaggatgctccatctgtttccttccagggcagtgggtaaccaagtttgactcgagaaagacgaccctccaggattttcatttggacgaggacaggaccgtgagagtccccatgatgtcagatcctaaggccatcttacgatacggcttggactctgatctcaactgcaaggtctgtagggatggaggtggggaggtcagagaagggcagggtggatatggcacagatggccactgagatgtgcaggctgtctgaattttgctgtgtaactttgggcaagttatcaatgtttctggggcttgcccccccccctttctctggctttccttttcttgaagaggagtgagaaatagttatcagaactcattctcccagggtttgttttaaggatcaaggtcacgagaatgggttttcaagatctgacactcagaattgaggacagtgacacacctgtaacccccagcagtcaggaggctgagggagggtgatcaagagctcagtctgagttgtactttgtgaccatctcaaaacacaaagaagggctggaatgatggctcagtggttaagagtactggctgcttgtctggagttggtggcacatgactttatcccagcactcgggaggcaggggcaggcagatctctgagtttgagcctacagagcaagttccaggacagccaaggctacatagagaaaccctgtctcaagaaaaccaaccaaccaaccaaccaaccaaccaaccaaataactacctcctgcccccaataaaaccaacaacaagagcactggctgctctttcagagcaccaggttcaattctgaatacctacatggcagcttacaaccatttgtaatcccagttccaggcgatccaacatcctcttctggcctctgcagataccaggcatgtctgtggtatacagacagacatgcaggttaccactcatacacataacaagcaggcaggcaggcaggcaggcaggcagacagacagactaggcactcgccagggtgttcctcagtggagaatgcttgcctagtatgaacaaggtcctgggtttaatcctcagcaccgccaaaaacaaagcaagaaagaaaggaaaaaactggacactcaaatgtttatctattcattcgtttctttcgttttgagaacgtctcatgtggtccatgctggcctcaaacatactagctgagacgactttgtactcccaatcttcttaactctacctcccaaatgctggcatttgtttgcttgtttgtttttgttttttttttgagacagggtttctctgtgtagccctggctgttctggaactcactctgtagaccaggctggcctcgaactcagaaatcctcctgcctctgcctcccaagtgctgggattaaaggcgtgcaccaccactgcccagcaggaatgtgttttagttaggcttttattgttatgaagagacaccatgaccaaggcaactcttataaagacaaacatttaattggggctggcttacagtttcagaggttcagttcattatcatcatggtaggaagcatggcattgtgcaggcagacttggtgctggaggagccaagagttctacatcttgatctgaaggcagccaggagactatgtcctctgtagacagccaggaggaggctccctttctaccctgggcagagcttgagcagagagacctcaaagctcacccccaaattgacaattcctccaacaaggccacaccttgtaatatgtcattccccatgaggtaaacattcaaatatacgaatctactgggttcaaatcaattcaaaccccacagtgctggggagtaaacacacagcttcatgcaagggctcgaccaagttggctacagccccagttcaagtcttttgacagcttctctctttagaattaagagcaaagttttgacaacttgtcacaaatgtcacatgctgacattctacagctctaagtgtacctgatttctttctgttttaaatcagtacttattaaccttttctaggctacggcttctttggaaatctaagatcttgaagtagtggggtgtggtgacacatgccttcaataccagtactgagaggcagaagtagtggatcactataagtttgagtccagcctggtctacatagaaagttccaggcagcataatagagagaccttgtctcaaaaaaaaaaaaaacaaaaaaaacctgaaacactctagagaagtgacatttctgtttatgattccatgggggctctgggaagcccagtcgctgtgtccacaggccctaggatcaacacatctgttcaaaggatccattttattgttcatttctggttcaatgctctatacaaagcaaatggtcagcagtgctggcaggcagtctctgggggacattccacttcagctcctaagaaccaggccctgattcgtgtggtcaacttgacacaagttagagtcatttggaagggtgaaactcaattgataaaatgcccccaccagactggcctctgggcaaacccgtgggtcattttctagattagtgattgatgtgggggggcccagcccacaatgggcagtgtcactcctgggcaagtggttctggatagcataaaaaagcaggctaagaagccacggggagcaagccagaaagcagcgttcctccacggcttccgcttcagttcctgccctgagtccccttagtgatgagaagacaccctgcgaattgtcagatgaaataaaccctttcctctccaagttgctttcagtcatgttttatcacaatagaaaccgtagcggaaccacaaacaaacgtgtgttcattaaacttctgtgggttttaggctgagaagaaaactccctactcatggaaggactgccagtaaccagtagcctacagcccaggctgaggctggggagcacaaggctggggccccgttacagcagaggggaaggcagctgttggtgtttttttgtttgtttgttttgttttttctggctcacaactaacctgtgcgcatctctgttgggttagattgcccagctgcccttgacaggaagtatgagcatcatcttcttcctgcccctgaccgtgacccagaacttgaccatgatagaagagagcctcacctctgagttcattcatgacatcgaccgagaactgaagactatccaagctgtgctgactgtccccaagctgaagctgagcttcgaaggcgaacttaccaagtctctgcaggacatgagtatgtttgcaaggccactttgcgctcggggctgagtcttggagcctgccaccttgctgacagaactgagtcctgtggctttctttgtagggtggctcagggaacatgtgacaccattacaggggaggggaatgaagaaccacctcccattagactcagtccttggtgtgtgtgtgtgttgtgtgtgtgtgtatctctatgtgtcctataacagcccaaaacattctctcaggccaggtctggcttcagccatcttggctataagttctcaggtaggtcactgagcctgtcacagagtgcctcatagctcacaagtcactgtgaggtactccacttctagcttgctttcttgaaaatcagcctacacaaacagggagtgtgtgtgtgtgtgtgtgtgtgtgtgtgtgtgtggtgttaatggaatctctgaatctccacagagctacagtcgttgtttgaatcacccgacttcagcaagattactggcaaacccgtgaagctcacccaagtggaacacagggctgctttcgagtggaatgaagagggggcaggaagcagccccagcccaggcctccagcccgtccgcctcaccttcccgctagactatcaccttaaccaacctttcctctttgttctgagggacacggacacgggggccctcctcttcataggcagaatcctggaccccagtagtacttaatgtctcagtgctctacagaacccccagagggaagctgattatacattccaggaaggcggccggtagcttcagtgtagcctctgcaataaaagagcttttccttaatgtttgcttcttccttctcctgtttgaagctgtttcatatggagagaaactggtccttatgaatttacatacttgtaacatgaacgggctctgcttaagctctgccaaagtcaccatttcctgttctcggagtgcaggtggatgaggaagaggaacgtcctgccccaggagggcccccgtccccggagggcacctccacacacaattactaacacttgctgtggggttcctcacctgtctcttactactacaaatatctggggaaatcaacagctgcattagcggtcccagccatgactgctccccttgcttctgggcatgtggtgaagcagccttgtgactgtcttaggacctgaaagcaaagggaaaagatgaagccagagattccccttggttggcatgtctctctagccatggccacttcccaccaggcctaaaccctaacagttctactctcttccaatagtactactctgggacccaatttttcccttggggggacacaatccaaaccatagcacatttccaaaacaaccagactaagtttacttatgtatttatgtgtgtttatgcaggtatgtgtttgcacatggggtcatgtagggaccagaggacaatgctaggtgtcattttccatgagatggctgcctttaaaagttaaatagtcaggtagtgtggtggtggggtggtggtggccgcagcagcagccttggaggtggtggcggtggcgcaaaccctgaatcccagcacttgggaggcagaggcaggcggatttctgagttcaaggccagcctggtctacagagcgagtttcaggacagccagggctatacagagaaaccctgtctccctgtctcgaaaaacaaaaaaaacaaaacaaaaaaaaaaaaggtttatttatttactttatgtatatgagtacactgcagctgtcttcagacacagcagaagagggcatcagattccattacagatggttgtgagccaccatgtggttgctgggaattgaactcagaacctctggaagagcagtcaatactcttaacctctgagccatctctccagccccagaaatatatactattgaggggatggagagatggctcagtgattaagagcctcttttggaaaacccatggttttgttcccagaatccacatggtagctaacaaccctgtgtaactccgaggggatctgatgtcctcttctagccttcacaggcattgcacacatgtggtgcacagaaagatatgcatgtaggcaaaacacccatacacataacattttaaattattaattgtatgcatatgcatgtaacaagtgtgtgtgtgcgtgtgtgtgtaccacagcataaaactgtcaggagacaattctttggagttggttctctccttccacctttagtggccactgaaaattgagggttgctaggcttgtatgacaagtatcttttctcactgagccaccatgttacctcttcctaaccccttatttatttatttatttttcagtctctcactggctgggagcatactaagtagaccagctagctggctggccagtgagccccatggatccgtctgtctccaccttgacaatgctggatcacaagcaagtgccaccacaccttgcttctttttacatggttgctggggttgactttgggttcttgtgttaggagggcaagctaaattttgccaactggccctatttattttttgagaaaggttcttatgatgtacctggctagcctagaacttgctatgtagacaatgcgggcctcaaattcagatgtccatctgctttgcctcctgagttctaggattaaaggcatgcaccaccatgcctgacattcagtccctattttctgagacagggtctcatatagctcagaatggcattgaactcctgctcctccagcctctacttcccacatgctaggattataggcatgtgccattatacctggcaaagttttatttttagttatgtgcatacatatgtgtccgagtgtgggcacatgcatgagtatagcatgagtatagtgcttgcagaggtcagagcatcagatctccttggcgtaggagttactggtggtttgagctgcttgtcactgaggctaggaactgaacttggatttcttgtaagaccagtatatgcttaactgccacctctctagactgcctatctatctatctatctatctatctatctatctatctatctatctatctacctacctatccatccatccatccacccacccacccacccacccacccacccacccacccacagtcagggtctcactatgaaaccctggctgccctggaactcatttatgtagactaggcaagcccaggactcacagagatttgcctgcctctgcctcctgaatgctgggattaaaagtgtgcaccaccttaccgaacttaaatgcatagttttgttttatccttttttttttttaatttactttgaaagattttcttaaaattctctctctctctctctctctctctctctctctctctctctctctctctctctctctctctgtataattgagtgtaggagcttatgcagacgaccagaggtgttggatctcatggacctggagttacaggtggttgagtcactcggtgtgggtattaggaactgaaatgaggccctctggagaagcagtgtgtgctcttagctgctgagacactttttcagcccttttacttttgagacaggtgttttgtaacccagactctagctcttgaccatctagtctcaatcttctgagtgctgagataataggtgtgttgctaccgtggctggctcatactagattataatataagcacaggtattctcaagctaggtcacatgagacaatgaaagagttttttgaatttagttttatgtatgagtgctttgcctgcatttgtctgtgcactacgcacatgcagtgctcacataggccagaagagggcatcagatcccaggaactggaataacagctggtgttagctgctgagaatcaaacccaggacttccagaagagcagtacatgctcttaaccactgagccatcttacaaagcatctaaaaaaagcttccatgcacagaataaggcctgatatataaaacgttaaatatatcctttgaggaagagcacctattttacaaagtgtgacagggcttttaggaataaaacacaaggcatgagtttggactagaataactatagagttgtctgtaggactaaacttttttcctgaaaaagctctaccccaaacaaaacaaacctttcaagtcacctccttgtcagggtaaattaacagacagcaggagactcaaatgctgcccagttcccagtccgcaaatgtttgaatactgtcttttaacaccagcttcttgaaaagctgctgccaggcaccttcaggactgtttatttcctcactgtaatgccatgacagtcaacggctgctccttgggcatggctaggatgagcaagttctaaaaagcagagtgtatggacttgggtcttctttcccactaactcatccaaacaaactggtcatcagcaataatgtactaaggatgagtcagaaaaccccatagctatctgtcccttgtggtctggactattactacccatccttagggaaaggggcaaagtccttccctctgtctcagttggaaaccatgagcagcagtgctcacaaccacagcactcggggcatctggagatgtagcctcacagtctaccaatgagtgacgcccatggctgctcttggaatgccttgcagacagactcatggctccccctggagtgccctgcagacagactcatggctccccctggagtgccctgcagacagactcacggcttcccctggagtgccctgcagacagactcacggctcctcctggagtgccctgcagacagactcatggctccccctggagtgccctgcagacagactcacggctcctcctggagtgccctggacttcatgtgtgagcctgaagagacatggcagtaagaagcagtctcaagctgggcaaggtggccttttcctataaacctagaacttggaaggctgaggcaggaggatgttgtttgaggctagactggcttacagagtaagattctgtctgcaagtgaaacagccagagtggtctgctttcaggtgtgctaacaaggaggcctgtgctatgaagtcatgctacagggttgccttgcatcagtgcttggacagtgagtgccaagaacactcaatgaaagccactgagtaagaattaggacactggtaggaaaccaatacagagttgccatcccaggaagaaactgccaacagtaagacgtatttatttctccattcacaaattatatatcaccagtcttaatgaaaaatttaaggaagcaggatattgtaagtggaattgtatgtctcttgaggtaagcagtcatactgatttcttgctatatattatttttcaattataatacaagactaagaattgaagttctcactggagtggaacacagcacttcattactactagaaaccataggaatgttccagggaaacagattcatcgtttagtgagatgaaatcgagccaaaagcctaggctagcatgagctgcctgcagatcagtgacaaccctttatttatttatttatttattttttacttatttttattttttatttttttggtttttcaagacagggtttctctgtagccctggctgtcctagaactcactttgtagaccaggctggccttgaactcagaaatccgcctgcctcccgagtgctgggattaaaggcgtgtgccaccaagcccggctgcagtgacaaccctttaaagcagcctttagatactggatttagtcttttctgggcatggggtttccatcagagggcagttagctcttgcaagcagcagccagcatggcaggtgagtgtctcaatctgttttcaagtgctctctgtgccagacactaggctcaggtcaggtgggaaggtcccgtcctctctgatgagagctccaagccaacagaacatctcagtcatcaccagagctccttcttgagggtgaggatgattgctctacaccaagggccccacagggacgaatgacgagtccagtaagcaggacctcatttcccggagctcccggacctcctcactctcagggccacagtgcaccaacaggatcctttctgccttccagatggcactcagagcttcaggcactgccaacctgaagccagaaagggaagcttgtcagttcccttccttagtctcaacgaaagtggactcctttctgtgcagagaacacaaagtcgggtccactgcatcccccagggtcttacagggggcacaaagggtctgagttcctctgccctcagggtcttaccatctgaaagtatagataagagacattcacgggcatactgcaaagcagatttgagaaaactgtgtatgtttgtgatagactctgggatcctgacaaaattgggcaaattcaaaaccttaaccagcatttataaaagcttatccagagctgctcactgtggaatgctcgtgtctaacccgactgatgccctctctctgatattgccctcgtctatcaggtccttcgctctctctgaccaaacatactgtttccatgtccgagtatcaggtctatgtttcaaaccctttttcttaccaatgtataccatgagatttgatcaaggctggaggtatggcagccacaaaaaatactaaattggggctagacttcccttcaagtgacctcagtggcacactgggtgagggaccagctcattagggttactcttccttgtattctattttttgtgcagagctagggacagaaccagggccttgtgcatgccaccaagggtgcttccaactgagtggttccctcagcttccttttttaatctccaaagcagggattctcagccttcacatagctaacttgggtctctccactgtggaggcggtcctgtgcactgtaggtttagcctttactagatgctggcagccataacaatcaaaactgtctctaaacactgccaaatgccatttgcaatcccttctagttgaaaaccactgctttaaaaggaataagaggcaaaccagggaaagggccgagccctggagttgagagagcagggactgaggcagccaagggaggtgtgattaagcagacaggaatgctagaggcgggtgaggctgcctccaaatcctccctgggaagctccatgcagacctaatggctttctccacatcctcaggaaggaattcaaagcttaaagtctatcagtgaagcagagggcaaatatctgtcctaaagaggaaataaaagagtttcaacatgctttaaagcactgtagcaaaaagccatacacagaagcacctaggaaaacacagagcactgtgtgccctggccaaacactaggaaaaagaaaggcctacccattgaataggacttgggccagtttgaagagctcatggccaatttcaacactggatggcccatggcgagtttcaaccacctggagactcttctgtacatgggcagcagactttagccagttccctgtgagaagagaaatgtctcattccggaaaagaaacaccattagcctaaggctctgggggcaaggaatgcagaatgggagggagaagagcgtcaattcagatggcaagagagaaccaaacagacaaggcaagggccgcactgaacacacggcagggaaggagaactccggctatacctaaggtagcatacctaaggtagcatgggcctgggccaggccatcttcaatttcccccagtacggtgtgctctgctgacaagaagctctcagcagcctcccggcaccgcaacaactgctgaatggcttgctctatggattcaaaggaaaaatgcctcacaacagatacagatctagtcctggacacgagagaccacgttgcaaggtctctatcggttaggtcaaagtgaaaatgcctctttatctcacggagtcaacagccgggcattccagggaagctgttggttgcttatgttttctctttcagtaaaagaggtgttagatgaggcttcctcacatttaccctgggcttctaacatccattttccaaccaacatttaacaaccaactctacattcctcctgtaatcattagttttcttgactctaggctaaaggtcaacttcagaatctaggctagaatagtcaaaacagattcctaccatgtcagggtctaacatcgagttctgcaaatccctttctgaaaagagaggagtcctttctttctctcagctctcagctcaggctagctaccgagctctactcctgagtcacaccacgagcccaggcagcactcaggacttgctgctgctgctgagggcagagcaaccttctcggagcttaggtccttaagctgggaatcagatgatggcattggacctctggagccacacaaagcccatggaagtcagacagcctttctggtgctcgagctgctagaactatctggcgcagcagacacagcttaaaccatcaggaagactttcaagggcaccagagtaacagctggtcacagtctggtctcactggcctacatagccatcttgtggctggtgctgggataattaaattcaagtcctcagtcatttattgaggactgctcagtaaggcaaggtgataccaaaataaacaagggaagggctgaggcctagggcgagggagccaatctcacctggtttaccggttcggagaagcttctgggccatgcagacctgttgctgaaggtcctgcaggcgagagactagctggtccctgctgacagagtttgtgcaagattcgttgctacagctcagcacatcatttccctgtggaagtcagttctatttttattcctaagcgagaacagttatcaatactgcatattgcatgtacttgagctaaggagtcactgacctgatgaggaagagacttcttcaataacacacgcaaacaaggcctgagtgaattctgatagcaattctaatgaaagaagcagctaatcccactctgaggtttaatttttgaacagaattgataagcgtttgtaatccttttcaccttagcagcccctctcatctccttttgggaccaggactttagatgataaacacacgtataatggctattttaaaacgccataggaaaaccaatatagaaagctggatgggtggtggtagtgtacagcagcactctggaggcagaggcaggcagatctcagtgaatttgagggtagcctggtctacagagtgagttccaggacagccagggctacacagagaaaccctgtctcaaaaacagacaaataaacaaacacagaactctggatgtggtgacacattgcagtaaagtggcacttggaaactaaaggcagtaggatggcaattctgaggccagtcagctttagaataaattctagatcaaccctgcaggaagagaggaagaagcagaagagagatatggctcaaaggataatcatcttactaggaatctatcagggaaagccaggtataggcctgtaaatatcactgcatttgagaagctgggacacgaggatctcaagtttgaggccagcctgggctctgaagtgaactctaggttatctggggatacagagtagaaggaagactgtctcaagagtgagcaggatcgagggagcactaatgcacagggcgcttaggcccagcatggtggcacacctgggagaggtagcagagggcaggagccaaggctacacagagagacgctgcctaaaacacaaaacaaaacaaaacatgctggggaaggcttcattcttgacccttggctttacaattttcaacacagccaattccatttacttatttctaatgagaatgccatgctctggtgtggagaccattttgcattggggcatgaatgttgaagactccagtgtctacaccattacctggcagtagcacccaagggtctgctctcatgctctccactgtggctcttccctctgggtcaaaggctgagggaaaactatgtgggtcggattttcccacagttactacagagtgtgtctgatgaggccagcacagagagatggaattgaacagacagaaaatccacaatctgggtccccagattaaaccatctctgaaatagctccttggaatggtgatctcttagatggggtgtcacttgagactggcctccgacttgagatccttcttcctcagcctcctgagtgctagggttaccagtacccaagtgctaggcctgatgcacaacttttgatgacttatttgagcaagtaaatttctagggctttttttttttttttttttttggtccctttgtgtaatttaagattttgtgtcacttatagggaaaatattaggaaatacaacctgtgttttctgcaggaccgggcgacatgtagggaggagttacaagaagggaagcaggaatggttctcctggcgactgacaacctttagctggagccctgcccctgggaacagcagagatttacctgcatgagcgctctgcaagtcttacaacagaaggcttcccatctgggagctgcagctgctctcagtgtctcagcgtgacaggccccacagcggcagtcaaagaagtactgagaactcagcctctgctgcctctcagcaacgcccatccggctctcgtgaggccctggagagagattacccacagttcctagtcacaccaagagagtcaatgcctactctaccgaggggctggcctagtcatcacgtgactggcatggtggtgctgggttggggtcctggctcagtgatagacactagcctagcctatatgaggttgggtactctgccctatcatctcagaaaaaacaacaaaacacgggtgaaagtggatacgtttccaagctgctggggcaggaagaaagaagccaagaaagtgctcctcgctcattttcaggataggctgtctacaaggcatggagggatatggctcactgccctcaacgggcttttttattacagccagaagaccttttttattggcccaaggatgcattgccctttccaggaaagactcagaggatgagtagaggcactgggcccatatctgctgattcctgtccccttatccttttcatgtgaggtgtgaggcacagcagggtagtggaaagaaaggctggctcaccatagcagtgcagaatctcctgtccttttgcgatcctctgtgctgcccggacggtggcgacagtgccagtgaaggacacactggtgttgggcctgcaggagtggttcaggaggctgacaacagggaagatgcctgtggcaaggcgtatctgcctgctgttggtaatgatgctctcgttagaccctggaagtgcaagaacagaaggaaatgtgcgtcaggacatttgtcccgtccttgtcatctattccccagaagatgaactgagcagctgggcctgaagcccatctgagtcatggctctgcagccggatccgacagaaatcagatggaacatgactcatcgcaaactctggtccccaggaagcaaagtgaatgagcacacaccgaagcctaaccattatgtctgtgtgccactcaaaaccccaagactagaatttataaaaaaaataatcaaaaagggattaccagtggggtgctttctagacagtttcataatacttgtaggacgcagaagcatagcactcctaagattatctccccacgatgtttgaagtctaggtgctttggttcaactgctctttggttggctactagaacgagcatcctgtcagtgtagctcagtttatttacttacgcaccttaagtgtgtgcaaaaccccgcagccttcttcatcctaccctttgtctaaaatttttggaaactgctctgcagtctcaggtaagcaaaccgtctgtccatgttttattgaaggtagtcactgctctgaaatctcagagaagcaaactgtctgtgcatgttttattgaaggtagtcttatgcctcagacaacctcttttgtagtacagtcagctagcacgacaactgcaaggaaggaagaaaggggcctctaggcagtgatgccggtctctatgaacttccattcacacatatgtgagttcctcataccatgtgcacggctatgcttagttaggttagatttctgttgctatggcaaaactctattttaaaaaaagcaaaggaaaggtatgctgagggatgcatgcttgtaattctaacatttgagaggctgggaagagaggctcagcctgggccatataactgatcttggcttaaacaaaaccaaaaaaaccccccaaaaaacaggcagcaaaagatgagttggttaacaaaagttaacagtggtcaaggcgctggcaagtggacctgggagacatgtaagacccaagctctaacagcctacctgctctttaaacaaaatgctaactgatttggttatggagtttctcaggccaaagaagttcagaagcagagatcctccacgcggggaacacacagcagggttttctggcagtggcaggatagtgatagaccagaggaggcagaaaacaactgtgtgaaacacaacagccttggggcacacaaaaggccatccccactccaggttcatcacacacgcaacatttcatttaactagaggcttctaactgcatacctacgaggtctttgtaatagacaaacatatgccagaaataggtatgatacatgtaagatcggctacctagaaaggcttaaattatgatcacagcttcggtttaagcaggagggaaataatatttccaataatctgggtgaaatgtgcaaaacactgactcttaaaggcaaacggttttgtaaaaaagtgggaaacgatcagacaactgtggtgtcactgtccgcgtgccaggaatcctaactaaccgcttatcagaagtaact

SEQ ID NO: 76 - DNA, 36595 bp, Mus musculus
agttacttctgataagcggttagttaggattcctggcacgcggacagtgacaccacagttgtctgatcgtttcccacttttttacaaaaccgtttgcctttaagagtcagtgttttgcacatttcacccagattattggaaatattatttccctcctgcttaaaccgaagctgtgatcataatttaagcctttctaggtagccgatcttacatgtatcatacctatttctggcatatgtttgtctattacaaagacctcgtaggtatgcagttagaagcctctagttaaatgaaatgttgcgtgtgtgatgaacctggagtggggatggccttttgtgtgccccaaggctgttgtgtttcacacagttgttttctgcctcctctggtctatcactatcctgccactgccagaaaaccctgctgtgtgttccccgcgtggaggatctctgcttctgaacttctttggcctgagaaactccataaccaaatcagttagcattttgtttaaagagcaggtaggctgttagagcttgggtcttacatgtctcccaggtccacttgccagcgccttgaccactgttaacttttgttaaccaactcatcttttgctgcctgttttttggggggtttttttggttttgtttaagccaagatcagttatatggcccaggctgagcctctcttcccagcctctcaaatgttagaattacaagcatgcatccctcagcatacctttcctttgctttttttaaaatagagttttgccatagcaacagaaatctaacctaactaagcatagccgtgcacatggtatgaggaactcacatatgtgtgaatggaagttcatagagaccggcatcactgcctagaggcccctttcttccttccttgcagttgtcgtgctagctgactgtactacaaaagaggttgtctgaggcataagactaccttcaataaaacatgcacagacagtttgcttctctgagatttcagagcagtgactaccttcaataaaacatggacagacggtttgcttacctgagactgcagagcagtttccaaaaattttagacaaagggtaggatgaagaaggctgcggggttttgcacacacttaaggtgcgtaagtaaataaactgagctacactgacaggatgctcgttctagtagccaaccaaagagcagttgaaccaaagcacctagacttcaaacatcgtggggagataatcttaggagtgctatgcttctgcgtcctacaagtattatgaaactgtctagaaagcaccccactggtaatccctttttgattattttttttataaattctagtcttggggttttgagtggcacacagacataatggttaggcttcggtgtgtgctcattcactttgcttcctggggaccagagtttgcgatgagtcatgttccatctgatttctgtcggatccggctgcagagccatgactcagatgggcttcaggcccagctgctcagttcatcttctggggaatagatgacaaggacgggacaaatgtcctgacgcacatttccttctgttcttgcacttccagggtctaacgagagcatcattaccaacagcaggcagatacgccttgccacaggcatcttccctgttgtcagcctcctgaaccactcctgcaggcccaacaccagtgtgtccttcactggcactgtcgccaccgtccgggcagcacagaggatcgcaaaaggacaggagattctgcactgctatggtgagccagcctttctttccactaccctgctgtgcctcacacctcacatgaaaaggataaggggacaggaatcagcagatatgggcccagtgcctctactcatcctctgagtctttcctggaaagggcaatgcatccttgggccaataaaaaaggtcttctggctgtaataaaaaagcccgttgagggcagtgagccatatccctccatgccttgtagacagcctatcctgaaaatgagcgaggagcactttcttggcttctttcttcctgccccagcagcttggaaacgtatccactttcacccgtgttttgttgttttttctgagatgatagggcagagtacccaacctcatataggctaggctagtgtctatcactgagccaggaccccaacccagcaccaccatgccagtcacgtgatgactaggccagcccctcggtagagtaggcattgactctcttggtgtgactaggaactgtgggtaatctctctccagggcctcacgagagccggatgggcgttgctgagaggcagcagaggctgagttctcagtacttctttgactgccgctgtggggcctgtcacgctgagacactgagagcagctgcagctcccagatgggaagccttctgttgtaagacttgcagagcgctcatgcaggtaaatctctgctgttcccaggggcagggctccagctaaaggttgtcagtcgccaggagaaccattcctgcttcccttcttgtaactcctccctacatgtcgcccggtcctgcagaaaacacaggttgtatttcctaatattttccctataagtgacacaaaatcttaaattacacaaagggaccaaaaaaaaaaaaaaaaaaaaagccctagaaatttacttgctcaaataagtcatcaaaagttgtgcatcaggcctagcacttgggtactggtaaccctagcactcaggaggctgaggaagaaggatctcaagtcggaggccagtctcaagtgacaccccatctaagagatcaccattccaaggagctatttcagagatggtttaatctggggacccagattgtggattttctgtctgttcaattccatctctctgtgctggcctcatcagacacactctgtagtaactgtgggaaaatccgacccacatagttttccctcagcctttgacccagagggaagagccacagtggagagcatgagagcagacccttgggtgctactgccaggtaatggtgtagacactggagtcttcaacattcatgccccaatgcaaaatggtctccacaccagagcatggcattctcattagaaataagtaaatggaattggctgtgttgaaaattgtaaagccaagggtcaagaatgaagccttccccagcatgttttgttttgttttgtgttttaggcagcgtctctctgtgtagccttggctcctgccctctgctacctctcccaggtgtgccaccatgctgggcctaagcgccctgtgcattagtgctccctcgatcctgctcactcttgagacagtcttccttctactctgtatccccagataacctagagttcacttcagagcccaggctggcctcaaacttgagatcctcgtgtcccagcttctcaaatgcagtgatatttacaggcctatacctggctttccctgatagattcctagtaagatgattatcctttgagccatatctctcttctgcttcttcctctcttcctgcagggttgatctagaatttattctaaagctgactggcctcagaattgccatcctactgcctttagtttccaagtgccactttactgcaatgtgtcaccacatccagagttctgtgtttgtttatttgtctgtttttgagacagggtttctctgtgtagccctggctgtcctggaactcactctgtagaccaggctaccctcaaattcactgagatctgcctgcctctgcctccagagtgctgctgtacactaccaccacccatccagctttctatattggttttcctatggcgttttaaaatagccattatacgtgtgtttatcatctaaagtcctggtcccaaaaggagatgagaggggctgctaaggtgaaaaggattacaaacgcttatcaattctgttcaaaaattaaacctcagagtgggattagctgcttctttcattagaattgctatcagaattcactcaggccttgtttgcgtgtgttattgaagaagtctcttcctcatcaggtcagtgactccttagctcaagtacatgcaatatgcagtattgataactgttctcgcttaggaataaaaatagaactgacttccacagggaaatgatgtgctgagctgtagcaacgaatcttgcacaaactctgtcagcagggaccagctagtctctcgcctgcaggaccttcagcaacaggtctgcatggcccagaagcttctccgaaccggtaaaccaggtgagattggctccctcgccctaggcctcagcccttcccttgtttattttggtatcaccttgccttactgagcagtcctcaataaatgactgaggacttgaatttaattatcccagcaccagccacaagatggctatgtaggccagtgagaccagactgtgaccagctgttactctggtgcccttgaaagtcttcctgatggtttaagctgtgtctgctgcgccagatagttctagcagctcgagcaccagaaaggctgtctgacttccatgggctttgtgtggctccagaggtccaatgccatcatctgattcccagcttaaggacctaagctccgagaaggttgctctgccctcagcagcagcagcaagtcctgagtgctgcctgggctcgtggtgtgactcaggagtagagctcggtagctagcctgagctgagagctgagagaaagaaaggactcctctcttttcagaaagggatttgcagaactcgatgttagaccctgacatggtaggaatctgttttgactattctagcctagattctgaagttgacctttagcctagagtcaagaaaactaatgattacaggaggaatgtagagttggttgttaaatgttggttggaaaatggatgttagaagcccagggtaaatgtgaggaagcctcatctaacacctcttttactgaaagagaaaacataagcaaccaacagcttccctggaatgcccggctgttgactccgtgagataaagaggcattttcactttgacctaaccgatagagaccttgcaacgtggtctctcgtgtccaggactagatctgtatctgttgtgaggcatttttcctttgaatccatagagcaagccattcagcagttgttgcggtgccgggaggctgctgagagcttcttgtcagcagagcacaccgtactgggggaaattgaagatggcctggcccaggcccatgctaccttaggtatgctaccttaggtatagccggagttctccttccctgccgtgtgttcagtgcggcccttgccttgtctgtttggttctctcttgccatctgaattgacgctcttctccctcccattctgcattccttgcccccagagccttaggctaatggtgtttcttttccggaatgagacatttctcttctcacagggaactggctaaagtctgctgcccatgtacagaagagtctccaggtggttgaaactcgccatgggccatccagtgttgaaattggccatgagctcttcaaactggcccaagtcctattcaatgggtaggcctttctttttcctagtgtttggccagggcacacagtgctctgtgttttcctaggtgcttctgtgtatggctttttgctacagtgctttaaagcatgttgaaactcttttatttcctctttaggacagatatttgccctctgcttcactgatagactttaagctttgaattccttcctgaggatgtggagaaagccattaggtctgcatggagcttcccagggaggatttggaggcagcctcacccgcctctagcattcctgtctgcttaatcacacctcccttggctgcctcagtccctgctctctcaactccagggctcggccctttccctggtttgcctcttattccttttaaagcagtggttttcaactagaagggattgcaaatggcatttggcagtgtttagagacagttttgattgttatggctgccagcatctagtaaaggctaaacctacagtgcacaggaccgcctccacagtggagagacccaagttagctatgtgaaggctgagaatccctgctttggagattaaaaaaggaagctgagggaaccactcagttggaagcacccttggtggcatgcacaaggccctggttctgtccctagctctgcacaaaaaatagaatacaaggaagagtaaccctaatgagctggtccctcacccagtgtgccactgaggtcacttgaagggaagtctagccccaatttagtattttttgtggctgccatacctccagccttgatcaaatctcatggtatacattggtaagaaaaagggtttgaaacatagacctgatactcggacatggaaacagtatgtttggtcagagagagcgaaggacctgatagacgagggcaatatcagagagagggcatcagtcgggttagacacgagcattccacagtgagcagctctggataagcttttataaatgctggttaaggttttgaatttgcccaattttgtcaggatcccagagtctatcacaaacatacacagttttctcaaatctgctttgcagtatgcccgtgaatgtctcttatctatactttcagatggtaagaccctgagggcagaggaactcagaccctttgtgccccctgtaagaccctgggggatgcagtggacccgactttgtgttctctgcacagaaaggagtccactttcgttgagactaaggaagggaactgacaagcttccctttctggcttcaggttggcagtgcctgaagctctgagtgccatctggaaggcagaaaggatcctgttggtgcactgtggccctgagagtgaggaggtccgggagctccgggaaatgaggtcctgcttactggactcgtcattcgtccctgtggggcccttggtgtagagcaatcatcctcaccctcaagaaggagctctggtgatgactgagatgttctgttggcttggagctctcatcagagaggacgggaccttcccacctgacctgagcctagtgtctggcacagagagcacttgaaaacagattgagacactcacctgccatgctggctgctgcttgcaagagctaactgccctctgatggaaaccccatgcccagaaaagactaaatccagtatctaaaggctgctttaaagggttgtcactgcagccgggcttggtggcacacgcctttaatcccagcactcgggaggcaggcggatttctgagttcaaggccagcctggtctacaaagtgagttctaggacagccagggctacagagaaaccctgtcttgaaaaaccaaaaaaataaaaaataaaaataagtaaaaaataaataaataaataaataaagggttgtcactgatctgcaggcagctcatgctagcctaggcttttggctcgatttcatctcactaaacgatgaatctgtttccctggaacattcctatggtttctagtagtaatgaagtgctgtgttccactccagtgagaacttcaattcttagtcttgtattataattgaaaaataatatatagcaagaaatcagtatgactgcttacctcaagagacatacaattccacttacaatatcctgcttccttaaatttttcattaagactggtgatatataatttgtgaatggagaaataaatacgtcttactgttggcagtttcttcctgggatggcaactctgtattggtttcctaccagtgtcctaattcttactcagtggctttcattgagtgttcttggcactcactgtccaagcactgatgcaaggcaaccctgtagcatgacttcatagcacaggcctccttgttagcacacctgaaagcagaccactctggctgtttcacttgcagacagaatcttactctgtaagccagtctagcctcaaacaacatcctcctgcctcagccttccaagttctaggtttataggaaaaggccaccttgcccagcttgagactgcttcttactgccatgtctcttcaggctcacacatgaagtccagggcactccaggaggagccgtgagtctgtctgcagggcactccagggggagccatgagtctgtctgcagggcactccaggaggagccgtgagtctgtctgcagggcactccaggggaagccgtgagtctgtctgcagggcactccagggggagccatgagtctgtctgcagggcactccagggggagccatgagtctgtctgcaaggcattccaagagcagccatgggcgtcactcattggtagactgtgaggctacatctccagatgccccgagtgctgtggttgtgagcactgctgctcatggtttccaactgagacagagggaaggactttgcccctttccctaaggatgggtagtaatagtccagaccacaagggacagatagctatggggttttctgactcatccttagtacattattgctgatgaccagtttgtttggatgagttagtgggaaagaagacccaagtccatacactctgctttttagaacttgctcatcctagccatgcccaaggagcagccgttgactgtcatggcattacagtgaggaaataaacagtcctgaaggtgcctggcagcagcttttcaagaagctggtgttaaaagacagtattcaaacatttgcggactgggaactgggcagcatttgagtctcctgctgtctgttaatttaccctgacaaggaggtgacttgaaaggtttgttttgtttggggtagagctttttcaggaaaaaagtttagtcctacagacaactctatagttattctagtccaaactcatgccttgtgttttattcctaaaagccctgtcacactttgtaaaataggtgctcttcctcaaaggatatatttaacgttttatatatcaggccttattctgtgcatggaagctttttttagatgctttgtaagatggctcagtggttaagagcatgtactgctcttctggaagtcctgggtttgattctcagcagctaacaccagctgttattccagttcctgggatctgatgccctcttctggcctatgtgagcactgcatgtgcgtagtgcacagacaaatgcaggcaaagcactcatacataaaactaaattcaaaaaactctttcattgtctcatgtgacctagcttgagaatacctgtgcttatattataatctagtatgagccagccacggtagcaacacacctattatctcagcactcagaagattgagactagatggtcaagagctagagtctgggttacaaaacacctgtctcaaaagtaaaagggctgaaaaagtgtctcagcagctaagagcacacactgcttctccagagggcctcatttcagttcctaatacccacaccgagtgactcaaccacctgtaactccaggtccatgagatccaacacctctggtcgtctgcataagctcctacactcaattatacagagagagagagagagagagagagagagagagagagagagagagagagagagagagagagaattttaagaaaatctttcaaagtaaattaaaaaaaaaaaaggataaaacaaaactatgcatttaagttcggtaaggtggtgcacacttttaatcccagcattcaggaggcagaggcaggcaaatctctgtgagtcctgggcttgcctagtctacataaatgagttccagggcagccagggtttcatagtgagaccctgactgtgggtgggtgggtgggtgggtgggtgggtgggtgggtggatggatggatggataggtaggtagatagatagatagatagatagatagatagatagatagatagatagataggcagtctagagaggtggcagttaagcatatactggtcttacaagaaatccaagttcagttcctagcctcagtgacaagcagctcaaaccaccagtaactcctacgccaaggagatctgatgctctgacctctgcaagcactatactcatgctatactcatgcatgtgcccacactcggacacatatgtatgcacataactaaaaataaaactttgccaggtataatggcacatgcctataatcctagcatgtgggaagtagaggctggaggagcaggagttcaatgccattctgagctatatgagaccctgtctcagaaaatagggactgaatgtcaggcatggtggtgcatgcctttaatcctagaactcaggaggcaaagcagatggacatctgaatttgaggcccgcattgtctacatagcaagttctaggctagccaggtacatcataagaacctttctcaaaaaataaatagggccagttggcaaaatttagcttgccctcctaacacaagaacccaaagtcaaccccagcaaccatgtaaaaagaagcaaggtgtggtggcacttgcttgtgatccagcattgtcaaggtggagacagacggatccatggggctcactggccagccagctagctggtctacttagtatgctcccagccagtgagagactgaaaaataaataaataaataaggggttaggaagaggtaacatggtggctcagtgagaaaagatacttgtcatacaagcctagcaaccctcaattttcagtggccactaaaggtggaaggagagaaccaactccaaagaattgtctcctgacagttttatgctgtggtacacacacacgcacacacacacttgttacatgcatatgcatacaattaataatttaaaatgttatgtgtatgggtgttttgcctacatgcatatctttctgtgcaccacatgtgtgcaatgcctgtgaaggctagaagaggacatcagatcccctcggagttacacagggttgttagctaccatgtggattctgggaacaaaaccatgggttttccaaaagaggctcttaatcactgagccatctctccatcccctcaatagtatatatttctggggctggagagatggctcagaggttaagagtattgactgctcttccagaggttctgagttcaattcccagcaaccacatggtggctcacaaccatctgtaatggaatctgatgccctcttctgctgtgtctgaagacagctgcagtgtactcatatacataaagtaaataaataaaccttttttttttttgttttgttttttttgtttttcgagacagggagacagggtttctctgtatagccctggctgtcctgaaactcgctctgtagaccaggctggccttgaactcagaaatccgcctgcctctgcctcccaagtgctgggattcagggtttgcgccaccgccaccacctccaaggctgctgctgcggccaccaccaccccaccaccacactacctgactatttaacttttaaaggcagccatctcatggaaaatgacacctagcattgtcctctggtccctacatgaccccatgtgcaaacacatacctgcataaacacacataaatacataagtaaacttagtctggttgttttggaaatgtgctatggtttggattgtgtccccccaagggaaaaattgggtcccagagtagtactattggaagagagtagaactgttagggtttaggcctggtgggaagtggccatggctagagagacatgccaaccaaggggaatctctggcttcatcttttccctttgctttcaggtcctaagacagtcacaaggctgcttcaccacatgcccagaagcaaggggagcagtcatggctgggaccgctaatgcagctgttgatttccccagatatttgtagtagtaagagacaggtgaggaaccccacagcaagtgttagtaattgtgtgtggaggtgccctccggggacgggggccctcctggggcaggacgttcctcttcctcatccacctgcactccgagaacaggaaatggtgactttggcagagcttaagcagagcccgttcatgttacaagtatgtaaattcataaggaccagtttctctccatatgaaacagcttcaaacaggagaaggaagaagcaaacattaaggaaaagctcttttattgcagaggctacactgaagctaccggccgccttcctggaatgtataatcagcttccctctgggggttctgtagagcactgagacattaagtactactggggtccaggattctgcctatgaagaggagggcccccgtgtccgtgtccctcagaacaaagaggaaaggttggttaaggtgatagtctagcgggaaggtgaggcggacgggctggaggcctgggctggggctgcttcctgccccctcttcattccactcgaaagcagccctgtgttccacttgggtgagcttcacgggtttgccagtaatcttgctgaagtcgggtgattcaaacaacgactgtagctctgtggagattcagagattccattaacaccacacacacacacacacacacacacacacacacactccctgtttgtgtaggctgattttcaagaaagcaagctagaagtggagtacctcacagtgacttgtgagctatgaggcactctgtgacaggctcagtgacctacctgagaacttatagccaagatggctgaagccagacctggcctgagagaatgttttgggctgttataggacacatagagatacacacacacacaacacacacacacaccaaggactgagtctaatgggaggtggttcttcattcccctcccctgtaatggtgtcacatgttccctgagccaccctacaaagaaagccacaggactcagttctgtcagcaaggtggcaggctccaagactcagccccgagcgcaaagtggccttgcaaacatactcatgtcctgcagagacttggtaagttcgccttcgaagctcagcttcagcttggggacagtcagcacagcttggatagtcttcagttctcggtcgatgtcatgaatgaactcagaggtgaggctctcttctatcatggtcaagttctgggtcacggtcaggggcaggaagaagatgatgctcatacttcctgtcaagggcagctgggcaatctaacccaacagagatgcgcacaggttagttgtgagccagaaaaaacaaaacaaacaaacaaaaaaacaccaacagctgccttcccctctgctgtaacggggccccagccttgtgctccccagcctcagcctgggctgtaggctactggttactggcagtccttccatgagtagggagttttcttctcagcctaaaacccacagaagtttaatgaacacacgtttgtttgtggttccgctacggtttctattgtgataaaacatgactgaaagcaacttggagaggaaagggtttatttcatctgacaattcgcagggtgtcttctcatcactaaggggactcagggcaggaactgaagcggaagccgtggaggaacgctgctttctggcttgctccccgtggcttcttagcctgcttttttatgctatccagaaccacttgcccaggagtgacactgcccattgtgggctgggcccccccacatcaatcactaatctagaaaatgacccacgggtttgcccagaggccagtctggtgggggcattttatcaattgagtttcacccttccaaatgactctaacttgtgtcaagttgaccacacgaatcagggcctggttcttaggagctgaagtggaatgtcccccagagactgcctgccagcactgctgaccatttgctttgtatagagcattgaaccagaaatgaacaataaaatggatcctttgaacagatgtgttgatcctagggcctgtggacacagcgactgggcttcccagagcccccatggaatcataaacagaaatgtcacttctctagagtgtttcaggttttttttgttttttttttttttgagacaaggtctctctattatgctgcctggaactttctatgtagaccaggctggactcaaacttatagtgatccactacttctgcctctcagtactggtattgaaggcatgtgtcaccacaccccactacttcaagatcttagatttccaaagaagccgtagcctagaaaaggttaataagtactgatttaaaacagaaagaaatcaggtacacttagagctgtagaatgtcagcatgtgacatttgtgacaagttgtcaaaactttgctcttaattctaaagagagaagctgtcaaaagacttgaactggggctgtagccaacttggtcgagcccttgcatgaagctgtgtgtttactccccagcactgtggggtttgaattgatttgaacccagtagattcgtatatttgaatgtttacctcatggggaatgacatattacaaggtgtggccttgttggaggaattgtcaatttgggggtgagctttgaggtctctctgctcaagctctgcccagggtagaaagggagcctcctcctggctgtctacagaggacatagtctcctggctgccttcagatcaagatgtagaactcttggctcctccagcaccaagtctgcctgcacaatgccatgcttcctaccatgatgataatgaactgaacctctgaaactgtaagccagccccaattaaatgtttgtctttataagagttgccttggtcatggtgtctcttcataacaataaaagcctaactaaaacacattcctgctgggcagtggtggtgcacgcctttaatcccagcacttgggaggcagaggcaggaggatttctgagttcgaggccagcctggtctacagagtgagttccagaacagccagggctacacagagaaaccctgtctcaaaaaaaaaacaaaaacaaacaagcaaacaaatgccagcatttgggaggtagagttaagaagattgggagtacaaagtcgtctcagctagtatgtttgaggccagcatggaccacatgagacgttctcaaaacgaaagaaacgaatgaatagataaacatttgagtgtccagttttttcctttctttcttgctttgtttttggcggtgctgaggattaaacccaggaccttgttcatactaggcaagcattctccactgaggaacaccctggcgagtgcctagtctgtctgtctgcctgcctgcctgcctgcctgcctgcttgttatgtgtatgagtggtaacctgcatgtctgtctgtataccacagacatgcctggtatctgcagaggccagaagaggatgttggatcgcctggaactgggattacaaatggttgtaagctgccatgtaggtattcagaattgaacctggtgctctgaaagagcagccagtgctcttgttgttggttttattgggggcaggaggtagttatttggttggttggttggttggttggttggttggttttcttgagacagggtttctctatgtagccttggctgtcctggaacttgctctgtaggctcaaactcagagatctgcctgcccctgcctcccgagtgctgggataaagtcatgtgccaccaactccagacaagcagccagtactcttaaccactgagccatcattccagcccttctttgtgttttgagatggtcacaaagtacaactcagactgagctcttgatcaccctccctcagcctcctgactgctgggggttacaggtgtgtcactgtcctcaattctgagtgtcagatcttgaaaacccattctcgtgaccttgatccttaaaacaaaccctgggagaatgagttctgataactatttctcactcctcttcaagaaaaggaaagccagagaaaggggggggggcaagccccagaaacattgataacttgcccaaagttacacagcaaaattcagacagcctgcacatctcagtggccatctgtgccatatccaccctgcccttctctgacctccccacctccatccctacagaccttgcagttgagatcagagtccaagccgtatcgtaagatggccttaggatctgacatcatggggactctcacggtcctgtcctcgtccaaatgaaaatcctggagggtcgtctttctcgagtcaaacttggttacccactgccctggaaggaaacagatggagcatcctgagccactgtccccagaaaggccacaggtccacgctgtgcgtccactggccaaagcaacctgagctgtcagcagcaagaacacaggagccgctgggtcccagcatgtgtggcacagaccataggctccatgcaccacgggttctggctatcctcctgtagtaaactcagaaataagtgggtgttctctctctgacttggatcaccacgctccttctgtttaaagtggcctttaatatgctggtgtgtggtacgtgcctgctctcctgtcccctggggacttggagtaggaagccccagggctttcctctaagttaggatccactcttgctactactccataagatggtcacaaagcaacgtaaaatggaaattaatcaaaccattcctgccacaagaataaaacagatctcaggggaggcctgtggaagggtctcctgaggccttaccactgtctagaaggaagttgacagcagttcttgagcaggggtgcgactccaggagttgggggctgctctgagagcaggacagcatgtattgtagagtgtctgggagggagctgtgttatccttaccgtgaagatgaggacacgggctcatgggggcagagccaggattaaacctggtctgattcaaaaagccagagatctgtgcccagccccacgcagccatttcactggtcaactaattcagaaacacttggtctgatatgctcatatgctacaagcactgtggccttcagatctccctctggcctggtacctgcattcaggttcaccaccatcaccacacacacacacacacacacacacacacactcggccagagacaagtggggaagccctcacccttgaagtaagccacgccaaggagaaggatgctgagggcactgggcatttccctcgtggaccgggcaatcttccctttcatctgggcctgcacccagttgttaatctcctgaaggtctactcgagggttgcccgtgaggatccggggcctggtcccataggacttctccagaggggcaacaaagctggatttgactcgaagttcttgagaggaaacagatcaaagatgagagctgaatcagcaccctcactttgaaagcatgccagaccccagcttcctgctcagcatcttcctttgacttgctggggcatctgccggcttgcccagaccctggctagggaacagtggattccaccgtttgcattccccgtcccaggccctcctgctgtctcccagagcccacttcctctttctgttcctctgtggtctcactggctctttcctgcccaccagtgccaggcctcgcctgagcacacacagcctattgtttagacatcatggaagcatacagacaacccaggccaatgaagcaacttcacgccaggcataatggggcgtgcctgcccttcagaagcagaggcagctttatgagttgggggaccagctgagactctatagactttgagaggtggggtgggggtggggctactgactcctctcaaacacaattctggaagcactcttgaggttcttctcaggggcagtaacagaggcaaggagctccttgtaggtgctgtggatgtcagggttggtgatcaggtcgtagtagagagcccggtgaatgacagactctgttcgatgttcagctcctgccagagagaaaaggatgccaagcttcataactgcccgtgaggcccgcatcaggatagggacgttagacatcaatccttttgtcctctgagagcccgaggaggccgatattgcagatgttttagctggacaagatcttcagggcgtggaaagaaataatgaccgccttgctaggaagagctctaagacagggcaaggttatcagagctacagagagaagagtgggatgtggtcctgaagttctcccatcgtaacctaccctgttctgaggaggagccagctctgctcacggcagctgtacccctagaacctggttaaatgactaaaacacgataggaggccacttaaggaaccaaggtcgagtgccacttacaaagtggtagggattgtgtgtgtggcccccaccgcccctttcctgttcctctgacggcggcagcatggaaactctgagtgggggaaattcaggtccacctgcagccttcttcagttgacactcacccagagaaagggcagagagggccgtggccacgctgagtggagacagcaggacgttgcccgttgggctggcactggatctcaggcggtacagatcgtagccgaagttggagacagctgctgccagcttgttcacagggaccttgaagaaggggtcctcctcctccacgggctcgcccgtgctgtccgggactggggagccctgggttagaatacaaggaccagtagggaggcacagtgagtacatcacctcctggttgggttggtcctctagtccctggggccatgagtctgaggtcagaatgagtgtgtgctctctgactccacaacctgtgtgctgggaggtggggagtgggaagggcaacacaaaagggcttgccagacctgaactgtggtctgagaacctgaagcctggcccactttaaaataaaacttgtagggctggggagatagcacagtagataaagtaccagcatgcaagttcaaggacctgggttcagtccccagagctgggcacgggggtgcatgcttataatcccaacactggggaggcagagatgggcaggtcctggggctcattggccaatcagcctgaactaatcagcgtattccatctcagtgaggggtcctgtttcagagggcctgaggaatgactctgggttgactactagcctactctgtgtctgtttctgtctgtctgtctgtctgtctgtctgtctccacccctctctgtccccttccctctgcagggaacttcctcaccaccaccaacccccaaagaaacccaccctcagaccagtcttccctattcagcttgctggctggtcctagtctgcctaggttctgctgtgacgccctccctgtctttcctgacaagccatcccctctgactagacccgagaggaatttgtcgttttctgacctgttttcagtgtcagcctcttccttatgagactttctgcttttttgttttgttcccagggctttggatcaaagctgggctcttacatacgttaggcaaatgcttggccacccagctgtacctcccgtccctgttgcttttcggtttggaggactttttttttagttttctgtttggtttttggttttgattttttgttgtttgtttgtttgttttgagacaggatttcgctatgtgactctagctgtcctgggactcactatgtagaccaggctggccttagattcagagatccacctgcctctgcctcctaagtgctgggatttttagattttaatctgtacctaccaacctcaaaggaagtgtccatggatagagttcagtactacatcatgtgtgtaacatgtgtgagggcctgggcttcacccccaacagagaagggggagttagtaggtgaggaataagtgactggctagtggcaagacagtattgtctaaggtcactaagccttaagccacacttaaagcccacaatccaggtctaatatgcccatctgccttgtccttgtgtgacatgaccccacccctacttcctccgtatagtggcagctcctctggatcctgaaaggagagggaagatattcttgtctcgatgttaaagtaaccaaggcctagaagagtgaaggccaaagcccaccctggatccagggctgcctccctgcactgtctcttctgctgtcccacctacccaccctactgacctcagagctgctggggacgttctggctgctgccgtgcccgagcagggctccagtccagaggagtagcaccagggcctgcatcccggaactacaagagaaacaagagagcaaacgactcccctcacccacaccctcccctgccactgcacattgcacactgcacagggacaagagtcaggcagagtgagcccttcccctccctccagctctcagccccaagtggacccttgacttgaggtcttccgtccctgacctgcccctgcacttctccttgagctgtgcccccatgttggttcctatcaggagacccaccttcccatctaagctccagcacagggaagacccagcagcaggctcttcaggccccaagacaatgctctagcacaaacacacaccaaggcttttccgtggaggcacacggccagctcctttggtaggatttggaaccctgtctcaggatgggagcagagcccaggtcatagacttacagaacatctggtctggtcctgctatccaccaatagttctctgaccaaagcctatgttaaagacacacacacactttcttctaggtaggttcttgtgtatgtagcccaggctagccttgaagttgcagctaccctacttcatttgcctcctgagtactacaatgccaggtgtgagccatcatgcctgacttgactcccttcttctatttcaagagcaattcttagttaagagggtatgaaccagggccacactgcctgggaccaaaccttgtctctgggacttcatagctatctaaagaataaagccctacttgtatggtatggtatggtatggtatggtatggtatggtatggtatggtatggtatggtattgtattgtatagtatagtattgtatagtattgtatagtatagtatagtatagtatagtatagtatagtactgtatagtatagtatagtatagtattgtatagtatagtattgtatagtatagtattgtatagtatagtatagtattgtattgtattatattgtatagtatagtattgtatagtatagtattgtatagtatagtattgtatagtatagtattgtattgtattatattgtatagtattgtatagtatagtatagtattgtatagtatagtattgtattgtatagtatagtatagtatagtattgtattgtatagtatagtatagtattgtatagtattgtattgtatagtatagtatagcatagcatagcatagcatagcatagtatagtattgtatagtattgtatagtatagtattgtattgtatagtatagtatagtattgtatattactgtattgtatagtatagtatagtataatattgtattgtatagtatagtactgtatagtatagtatagtactatatagtattgtatagtatagcatactattgtatagtatagtatagtattgtatagtatagtatagtatagtatagtattgtattgtattgtattgtattgtattgcattgtatagtattgtattgtattgtattgtattgtatagtattgtatggtatagtatagtatagtattgtatggtattgtatagtattgtatagtatagtattgtatagtatagtattgtattgtatagtatagtattgtatagtattgtatagtattgtatggtatagtatagtatagtattgtatggtattgtatagtattgtatagtatagtattgtatagtatagtattgtattgtatagtatagtattgtatagtatagtactgtatagtattgtattgtatagtatagtatatgagttctctgtataaagtatagtagtattgacctacttctatgagggttacattttagaacatctctccttttttcctttttgagacaatcttactatatttaggctccccttgaacgtgtgatccttctgcctctgcctcccaagtgctgaggttacaggcatgcacagtcacatctgcctacacaatgtcttagcagcccttagcagcaccaggggtcaggaagccctcaactgtccctttagctggcttctcttgtgaagggctatgtcttcttccccttcctagcatggagacggctcttagccccagagccttccttccttcaggttaaacagcaccagtttttggtgggacctcccatttccctctatctccctaagcaacgaccttttctgctctgactctcatctggcacttggaccacaagacaaaactgcagcctgggctgtgtgtcctcgcacatcattcctgtgcccccctggagtcaggtctaggggaggaagacagggttcacgactcagaaaagaccactggctgtcctagtgtgccctcacccatcctatagcacgcacatgctgatgtgccccctccgctccatcaccatcctctcatgtacacgtgccctccctcgccagacacatgcatcactaacttttctgacttcccagaaaaatatctgatctgagaagttaggagtctgccatcatcagctatggtccttaaaattaagtcagacaatccatgggacatgaagggcaacaacgagaagactcctcgttccttgttcactctgcttttggcagcaccaccagcaggaaccaacctggctctccctaatccctcatctatagcaggtctcccggtgggaattttagggacctctgtgttctcatccaggggcactgccactcagctgctcagggagagaccccttagaacaacaaagaaatcaatgcagatttaggcttcttgtttcccttcccagcccctcccatcacaggcaacagcctcccttggctgagcctcaggaggctgatttatcagagaggtgctcagagaggcacctctggtccctctgggtaggtagcaactgagacaggaggagatggtcaccctgggcatcctctaccaggaagtaaatgagatacccttgcagatgggacccctgaagttcctcccgggggcgggggtggtggtggtgggagtctaagtcacagatctttgttaccacgtggttagactgaggactgaatctgaggtgggaaatctgatgtgcatggggaaacacagaggtccaatgctggccaagagctacaagcagggacaggtgctagggggatgtctgaatgttccaccccaagccacaggaataacggaaatggagactctaaagggcagaaagtgagggtgtgcagcaggggctgcacaggacacatgcaaggccctggctgcaataactgggttggggaggcagtcattggctagccaggggcaccaggacagtgatgccatcctgtccaaagggcagtgtccaagccagatttctaggctccagggggaggagggtccggggagaggggtcaagattctccccctctgagtcaaggttggccttcccatgtgccccaaatcaggaggcacagaaactgggatgttgtggtctcacatccaagctgagaagacaagtgggagccagtacatgtgtttcagattaaacccagtcggagacaaacatgttgctcctcctcctcccagagccaagctgccttcaagccacatggcagtgaatatgcggacagtgcaggggaggacacctctctctccactggctcaaggacagtttcaaggggttcaggctggctggctcatggctacgccgctcaccccctggacagtttggggtttttccctcctgaaatcttggaatctgaatcagcctgagataccccataattgtacctcccaacacccccagaaaggtcagccctgcagaacagaactctttggtccccacccatccccctcagccctggaggctgaactgatgggcagctaaggtccagacagtggctggctcttggaaagcctgtctctttcctttgactcagaccactccctgccgtggcttacatcaggaggtgcaagggctgcaggagggcagccagaccccacaaaccagctaggctaaatggtgcttattgttcgcaagaggccatgacctcatttgtctcccagctcttttggtaagagagaatgagaggaagctggacagagaacctagcaggcctcaggcagcccactgctccttgctgtaagggaaccagcaccgatggttctgaaaagcagcgatccgaatggagtcaggctgagctgcaggaagctcaccttccttgctcactgctggtggaagcaacttcaggaagagcccagcctatgggactatagctcctccggggtactgctgagtccagccccagagcttagctccctgcttcccaccacccaccaccacatcctttcccaacaccattcaaaaccccagtccagcctctcctactggtctacagtgagcggctaatagagtcctgggcctctgtccccccaattctctctcccctctcatctgttcaccttggttcctaaactgcaggggctactataaccctacctccacttccttgcacccctcttttctgctctctggggtgcccctgccactcccagtccctctagccagggagcctcttccatatctgtcttccccaggctagaccaggcgctgccttacctgtggttgcggcagcttctctcacagcctgcactctgaggggctccaggaagcagtgaggggagtagctgcctctcaaccagcgtccagcaggcttcagattacagctactcttttcttaaagtgacctgactccatttggaatctgtgattgcatcattgtctggtgttaactttaacccactgctgcccttccgccatgtggctccaagaccacacgttggccaccctcctctcccaccacatctcccttggatctttatctctcttcattgggaccttcattgggacatgatggctaacttcaggggcacttgggccagcctggggtaggtcatgagtctgaacttgaacatctgaaaggattggctgagaggcaggctgcatggagagactgtgagccagccggtatggagatgctgggttcttccaggcgcttggctctggctcactgcaggtgggagcaaggtgattcttctcccctcctcacctggaaaatgaaggaatgggactgtacctgacagctctgaaggttccaaaggacagtggggtggggactagagagttggcccagtgcttatgagcactggctgctctcgcagaggacctgagttctgttcccagctcacatagcaaggactcgaaactgcttggaactccagctccagagaatctgacgctatctcctggcctcatcaggtatcagagagagagagagagagagagagagagagagagagagaggataaaaggttagcccagtggtggtggcacatacctttaattccaacacttgagaggcagaggcaggtggagctctgtgggccagtttggtttacagagtaagtttcagaatagccagggctacacagagaaaccctgtcttgaagagaaacacacacacacacacacacacacacacacacacacaaataagatctttaagaagaaaagaaaggatagtggggaaacatctgagcagaggaagaaatggggtgcgcaggacacccaccctcagaggaggccctcactggaggtgtctgcacaggagaacacttgcactcagcttgccctagggcgtcagaactcagaattcagtttcaaagcactgacaggagcagtgactggggaccccaggttgaatcccccctttatctaaaatgagtaagaaccaaaaaaacaaaagtgtttgggatttggaatctgggttatttgcatctacaaaagaggtcttggggaggaaacccagttctacccctggaattcatcagtttcctataccgctgactacacaggggctgaaggtaatctcaatgttttcataactggtgtggtgctacttgctcatgatcccaacacttggaaggtaggtcagaagttcaagagcagtcttgactactcagtgaatttgaggctagcctgggctacatgaaaactcataaaacaataaaagaaaagaaaaggtggcgagtgaggtggcccatcaggtaaaagtgccaaccacctcgcctgaaagcctccacacggaaggggaaagccagcttctacatgtggtcctctgccctccgcatgcaccatggctcgtgcacccccacacccacccacccacccacccacatgacataaatacttgtaatgattagtttctgaagaacaatattttcgttgatcttgtttagggaacaaagttcgtgcacattgacctgtcgaccgtgtagtacgggatccgctccaggaagctaaagattttgggatgcttcatgttgcagctactctgatgaacagtgttgctttctgggccaggtaatggtggcatatacctttgatcccagcacttgggaggcagaagcatgtagatctctgtgagttcgagatcagcctggtctacagagtgagttccaggatatccaaggctatacagaaaaacccctgtctctaaaaatcactaatttaaaaaaaaattcctttctaaacctatataacaaatgttttgtaggctgccttaacaaagcccaatggccattcagagaaggctcaaaagagaaagtttaggggactctacaagcatcctcaggaaggccacagaaagcagagcctgggccagtgagactttgcagtgggcaaggttcagctctttatgtaggaagaagagagtcaacagtcagagtccagctttccataaaacctgtgcagggcctctaggcaaagccctgtgttaggggcaaaggcatttgcagtctaagcccggtgacatgagctcaatccttggaacccaggtggaaggagtgtgctgactccacaaatttgtcctctgatctatacatgtatgcacgtgcacgcacactcacatacatgtccacatgcacacatgcatatacatgcgcatgcgtgcacccacacacagggtcaaaagcagcaagagatgccctgtgaaaaacgtctcattcagtctcccatcatccagtgccacactctgagcacaggtggtactgatatcgttcctgattgatcgatcagttgatttgagaccccgcctcactatgtagcccaggctggcctggaactcacagtgatcctcttgcttctgcaagatgagcccatcatgcccaccatgttattgaagcaataccatgctctataaagcaaacctaggcaggcaggatggtggactcctgtaatctcaggacttgaaaagtagaagggagatgaggagttcacatcaatctcccgtatgcgttggaggctggagtggctgttccctgggcgcttctgccagcacctgaccaatgcagatgcagatgctcacagccaaccatcagactgagctcgggaccccagtgagggtgctggggggaggactggaggagctgagacgggattgcaagcccataggaagaacaatgtcagctggccaaaccacccagagctcccagggactagaccacgaaccgaggactgcacatgaagggatccatggctccagatgcatatgcagcagaggacagccttgtctgacagcatgggaggggaggccattggtcctgtggaggtttgatgccccagtgttggaggatgctggagcggtggggcaggagtgggtgggtaggtggggagcaccttcatagaggcaaaagggatgggggagaaggcagatgggatgggggggttgtggaggggtaagaaagaaaaaagatgtctctgaaagtaaaaagtacttgtcactaagcatgaggatatgagtcaacccccaagccccacagggtggaaggagagaaatgagtcccacaagttattttctgatctatacgtgcaatccatggcatacgcagaaacgcaaagacagacaatgagttgggtgtggtggtgcacatgtaattccatcattcaggagacagaagcagcagagttgttggaaatctaaggccaacctaaagacctacacccaaagaaggacaaactataaggaaaaaggtggtcgaccaatgtaacattaaagttagaaatctctcttcacactgtgtagatactgtacaaggaagagaaaaggcagccacatcaaaacagtgtaaatcaacgagaaaaccagaaacaactcaagagaaggctgcaggggcctgaattctgttctcagaacctgcatcaagccaagagaatcaaaactgtctgtaactccagctccctgggatccaacacccatttctggcctccatcagcatcactcacaggtgtgcacacatacacatcaataaaaatcaaaaccagggatgaaggggtagggaggtgcatgtggatctgggaggagctgagaggcactgggtgaatacaataaaaaatttggtgcatggtggtgcacgcctttaatcccagcacttgggaggcagaggcaggcgaatttctgagttcaagaccagcctggtctacagagttagttccaggacagccaggtctacacagagaaaccctgtctcaaaaaaacaaaacagccgggcggtggtggcacacgcctttaatcccagcacttgggaggcagaggcaggtggatttctgagttcgaggccagcctggtctacaaagtgagttccaggacagccagggctacacagagaaaccctgtcttgaaataaataagcatttgttgctgttacagaaaactccagcccagtttccagcacacacagggtgactcacaacatcataactccacttccaggggatccaatgccttcttctgacctctgtgggcaccaggattgcatacagtgcacagacatgcacataggcaaaacactcacaaaataaaataaatctagcaaaaaaaattttaactaataatttaaagaaaaaaataaggaagccgggggtggtgtcgcacgcctttaatcctagcacttgggagacagaggcaggcggatttctgagttcgaggccagcctggtctacaaaagtgagttccaggacagccagggctacacagagaaaccctgtcttgaaataaataaataaataaaaaataaggccaagtaattcttggaagaatcccaaggggacactaagtgtatataaaggcgttccatagggctaggaatgaggcttagcgagagcaacttcgctggtgtatgaaagtccctcagctgcatgtggtacctttaatctaggctctcccgaagcagaggcagaaggatttctgtgagttcaaggccagcctggtctacatagctagttccaggacagccagggcgatataatagaaacatcctacctaaagccctgccaaaaaaaggggagacctgagaccagagagatgactcagtggctaagagcattgactgctcttccagaagtcctgagttcaattcccagctaaaaatttatttaaatgtttattacttgtattattatttaaatttaaataaataagtaaatgggagcctaggtttgagtccccaaatcaccaagaaaaaatgttatcattgctaataatcaaattaagagcataagaacttctttttaaagaattcttatttattttatgtatgtaagaacactgtagctgtcttcagacacaccagaagagggcattggatcccattacagatggttgtgagccaccatgtagttgctgggaattgacctcaggacctctagaagagcagtctgtgctcttaagtactgagccatctctacagctcttatcaggttgataaaatttaatctcgtggagcgctgagaccaagaactaaagctgggagattgaaaaatgcagaccaccaaggccctgctcatttctccagttctgatcagctcccgtaccaggggtctaaccaggcctgtgtctgcttccctgagtagaccagaggccccatctaaacagcctgcctgcagcagctcctctctctaggtggacagatgggaatttcagaccaatgtcatttcccaggacatcaacacagcagccaaatttattggtgctgtggctgccacagttggtgtggcaggatcaggggctggcattggcacagtgcttgattattggctatgccaggaaccagtctctcaagcagcagctcttctcctatgccatgctggggtttgccctgtctgaggccatgggactcttctgtttgatggtcgccttcctcatcctcttcgccatgtgaggctccctggggtcacccagccgtccctgctgccttgactccatgccagtcctggtgctggagtctactgagatttaccattaaacagcaacgtttctctaaaatactattaattaattaattaatcacgtgacaaccccagcgtccatatgggtgtggaaaatgaggaactctacccatcatacatggcgactatgaagaacaatgtgacagaaaatgctaacatcatgtgtgaccgcatgcatcagccctgactgctaaaagtggacaagcccgaagcgaaagcccaatgttctacttctaaatgcatgcaccaaacgcctcccacaggaccagaggtgcagctctgatagggtccttgcctggcatgcatgaagctgtggacacgaggcattattcgcaagaacattctagctgtctggagggccctcaatccactgtgttcgcgctgttccagcaccagtgcctcctggggctgcacctgaaaaaggggactgcttaagagggctcctaccaagcctactgccacagatgcatgatgggaaagccttctggaagcaactggctgccaaaggctctggacaagagatcaccctctactggaaaggtggtttcagtctaggttctgtgggattccaggaaattagacaacactggcagtccaacagacagacgatctaaacttccaaggcacagctggtagaacttgctgcggaaccagacaacaaggtacgagctactcccatacaacatacaaaaaagcagagagagagtcagagacagagacacacagagagagacagagagagagtctaaagagagtcagggtctcaggactgagggtatagtctactgtagagcatttccccagcatatacaagaccctggattcaatctgaacacaggaaaaaaggggggggggacttcgattatctcaaattctcctttttgtgacacacccctaaagtcactgcctacttccctcaccgccatgaagtaaagagctgtttgcgcttatgtctacacagtctcggctcccacttcctcctcccctctgcttctgtgctcatctcctctgaaaccactgcagcaagtgacttgtgttgactgccacacggaaactctcctcagtagcaggcagcagagcagagctctgtcttctcggagcttcttctctcttgtcgccattttctcccacccttaagtaccctatcttctctgtctctgcttgttgatccttggacccttttcctttctatgaacaaaatatctccttaaaggatctcttctagttcagggtccccccgcccccactgtggagaaaacccagggccttgcacatgctcagcaggagctccatccagtctctagctccatgacttaaagcatctctgtgctgtcaaatatacacttccagcccttaccaaaatattcagtcaactccttgccattcaaaatggatgacctcaaagccagagtcagcggtgctatgactcccagatccatccacttggtagcccaggaatgaactcatgggacacttccaacagcaagactggatgctactaattagctcaagtgacagaaataactctaatttttcccaggcaaaatggggcgtgtgattgtcctgtatcagagggacattgccattataacatgtttaaagagcaaatctcccaaccaccctacaattgttctgcttcctggctcggtcaaaggcaccacccctacccatttctcacaggaacttggaaattaaaaggacaaatgccatcatccttgagtctgtcgttctcttatcccctgtggtctagccgcaaattctatgactttgatctgcaccctgggtaggcaaactaaccagccttctttttttttttttttttttttcgtttttgtttttatttttgttttttgagacagggtttctctgtatagccctggctgtcctggaactcactttgtagaccaggctggcctcgaactcagaaattcgcctgcctctgcctcccaaatgctgggattaaaggcgtgtgccaccgccgcccggccatacttagacataattaaaactaaaattaaaatcttttaaaaaaaaagtcagggaatgcctggcagcggtggcacacgtctttgatcctagcacttgggaggcagaggcaggtggatctctgtgagttcaagagcagcctggtgtacaaaggaggtccaagacagctagggttacacagagaaaccctgtctacaaaaaaacaaaaggaaaaggaaagaaggaaggaaggaaggaaggaaggaaggaaggaaggaaggaaggaaggaagggagggagggacggagggagggagggagggagggaagggagggagggagggggaggaagggaagggaggagagagtgagtgagtgagtgagtggagaaaagatggctcatcagttaagagcacttgctgctctctcagtgacccaggttcggttcccagcacccatatggtataccagaaatctgcaaccccagtttcagatactctgacgccctcttctggtctccatagccattgaacacgtatgacacacaaacatacattcagataaaatacttatacacacaaaataaaagtagatagcagacctcttttctctttgtgtggtcctagagctgcaggtcctgtactcagctactgattcctcctcctccctcctccttcctccctcctccccagcctcatgctctgctcatcttggacttctgcgcatgtcctcagcccagaccttctgctcttgcttctcctctccccagcagccccccagttctcttcctgaaacttctgaggtactctccatcacctcctttggctcctgctctgattggtgtcacctgctggataggcttgctcctgactccactgttcgtgtctcaattagggaccctcaccctctgatataccacacatttccctagtgtctccacctcccacccccaccctatacgcacatacacacttagctgcatcaggatcctacaccagggacttcttacccttctaatcctccccaccggacactgcccagggacactggggctccagagggctattgccacacggacacacaggagatctcatcaaggagatgtgcctaccccagagggtagctctcaccattcacaagcacaccacttctgcctccagcttctactctctcgcaggaagtagccagcccggtgccaagtatccccaactacatccccaaaattctcagacactgccagcctccagctgtcagcctggccccggctggcgggcgcctgctcctggcatagcgactagggtgtaattagaaacccgctagctccctaattgccagttctgagctgtccttgttaccggctgcccgaggcacacatagaggaaaaggctgagagctgagccaggctggcatggaggtagccctagtagacctagagaggactggcatgtggccagggaccaaacgtggcacagagagggctcagtgcaatctgccccgtgggtgcctcccagccacatccatttgcccagaactgtgacgtcaaaccagcccggcccattcattctttattcaggtggcataaaaatcactacaaaaactttacaaaagagtcttgggagctaaagggtcccttccttgcctcagtccccaagattcctggcaggggaggacaagagagagaagaaggaggaagactcctggcagtgttggcatctccaaataccagaggggtgacttgggtgacaggacacaggttggggacctgaatgtcttcagcaagggacactcttgtagggtaggtcagcctccaaccatgaagtataacaccaaggccagtctaagcttgggagaccaacacttgtctctccttttcccacccagggtgtctggaatatgtctaaagatggcctctccagcctctgcttacaaatgtggagggaccctaagttagggacttgcctaacctacctctagccaaaactgtgtccacaagtgccagcccacaaaagatcaccccctgagccccttgggaagaaatgaagattccccatgcctgccttcctccaggccccaccccacctgctgcaagagaacagcttctacactggtgatggtccttccggtcccaccctatcccacaaagctggttagaaagagtcacaggagctgagaggctgatccaggtggggactcaggatgctgctgcccagggcccctcctcacttgggggagctgaactgggggtagtcttcctccatgcggggtgcaagtttcaagtcaggaccaaaggtcttgcctccatggaagtcagctttgtcattctggcctatgagcctgttgtcaggggaatctcgctgttcctggagctggggcagcgcgctggggttagggttcctcacactgcccacaaagaggggcacgcctatggtgtcctccatgatgaagaagaggaagggtcggttcacagtgaaggaggagagggacattcgattcatggctacgctggtagctgcggctgcctccacaccagcctcgctgagctccatggtagactgatgttgcacgctagacaccaccagattctgctcagagatcccacgaaggtctgggccctggaacaattcctgcaggcctgcccagaacagcagatgactggtcagtgctgccccaaggctatgtggatctgtctagcatcctggctaaagggaacacttgaacccagcggttgattggaatctgttagacctcagtctagacaacacttctagaaacctttttttttttttttttttttttttaaatcaggatctgcgctaggtacaggacagaaagtctagaggagcatatcaaatgctcccatccaggaagcagggccacctctggctcaggcacactggcagctcccgtactctgcccagaccacctaggggcaccctatccccaagctccttacccagttggctgagggtggccaccaggtccagctgctgttgcagatggagtttaggcagccacaccttggtgggcctctcctgcagcgagggatggtacagagtatcccaggtcaggttggctagtacctcggacacgttccactcaaaataagtgggcatcacgaccacaaagctcatgttgttcttaaaggggaaatgagccacctacagataagaaaaggagagaacatgaggaccagacagcacctggacctgtctggagtctgggccaaaattacttctgtacttttgagacaagagccagaaattcagggttagcatgctttcacttaactggtgaagtggaataataccacttacccctttgcaaggtgacatgggaccaaatgagataatgcttttacacctctctgtgtgcacacataagcatatatgtttgtatcggtgtgagtgtgtttgctcatgggtatatggagtcagaagtaggtaaacatcagtcgtcttcctacattgctctccacttttttttttttttttttggtgttgccatctttttgttgttgttatttcaagacaggctttctctgtgtagccctggctgtcctggaactcactctgtaaatcaggctggcctcgaacttgcagagacccacctgcctctgcctcctgagtgctgggatctaagatgtgtgtaactacacatagctccctcttttttggacacagggtctcatggatcccaagctggctttgaaatgactgtttggggctggagagatggctcagcggctaagaacactgactgctcttccaaaggtcctgagttcaaatcccagcaaccacatggtggctcacaaccatccgtaacaagatctgactccctcttctggagtgtctgaagacagctagagtgtacttacatgtaataaataaattaatcttttttaaaaagagaaagaaatgatggctacatacttctctctcgtctctctgccccaagtgctgggattacagagctgtacaacaagcccaagtttgttgtgttttagacatgctaatgtatcccaggctgtcctcagactctctatgtaattcagaacgaccttgaacttcttttaaggtttatttttatcttatgtgtatgggtattttgcctgagcatttgtctgtgtaccgtgtccttgcagtaccctcacagtccagaggagggcaccatttccccctgaactggttgtgagctgcatggtgggtgctgggaatcaaaccctggtcctctgcaagagaagccagtaagtactcttaactgctgagccacttctccaccttgagcttttcttcctcctatctcgatctaaaagtactagggatggcggatgtgcgttcatgtgcctggtttatgtgttgctaagggttgaacaaagggctttgtgcatgccaggcaagcactcaacaactgagctacacatcccgacagactttgactctt

SEQ ID NO: 77 - DNA, 57721 bp, Homo sapiens
tgaaaacccgtctctactaaaaatacaaaaattacccgggcatggtggtgcacgcctgtagttccagctactcaggaggctgaggtgggagaatcgcttgaactggggaggtggaggttgcagcaagctgagatcgagctactgcactccagcatggtgacagagtgagactctgtctcagaaaaaaaaaaaaaaaaaaaaaaaaaaagacagggtagtactgtgttggtgaaaggatagacatttgcatcaatggaacagaatagagtccagaaggggacctacggaagcatgagcaattgattttttttttttttttgagatggagtctcacggtgtcacccaggctggagtgcagtggtgcgatctcggctcactgcaacctcctcctcccaggttcaagcgattctcctgcctcagacttcctagtagctgggactacaagtgccaccacacccagctaatttttgtatttttagtagagacggggtttcaccatattggccaagctgatcccgagctcctgacctcgtgttccaccagcctaggcctcccaaagggctgggattacaggcgtgagccacagcgcccgacctaaaattacaaaaattatccagatgtggtgatgggtgcctgtactcccagctactcggggggctgaggcaggagaatcacttgaaccagggaggcagaggttgcagtgagccaagttcgcgccactgcactgcagcctgggctatgaagccagactctgtctcaaaaaaaagaaaaataaaattttcagaaggaaaaccaaagaaaatatttggaaccttgggttaggtagagttctacacataatatcaacagtaaaattcataaaaaaaaaataaatggtaagctgatcttcaccaatataaaaaacttctgcctgggcgcagtggctcacacctgtaatcccagcactttgggaggccaaggcaggcagatcacctgaggtcaggagttcgagaccagcctagccaacatggcgaaattccatatctactaaaaccacaaaaattagccaggtgtggtggcgggcagctgtaatcccagctacccaggaggctgagactggagaatcccctgaacccaggaggcggaggttgcatttagccgagatcacgccactgcactgcagcctgggcaacagagcgagattctgtctcaaaacaacaacaatatagaaaacttctgctctgcaaagaacatgtttaagagaatgaaagataagctgcagtctgggagaaatatttgcaagtcaccaatctgacaaaggactttttctagaatatatagaaaacataagaccgggcgcggtggctcacgcctgtaatcccaacactttgggaggctgaggcgggcagatcacgaggtcaggagatccagaccatcctggctaacacggtaaaaccccgtctctactaaaaatacaaaaaaattagccgggtgtggtggcacgtgcctgtagtcccagctacttgagaggctgaggcaggagaatggcgttaacccgggaggcgaaggttgcagtgagccgagatcgcgccactgcccttcagcctgggtgacagaacgagactctgtctcaaaaaaaaaaaaaaaagaaaagaaaacatgaaacacaacaatatgaaaacagctctcggctttcggctcggaggaggccaaggtgcaactttcttccgtcgttccgaatccgggttcatcccacaccagccgcctccaccatgccaccgaagttcgaccccaacaagatcaaagtcgtatacctgaggtgcaccggaggtgaagtcggtgccacttctgccctggcccccaagatcggccccctgggtctgtctccaaaaaaggttggtgatgacattgccaaggcaacgggtgactggaagggcctgaggattacagtgaaactgacaattcagaacagacaagcccagattgaggtggtgccttctgcctccgccctgaccatcaaagccctcaaggagccaccaagagacggaaagaaacagagaaacattaaacacagtgggaatatcacttttgatgagatcatcaaggttgctcgacagatgcggcaccgatccttagccagagaactctctggaaccattaaagagatcctggggactgcccagtctgtgggctgtaatgttgatggccgccactctcatgacatcatagatgacatcaacagtgacaaagcaagactccatctcaacaaaaaaaaaaagagggagaaaaaaaaaagtcttgctctgtcacccaggctggagtgcagtggcacgatcttggctcactgcaacctcctcctccctggttcaagtgattctcctgcctcagcctcctgagtagctgtgattacagatgcccaccaccatgcccagctaatttttgtatttttagtagagacggagttttgccatgttggccaggctggtctcgaactcctgacctcaagtgattttgctcgcctcggcctcccaaaatgctaggattacaggccgtgcctggccagttccttactattttgatgggtgaaaactgacattttgttataggttaatgcatagttgtgtatttatgagtgaggttttacaactttcatatgtttaaaagccacttgtgtcctattttctgtgaactgaactcttcatttccaactacgctatcaatctttttcttactgattaatgagagtcctttataaaggaaatatatctttatgatactgtacagtagagttaagttcattcagtgggtggattctgctgataaaaaccaatgtgaaaatcactcctctgctgctctgcaacctagccttgataataaaagcttgccctttcattcccttgggaaccttcctcatttagagccccaatcattaccacttgccctatatggttgaaattttaggccagtgtttctcaggcatggcactgttgaaattttggctggataattatttgttgtagatggctgttttctagatttctagaacgtttagcaacacccttggcttctatctgctggatgccagcagtacatccttctcccaggtgtgacaactagaaaagtctttgaaatgtcaaatgtcctctaggggatggagggcaaaatctcccagttgagaaccactgatctaggtttatatactgctggtggaaggcaggctgcatgactaaactgcctatttgttatagtttggaaatttcacacagctccccaaatggtgtttgataaagtgcagaatcttaagttctgttggaaagtacaacatttgtcttttaacctcgtcaaaaagacaaaacaggcagaaggatgccttgaggtcaggagtttgaggccaacctgggcaacatagcaagaccccatctctattaaaaatttaaaaattagccaggtatggtggtacatggctgtagaccagctacttaggaggctgaagtgaggattgcttgaacccaggagtttgaggctgcagcagcaaactatgattgtgccactgcactccagcctaggcaacatagtaagatcctgtttctgaaaaaacaacatattttaaaccatgaaagagtagcatctgttaaatgtgtaggtatgcctaggaaatctaaaatgaagagacgtaggacaataaagtcagccaactgctcaagcctcaaagagtgggagggtcaccagagctcaagggctagcgctcagcttgcagttacaaaaaaagttactctttttcctttaaatttctgaaaaaagttctcattttaataatgtgaaattttagcaagaaatagttattaatgtgtcctcaaccctcccatctatgtccaggcccctcaatcagggatgttaaaatgttaacattttgatatgtaacttgccatactttttctaagcctctacagccttttttttttttttcttttgagacagagtcttgctctgtcacccaggctggagtgcagtggcgcgatcttggctcactgcaacctccatctcccaggttcaagcgattctcttccttcagcctccctagtagctgggactacaggcatgcgccaccatgcccggctaatttttgtatttttagcagagacagggtttcactatgttggccaggctggtctcagactcctgacctcgtgatccacccacctcaggctcccaaagtgctaggattacaggcatgagccaccgcgcccagccttatagccgtatttatatgtagatattttttctttttctttctttcttttttttttttcaagacagggtttcactcctgtcgccaaggctggagtgcaatggtgcgacctcagctcactgcaacctctgccttctgggctcaggcagttctcttcccttagattctcaagtagctgggactaccagtgcgcaccaccacgcctggctaatttttttttttttttttgagatggagtctccctctgtcgcccaggctagactgcaatggcatgatcttggctcactgcaacctccacctcccgggttcaagcgattctcctgcctcagcttcctgagtagctgggattacaggcatgcaccaccatgcccagctaatttttgtatttttagtagagatggggtttcaccgtgttggtcaggctggtgtcgaactctcgaccttgcaatccgcctgcttctgcctcccaaagttgtgggattaaaggcgtgagccaccgtgcccagcccacacctggctaatttttgtactttttatggagatggggtttcctcatgttgcccaggctggtctcaaactcctgggctcaagtagtctccctgccttggcctcccaaagtgctaggatcacaggtgtgagacaccgcacctgcccttgtatgtagatttgtatatagattttgacctaggcctggcgccatgtctcacgcctttaatcccagcactttccgaggccaatgcgggtgaatcatctgaggtcgggagttcaagatcagcctggccaaaatggtgaaactctgtctctactaaaaatacaaaaagtagccgggcatggtaacgcatgccggtaatcccagctactacccaggaggctgaggtgggagaatcgcttgaacttgggaggcagaggttgcagtgagccgagatcgcgccactgcactccagcctgggtgacagcaggagacttggtctcaaaaacaagaaaaaagaaaaaaaaaaaaaaagacattgacctaaaaggaagaagctgaggcacaaaatataatttaaagagtttaactgagccaaagtgaagatagctgcctggaagattcagacccaagtaatcttggatatgagcttcactcagctccttatccattacaagaaggttttttaagtgaaaaagtgggcggggagtgagccaataacaaaggtatctgtcagaaattctcattggtttacagaaaaagcaatgattagtgattggctatacattgttaagttatagggtgcagtttatagtgtctggtgtggcattattggatgaatttttttttcttttcactcttatgatatgctgaagcattgggtgaatttatagctacttgtggcaagcagtttcaagagacgaatacacaaagtggggagtaagttctgtcacccaggctggagtacagtggcgcaatctcggctcactgcatcctggatctccccagggtcaggtgatcctcccaccgcagacttccaagtagctgggactacaggcatgggccataacacctggctaatttttgtattttttgtagagacggggttttgccatgttggccaggatggtcttgaacttttgacctcgagcaatctcccgcttcagcctcccaaagtgttgggattacagctgtgagccactgtgcccagtctgctgtctcgtttttatgtctctttgggcctaataatttaaaatgactcacattcatcagataaaaatacttttcttttctcataggcatatagaggtttaaaaaataataataattggccaggcacagtgactcacacctataatgccagcactttgggaggccaaggcgggtggatcacgaggtcaggagtttgagacccgcctggccaacacggcgaaaccctgtctctactaaaaatatgaaaattagccgggcatggtggcacacacctgtagtcccagctattggggaggctgaggtgggagaatcgcttgaacccaggaggtggaggttgcagtgagccaagattgtgccactgcactccagcctgggcaacagagagagactccatctcaaaaaaaatttaattaataaaataaaataataataaagggatatttattaaataagaaaggacaataatgcacacattactgtgcaacttgcttttttcactcacagtgtttcacacacactcctcaacaacgacagttacaaacccttttattttttcattttttatttttttattttttttgagacagagtctcgctctgttgcccaggatggagtgcagtggcgcgatcttgggtcactgcaacctccgcctcccgggttcaagcaattctcctgcctcagcctcccgagtagctgggactacaggagcctaccaccacgcccggctaatttttttgtatttttaatagagacggggtttcactgtgttagtcaggatggtcttgatctcctgacctcgtgatccacccgcctcagcctcccgaagtgctgggattacaggtgtgagccactgcccccggcctaatttttgtatttttagtagagacagggtttctccatgttgggcaggctggtctcaaactctgacctcaagtgatcgacctgcttctgcctcccaaaatgctcggattatatacgtataatttaaataaatgtttccagattactttccaacattatgtcaacaatgtatcagtttctccatattctgcttagcaacagacagtgacaataaaaactttttttttccttttgcctatttgaggggtgaaaagtaataccttggttttttgttgttgttgttgtttgtttttttttttggtgagatggaatctcactctgtctcatgatcttgcgatcttggctcactgcagcctctgcttcctgtgttcagcgattgccttgcctcagcctcctgagtagctgggatcacagacctgtgccaccacacctggctaatttttagtagagacagggtttcacaatattggccaggctggtctcaaactgttgacctcctgcctcagcctcccaaagtgctgggattacaggtgtgagccaccactcccggtcatgttttaatgttattttattttatttttgagacggagtctcactctgtcacctaggctggagtgcagtggcgcaatctcggctcactgcaacctccacctcccaggtccaagtgattctcgttcctcagcctcccgagtagctgagattacagacgtgcaccaccatgcctggctaattatcgtatatttttagtagagatggggtttcaccattttggccaggctggtttcgaactcctgacgtcaagtgatctgcccacattggcctcccaaagtactagcattacaggcatgactgaccgcacccggatgttactttatttattttttttgagatggagtctcactctgtcgcccaggctggagtgcagtgcgtgatcttggctcactgcaagctctgcctcctgggtttccgccattcttctgcctcagcctcccgagtaactgggactacaggcgcccaccaccacgcctggctaatttttttgtatttttagtggagacggggtttcaccatgttagccaggatggtctcaatctcctgacctcatgatctgcccgcctcagcctcccaaagtgctgggattacaggcgtgagccactgcgcccagccgtattttatttttttgagttagggtcttgctgtgttgcccaggttggagtgcagtggctagaccgtggctcactgcagcctcgaccttcaggctcaaacagtcctcctgcctcagcctcccaagtagctcggactacaggcgcaaagcaggatgctggactaatttttaaaggttttggagagatgaggtctcactgtgtggcccaggctgatctcaaattcttggtctcaagccatccttccacctcagcttcctaaagtgctgggattataggtatgagccattgtacttggctaggacattttttcactacgtatccctgactactaataggtttgagcatattttaaatttttatattgtcaaatatttttatcatttaaaaaatggctcctgccttgctaaaaagttctttcttgatccaaagttataaatattctaaaatgtcatatttttatttttgtattttttcatttagatcttcaatccatctggaatttttaattttttatatttttgagatgaagttttgctcttgttgccctggctggagtgcaatggtgcaatctcggctcactgcaatctccgcctcccaggttcaagcaattctcctccctcagcctcccaagtagttgggattacaggaatgtgccaccacacctggctaatttattttttagtagagtcagtagtagtttgtccatgttggccaggctggtcttgaactcccgacttcaggtgatctgccccccctcagcctcccaaagtgctgggattacaggagtgagccaccgcgcctggctggaatttattttcgtatattgtgtgaagtagggatttccatttgtgtttttcagttttgacaataacattttattagtacaaaagagttgatactaactcccttactaattgtagtcacatgagactgatatcagagctattaggccaatttatttttttatttattcattttttatttattcttatttttattttttttgcgatggagtctcactctgtcgcccaggccagagtgcagtggcgcgatcccggctcactgcaagctccgcctcctgggttcacgccattctcctgcctcaacctcccgagtagctgggactacaggcgcccgccaccacacccggctaattttttgtatttttagtagacacggggtttcaccgtgttagccaggatggtcttgatctcctgacctcgtgatccacccgcctcgacctcccaaagtgctgggattacaggcgtcagccaccgtgcttggcaggccaatttattaacttaggagaatagaactactaagtcagccagaatattaatgttcttttttttttttttttttttttgagacagagtttcactcttgttgcccaggctggagtgcaatggcactgtctcaggtcactgcaacctccacctcctgagttcaagcgattctcccgtctcagcctcccgagtagctgggattacaggcgcatgccaccactctgggctaatttttgtatttttagtggagacggggttacatcatactggtcaggctggtctcgaactcctgacatcaggtgatccgcccgccttggcctcccaaagtgctgggatttataggcgtgagccacagcgcctagccttaatgttagttcttaaccagtggtagaccagaagtctaattgggattttttgtttttgtgtttgttgtaatacaatttctgtttctcatttatcctacctgaaaagcatactgcatctctgacctctcagcatactaacaataatattgatcacatagcatttcttgtagttcataaacttcacgtgtcaataatatactataaatataaatgaattaatgaacaacaggatgctcataagcttacagacatctttttctcaaaaaagctgggaattttgtttctgttttattgggatactgactctcaacatttcatatattgcattccaccaacgtagctgagagtcaatttatgaaatattttgtagtgtaagacagaaagtggggaggaccaagtatgtcaaccactaggagtgtggtgcctagtcaggaattgggaggagtgtagcaagaaaggaaggacaacaggatttggtcattgattggtcagatggatttcagagggattggtatgaaggaacgcttcaaagattttttttttaatttaagttccaggatacaggtgcagaatgtgtaggtttgttacatacttataggtgagccatggtggtttgctgcaccaatcaacccctcatctaggttttatttatatttttttttgagacggagtttcgctcttgctgcccaggctggtgtgcaatggtgcgatctcggctcaccgcaacctctgcctgctgggttcaagcgattctcctgcctcagccttctgagtagctgggattacaggcatgtgccaccacgcccggctaattttgtatttttagtagagacggggtttctccatgttggtcaggctggtctcgaacttccgacttcaggtgatctgtccgcctcggcctcccaaagtgctgggattacaggcagcagccaccgcgcccagccaggttttaagtcccgcatgcattagctatttgtcctaatgctctccctccccttgacccccacgcaaccaaagatggttttaaggcttctaggactggagatgattactttcagaaatgaatagtggtgaccagatgaaataagacttttggatgtagataggaccttagcgatatatttccagctttttattttttattttaaggatgaagaaacagctttaagttggttgcctaaagtcacgcaggtaattgatgcagtatggccagaacccatactaggcttaagggacagtgtaccataaactcgtagaggtcctttaaacagatagaaacgctgtgctccaggcagatgccataacaaacactggctctagatctaccatgggttatatgggtccttagttaagattagatatggagtcacagtgtgccagaatttcagggagagaggaaagtggaagggctttccactaagccttttgaactactaggtacccctcgttttacatctggttatctcatttaaatctatgacgttttaaaatacttattaccatttaagacatgagaaaaattaagtttagaaacggctagatagctcacgctagaaaggaaggactccaaattttaaccaagggcagatgtgcatggaggccaagtcatttccttcccatgctctcatactgacccaacaaacccattctgcacgtgagaaaactgaggcccggaggagggaattcacacacgtttgaagccaagctggggccagaaagtagatcggctgatctccaaacctccacgtcaaaggtcttcccaggaggacatatgccttcaaggattttacaatgtataccaccctacaagtgatgggagagaggggaaaaaagcaaccgactaaggagaaaagcaaggagcagaaaaaggagcaaaagaggagctgtcagaacggtgtgaggagagtgggaaaggagccgcctccttttgcctctcttcctacttattaacaaaacagaacgactatccaacgtatttcagggagctaagtcttagccagcttcagctgtgttttaacccttagctaaatatagacaaggctaaggcaggccaggtgtacacttcaggaagacgtggaaattcccagggcggaccaaaacttgagctgttccggcggtagtgatttgaggtcagtttgaaagagaagttgagaaagcggccgaggggcgaatttggctgcactacacgctcgccacaaagaggaagggccgccggccgccggggccgagtgcgcttccagcccaggcggagcggtagacgcaacagcctccgcccgccacgtgacccgtagtgttgtggtctggcccgcgtgggtggcgggagcgccgagagggcgggggcggcgatggggcgggtcacgtgatggggtttaaatctcccgcagccggagccgcgggggcgccagtgccgcgcgtcgagcgggagcagaggaggcgagggaggagggccagagaggcagttggaagatggcggacgaggcggccctcgcccttcagcccggcggctccccctcggcggcgggggccgacagggaggccgcgtcgtcccccgccggggagccgctccgcaagaggccgcggagagatggtcccggcctcgagcggagcccgggcgagcccggtggggcggccccagagcgtgaggtgccggcggcggccaggggctgcccgggtgcggcggcggcggcgctgtggcgggaggcggaggcagaggcggcggcggcaggcggggagcaagaggcccaggcgactgcggcggctggggaaggagacaatgggccgggcctgcagggcccatctcgggagccaccgctggccgacaacttgtacgacgaagacgacgacgacgagggcgaggaggaggaagaggcggcggcggcggcgattgggtaccgaggtgcgcagggtgcgggcggccggaactgcgcatctcctcctccctctccccgggctcctactggcctgaggttgagggcggctgggggctcggggcaggctccgcggcgttcccctccccaccccggccctccgttcagccgcgctcctccggggctgcggttcctactgcgcgagctgccagtggattcgctcttttcctccgtccgtggcccgcctgggcggccttgttctttccgcagcagccaggtcgggagactctcgcagtcgctttaaaataagtttctctccccctcttactcttttagcatattgcttttgttagagctttttttttctttttctttattttttattttcattgcttttctcctctaccccccagcacacttaagtctgcaactttttggctgtcccgttggtctgcgttttcaattgctttttgcaaacttgacacctgtgcagtttgctttttttggtctatatttttatgactgaaattacaatttttgaaagaggaaagctgtttctatagtcacagcttgcaaaatttaaagaacgtggctgttcctgaagacattaccattctgtaatgcagttaggagtgggtatgggagagagagtacttttagagctgttcatattacttttattctaatcttgctcttgtgcggtaatggtgtttgggctaaacatgctttttttgtatgtatgtagtattgagacacaaacttaacacttctagcataatgaagcagatatgttgcagttgtcatgttcttgaaggtttctttttttttttttttttttttttgagacggagtctcgctctgtcgctaggctggagtgcagtggcgcgatctcggctcagtgcaacctccgcctcccgcgttcaaccgattctccttcagcctgccgagtagctgggactacagacacccgccaccacgcccagctaatttttgtgtttttagcagagacggggtttcaccatgttggccaggatggtcttgatttcttgacttcgtgatccgtccgcctcggccgcccaaagtgctgggattacaggcgtgagccaccgcgcccggtcaggtttcttatttttgatctgaggagtttctatccttgataggtgttcatctttatcaatatttgggtcaggccgggcgcggtggctctttcgtgtaatcctagcactttgggaggccaaagcgggaggatctcttgagcctaggagtttcaggccagcctgggcaacatagcgagacctcctctctactaaaagtaaaaaaagcgggacgtggtgtcgcacacctttagtcccaggtactagagttcgaggttgcagtgagctgtgatcctgccactgcactccagggtgggcaacagagtgagaccccgtctcaaaaaaaaaaaaaaaaaaaagtaatatgtgtttttagggactgatttagtaaagagaccctgatttcaagcaacacagttgagtactaatttattatttacctaataataattgtgttattaatactgtttatttaatagaggaaacaatgcagaggtacttgtagtattgtgtaagtttaacgtgcgcattgccaaggttatatttgaatgacgtttttatgtaaatgtccatttattacacgtttcacgaacgctattgtttgtgattgtatgatacattctagctagattattatcttttctttttttttttccttttctttttttttaaaaggtggagtttcgctcttgttacccaagctggagtgcaatggcgtgatctcggctcaccgcaacctccgcttcccgggttcaagccattctcgtgcctcagcctcctgagtagttgggattacaggcatgcgccaccatgcccggctaatttttgtattattagtagagacgagatttctccatgttggtcaggctggtctcgaattctcaacctcaggtgatccgcctgcctcggcctcccaaagctctggaattagaggcgtgagccaccgctcccggctatcttttctgttttttaagtagacttaatttatttttagattttggctgaaactgagtgagcagaattcctaaagatgaagaaactgttccaatgaacagtgcaagctgaccccataggcatgctttacacacgccgtgtaaatgttaaatgctgtactcgatgaaaatgattgctctataaccgttcatacattttaggtgcatgttgttttgatagccttgactgacttggtttcttttgcagataaccttctgttcggtgatgaaattatcactaatggttttcattcctgtgaaagtgatgaggaggatagagcctcacatgcaagctctagtgactggactccaaggccacggataggtatggctcagagctgttaattttagagagtaaatgtacggtttttggtttgtttgttttgagacagagtttcgctcttgttgcggaggctggagtgcaatggcgcgatctcggctcaccgtaccctccgccttccaggttcaagcgattctcctgcctcagcctccccagcagctgggattacatgcatatgccactacgcccggctaattttgaatttttagtagagacggggtttctccatgttggtcaggctggtcttgaactcccgacctcaggtgatccgtccgcctgggcctcccaaagtgctgggattacaggcatgtgccaccttgccccacctcacttgtcccctttttgtgtagtgttcttcatccggttagaatatcttcctccctcacttcatattccttgttttttcactttattgtacacttaccacttcttgaaaagctctgtatcttactttttaaattgtgttgtttcctggtctagaatataagttctacgggagcaggaatttttgactgacttgtatactcctgtcttttcagtgcctaaaaaagtgcctggcacatagtttgtgctcaataaatatttaataaatatgtgaatgaaatgggaaagtatttcgatgtagaaagcattatcagttttttataccaaaggtataaccatcttgaaagtggatctttttgtgttctcactcttacaaatggcttgattatttaaacatagtgaagatcagtttctctttggtgtctgtaatttatttatttatttatttttgttttctcaagcctagggagctggtttgagcaatctcagggtaaaagaaaatgattagttctcagaacatcaacattgtatgtattatcttggaagatgggttaagatcaaattgaaaaattaccggaaaaaaattaagatggcagttatgtatagattttcatttctttttcctgtgtggttttaatgataagtagtacaggcttttaggactggtacgatttttctatgtcgtagaacccttttgtaaatacttttggtattatggtgtgtgtttctagatattaaccataagaacttaattctggttgttaattaattagactcttgaaatatatacttacagctgaagggggtcttcccaactcttcattagatcttcctaatctcattgggatatagcattaattctgagtgtaccgagaatgaaataccattaaattgcattttcttactttgcaaaaaaccctcacagaatgctaactcattacttcagaaaataaatgagattttgaattacttgataagttgactttaagccttttcccccttattgtaggtccatatacttttgttcagcaacatcttatgattggcacagatcctcgaacaattcttaaagatttattgccggaaacaatacctccacctgagttggatgatatgacactgtggcagattgttattaatatcctttcagaaccaccaaaaaggaaaaaaagaaaagatattaatacaattgaagatgctgtgaaattactgcaagagtgcaaaaaaattatagttctaactggagctggggtatgtaagactagtacatggggaggtcgtatatgtattttcttatgccttttccaagtaggaaacatttttctggtttagaaggatttatccttacatgataatggatgtttgggaactgccaaaaactgagtgcagcagcagttgctaaattagttcagatttttaaaacctctccagccttaaaaaaatatttgcttctgcttatttatagcacagtgggtaaatggagttaaggcaagatttctacctacattatatcatagctcctaaaggagatgcagggaattgaaactctgcttttgttaagggatgtcagtctgatggagaaattgggtatttgttagatctttatgagaaactggaaacctaattggtattcacaagtgaaaagcttagtgttgggaagagtaacagattcctaccttccctccatattaattaagatgatgtgattgtggcgacttgacattttctatttgatctaccttagggttgcagctaattagttacctaagactattgcatagtgtgtgttttatacagagtatattacatgttagcaaccagagcaactgctgtagtaaaattttgtcctgttttctgccatttcgagttgcgaaagggtgttacataatcttagatgatcatcaggagtatgttttgctcacagataacgatgtagacaagtttgtttaacttaaattgaccttgactccaggtcaaattggagtcaactctggtaagatgatgaaacaataacttctgaaatctctatttgaaatgtcaggatttttttgtacgattagtgggcacgtctcaaagaaatgaagaattgaaatattatacaccttttttttttttcttttttttggatacagggtcttgctgtgttgccctggctggagtgcagtggtgtcatcatggctcactgcagtctcagcctctcctggcctgagtcttgctctgttgcctaggctggagtgcagtggcaggatcttggctcactgcaacctctgcctcctgggttcaagcaattctcttgcctcagcctcctgagtagctgggattacaggcgcacaccaccacacctggctaatttttgtatttttagtagagatggggtttcaccatattggccaggctggtctgaaactcctgaccttgtgatccgcctgccttggcctcccaaagtgccaggattacaggcgtgatccaccgtgcctggctatacattgttttttttaatgaaaatagagaattgttgtagtattgaggtaatagaatcctaactaaaggagcaatttctttggaattacttctctgtaatagaaattcttggctggtggagtggctcatgcatgtaattccagcactttgggaggctaaagtgggaggatcacttgagccctggagtttgagatcaccctgagcaacatagaccctgactctacaaaaaattagcctggtgtgctggtgcgtacttgtagtcccagctgctaaggaggttgaggtgggaggattgcttgagccggaaaggttaaggccataatgagccatgatggcaccactgcactccagcctgggcgtcagagcgaaactgtctaaaaagaaaaaaaacaaaaagccgggcgcggtggctcacacctgtaatcccagcactttgggaggctgaggcctgcggatcacgaggttaggagatcgagaccatcttggctaacatggtgacaccccgtctctactaaaaatacaaaaaatcagccggtcgcggtggcaggcacctgcattcccagctaatcagtaggctaaggcaggagaatggtgtgaacccaggaggcggagcttacagtgagccgagatcgcaccactgcactccagactgggcgacagtgtgagactctgtctcaaaaaaaaaaaaaacaaaaaaaaaaagaaaaaattcttccctacttaaaataatttgttgaaatggtttattttcttctcaagttgcatttgctttaatttgttggctaaatgcttaaaaggcttaaaattggcctgacttaaaaattccttatctgtgttaaagatggaatatgaggtatgtttaattttactcagttatttgggagttttatttctgaaataagggtagggttgtatttttatttcttaaaagaagtttcagactaaaattttctttctcaactcttacctaattatatggtaagagagctagctagttcctataaaggtagaagatttaattttacaaattatgccatgcacattttaggtgtctgtttcatgtggaatacctgacttcaggtcaagggatggtatttatgctcgccttgctgtagacttcccagatcttccagatcctcaagcgatgtttgatattgaatatttcagaaaagatccaagaccattcttcaagtttgcaaaggtactatgaactcttctggttgtttctttggccttctctcatgaaaaagtattttgttcacatacagccaccttaaggttatcgttcattgtttagtaaagtgaatgctgctactgtggcggagtaagatcactcattatggctagaattcctttattcctagaggaggactattatctacttcattttaggagtgagcttattttcaaagagatagttcatatttttaaaatttgcactgcagcgatggtcgttattctgcctgggcttttttaagaggtttgcacaccatataaaagtaacataacttgtgatttttaatattttattagagattgtaaaggttataacatcactttggtgtttcgtagtcaagttttaacataaggatgtgcctgaaaaatcatttgtaattagagaatgggaagattcttgggttgcatttttgtcagcaaattgcagaggatcattattctgctctagagttgcaccgtccagttcagaagccactagccacatgtggctgttgagtacttgaaatgtattgatatgtgcaataagtgtagaagacatattggattttagagatccagtatggaaaatacaaagtatttcattagttttattcatcaaatattaaacaaatattggtttttatatggaaaaaatacttaaaattaattttgaattcttttgaaatacttttgatattgggttaaataaaatgtattttgggctgtgcgtgttgcctcatgcctgtaatttcagcactttgggaggccaaggtgggaggatcagttgagcccaggagtttgagaccagcctgagcaacataatgagactccatctctacaaaataaataataaaatttgctgagcatggtggtgtgcacctgtagacccatccactcagtagtctgaggtgggaagatcccttgagctcaggagctcaagactgagtgaaccatgatctgccattgcactccaccctgggcaacagagcaagagtgtttccaaaatatatgtatgttttttgaagtttactttttttttttttctttttttgagaagtagtcttcctttgtcccccaggctggagtgcaatggcatgatcttggctcatagcaacctctgcctcccaggttcaagtgattctcctgcctcagcatcctgagtagctgggattacaggcgcccgctaccatgcccagctaatttctgtatttttagtagagacagggtttcaccaggttggccaggctggtgttgaactcctgacttcaggtgatccaccctcctcggcctcccaaggctctgggattataggcgtgagccaccgcgcctggccagttttcaccttaatgtggttactaaacaatttaaagttatatgtatgtctcacattatgtacctattgtacagctctgctttagcatagaaagtttaataatgcattacaccattctcaagagattgagtcattagaaaactgttttctttcctgtatttcagtcttttggaaagaaattacaaaatttgttattgttaaacttggaggtatatatatttgaaagagtcattttattttattttactttaagtgccgggatacatgtgcagaatgcgcagatttgttaacataggtatacatgtgccatggtggtttgctgcatctatcaacctgtcatctaggttgtaagccccacattcattaggtatttgtcctaatgcttttccaccccttgccccccacctcctgacaggcctctgtgtgtggtgttccccaccctgtgtccatgtgttcttattgttcaactctcacttatgagtgaggacatgtggtgtttggttttctgttcttgtgttagtttgctgaggatgatggcttccagcgaaggagtcttgtattagtggctttttccccacctaatcgttagaagttgtgaatagggacttctttaatgaatccagaagttaatgaacctagcttttttttttttttttttggagacggagtctggctctgtttcccaggctggagtgtagtggtgtgatctctgctcaccatacaacctccacttcccgagttcaagagattctcctgcctcagccttccgagttgttgggactacaggcgcgtgctgccatgcctggctaatttttgtatttttggtagagacggggattcactatgttggccaggttggtcttgaactcctgaccttgtggtccgcccatctcagcctcccaaagtgctgggattacaggtgcgaggcaccgcgccccgcgccctgccgatgaacctaaattttaactaaacagtggccttatctactttcagaccatgtggtatatttacatgactacaggagaagctttgctaattcagaataaattatgttacttaaattggcgactgtctttaaaaaaaaagtgattttttggatgcagtagctcgtgcctataatcccagtgctttgggaagctgagataggaagatctcttgaactccggagtttgagaccagcctgcgcaacacagtgagaccctaatcactacacccctccaccccatgtaacttttgttttatccaggttgtggtatattaaatgggcattagtgtaaagtgggaaaattatattaattcttgaatatgattactaaactgaatttgaaaagttttcaggctatcaagagaatttttaacttaaaacttatataatttgaactttttacttcatatatccgtaatgatgatggtcatctatatctagcttttagagcagacaactggttcatacctggattaaataaataatgtaaagttattttttgttaattatggattagtgaagatttactgttttaacctactcctgctagtggcactactgcatggttttgaagaccagtgaagtatgacttaaaggtttcttgaattggagctaggacactggcatttataaaatctccacgtagcgcagacattgacactatcagaagaccagcaagtaactagaagttactttgatcttaaatcaactacaaaaaacttgactcactagttatggagaatacattttttattgttaaactgaaaaaaaattcagtcacttataaggtgtagcctcttctaatcctgtttatataaatttatttattattattattttttgagatggagtcttgctctgttgccaggctgtagtgcattggcgcgatctcggctcactgcatcctccacctcccgggttcaagcaattctcttgcctcagcctcccaagtagctgggactacaggcacgtgccatcacgatcagcacttttagtagagacggggtttcaccatgttggcaaggacgtgtctcgtcgtgacctcgtgatccgcccgtttcagcctcccaaagtgttgggattacaggtgtgagccacaatgtccagctgataaatttaattttgcttttctgagttttcatttatggtaatggttaaatcagctaggctttacagttgttactcacatataattctttgtccatcctttaattctcacattgggaactgactaaaaaaagaaagcttccagtctgggcacagtggctcacacctgtaatcccagcactttgggaggccgaggtgggtggatcacctgaggtcaggagttcaagaccagcctggccaacacagcaataccccgtctctaataaaaaatacaaaaatcagccaggcttgggtggcgggcgcctgtcgtcccagctacgcaggaggctgagacggggagaattgcttgaagccaggaggtggaggttgcagtgagccgaaagcgcttaaggagaaataagtaaggacaaagagtgcaggatagtatcctgacacggaggatggggagggtatgtaaatattgtcgatattttactgaatttctaaatattacaagaatagaatattcataggataacctaagcttttctgtgagtcagtgtactaggcagaaagttcactaaagtggtttatgatttttgctacttatgagaaaacattaaaaatgaagccatgaaaaggaaatattggtgaaatttagatacttcagaaggaaagagagactttcttttttttttggaaagaatttctataccatctattatatcattgattgtatgtgattattgagaattaacttgttttttttttttttgttttttttttttgagacagttttgctcttgtcacccaggctggagtgccgtggtgagatctcggctcactacaaccttcacctcccgagttcaagcaattctgctgcctcagtctactgagtagctgggattacaggtgcccatcaccacgcccagctaatttttctaattttagtagagacgggatttcaccatgttggtcaggctggtctcgaactcctgacctcaggtgatccgcccgcctaggccaaagtgctgggattacaggcgtgagtctcccacgcccagcccttaaatttcatttagactggaaatttcaagtaatggagaggtgtgttaaggaagttattgctctgttagagcagtttcttaaatttggcactattgacattttgggctggatttttctttttgtttctgagatagtttcactctgtcgagccatcacagctcgttgcagccttgaactcctgggctccttgaacaggaggctcctgcctgagcctcctgagtagctgagaccataggcacgtaccatatacctagctaaatgtgtttttgactttcttttttctttgtagagtcaagttctcactatgttgtccaggctggtcttgaaatcctgggttccagcaattctcctgcttagccttacagagtgtcgggattgtaggcataggccactgcacccggccttgggctgatatttatttgctatggggaactttcctgtgcgttgtaggatgtttggcaatgtccctggccggccaggtgcagcggctcacacctgtaatcccagcactttgggaggctgaggtgggcggatcacttgaggctgggagttcagaagagaccagccaacatggtgaaaccctgtctctactaaaaatacaaaaattagccgggtgtggtgacacacatgagaatcacttgaactcaggaggctgagtttgccgtgagctgagatcgcgctgctgtactccagcctgggtgacaaagcaagaatctgtctcaaaaaaaaaaaaaaaaaaaaaaaaaattcgctggtctccacctacgtttgtatccccaccccaagtcctgacaataaaaaatgtcttcaaaatgttccttgcaaaattgctcattgaggctaactgaggtggctcacaactttaatcccagccctttggaaggctgaggctggcagatcacttaagcccaggtgactggccctggccaacttggcaaaaccctgtctctactaagaatacaaaaaatagccagacgtggtggtgcacacctgtaattccagctactcgggaggctgaggcagcagaatcacttgaacctgggaggcggaggttgcagtgagccgagatcgcaccactctactccagcctgattgacagagtgagactccatctcaaaaaaaaaagaaattactctctgagcaccagtgtgttacagtgtgcttagctgtggtaccactttggattctttcacacaagaacagttaaggccagttttaaagctgtggggccatttctgaactgtattttgtttttttttttttggagatgaagtttcactcttgttgctcaggctggagtgcgatggtgtgatctcggctcacttgcaacctccgcctcccaggttcaagcaatctcctgccttagcctcttgagtagacttgattatgggatcttggctcactgcaacctctgcttcccaggttcaaacagttctgccttagcctgctgagtagctgggattacaggtgcccgccaccatgcttggctaattttgtatttttagtagagacggggtttcaccatattggccaggctggtctcgaactcttgaccttgtgattcacccacctctgcctcccaaagtgctggtattacaggcatgagccactgtgcctagccaattttttgaatttttagtagagatggggtttcatcatgttggccacgctggtctcgaactcctgacctcaggtgatccacccaccttggcctcctaaagttctgggattacaggcgtgagccacttcgcccagcctgcactgtgttcttatcctgcataatgacttaaattgataataagttgtggtcatggttctcagaaacctaaaataattcactgatgttaataaaaatgagtggttgtatttagagtcaaggcgaaactgaattaggatgtataaaataactttttttttttttttttttttttaagtaggactgttgttcggctgggcgtggtggctcacgcctgtaatcccagcactttgggaggccacagcgggcggtcaaaagtttgagaccagcctgaccaacatggtgaaaccctgtctctactaaaaatacaaaaattagatggatgtggtggcgcatgctgtaatcccagctactcaggaggctgaagcaggagaatcacttgaacccaggaggcggaggttgcagtgagctgagatggcaccactgcactccagcctgggcgagagagtgagactctgtctcaaaaaaaaaaaaaaagaaaagaaaaaaaaagaaaagggactatactatgttcgaagagtgtagtttctgtcccatactgaattcactgttctttccctagtgattaaaatacaagaaaaggtagagggagaaacacgaactgaattttatgaacttaattccaagaatgtatttttacatttgttcaaaaaattattactttattgataatatgcaaacataccagattatgtattaatagttaaaaatttgagttctagaacaagcttattaaaaatcaacgtcagtaaaaagaaaatagatggtagtcacagtgccattcatctgaaaataatgttttaatactcaacatgtatatggattatatatctatacgtttatagtattgtagctggatttatgttacatttttagcataaaatttggcttttgctgggcccagtggcttgcgactgtagtcccagcaactcaggagggtaaggtgggaggattgcttgaaccaaagagtttgaggctgcagtgagctgtgacctcacctctgcacaccagcctgagtgacagagcaagacccatccctgaaaagaaaaaacttggctgttttactttgctttcaatttgtagtatattctacttaatataataaacttactttctgtgaggtgcttgaatactttttaatggttatttatgaagtggtgaactgtaattctgtatttgtacatttggatgtacaaatagtgttgctacagttgtccttttttggtatgtctccagtgttcttaggataaattcctgaaagtgaatttcagttttgaatttcagagaaacatgtcaaagttcttctttaagcctttaagtctcctgatatgttttgtcgtattgcagcttggaaaggttgaaataaaatcctctattagggctgggtgcagtggctcatgcctgtaatccgagcactttgggatttagctgatttggctgatttatcatgccactgccacctgtatccacccaaaatccacaaaaaccccaggatacattcttagcattaaaaaaaaagttatataaatatatataattatatatatatttgagacagggcctgtctctgatacccagacgtgtgcagtatctttcaaaaatcatatatctatatatagtttgccccttccttcagtctttgctgcccctaatatctgtccttaatggttaccatggtgaaactcttggaaatcattcagggggaaaaaaaatttgtgttgggataggggagggatgtcagcataagtttttaatacttgataaatgattgccaacagaatcaaaaacaccttgttttctatcttttttcaccatataatattcttgagaataatttcgtaacagcacttaacagatataccttatttttcaaagaaggctgtgtagcattctattttaaagttgtttcacagtatatgagtctcctattgataggtatctgcatttttgtctttttgatctagggttgtttttaaggcagtttaaaaactatagtaagtaaaagaggccaggtgcggtggctcacacctgtaaacccagcactttgggaggccgaggcgggtggatcacttgaggtaggagtttgagaccagcctggcaaacatggtgaaacccttctctactaaaaatacaaaaaattagccggccgtggtggcaagcgcctgtagtcccagctgttcggaaggctgagggaggagaatcgcttgaactcgggaggcggagattgcagtgagccaataatatgctgctgtactccagcctgggcaacagagcgagactctatctcaaaaataaatacaattttaaataaaattataaaaataaagcagcacccagctttattttttatttatttatttattttttgagacagagtcgcattctgtcgctcaagttggagtgcagtggtgccatcttggctcactgcaacctctgcctcccgggttcaagtgattctcccgcttcagcctcccaggtagctgagattacaggtgtgtgccaccacgcccagctaatttgtatttttagtagagatgggggtttcaccatgtttgccaggctggtcttgaactcctaacctcaggtgatccgcccaccttggcctcccaaagtgctgggtttataggtgtgagccgccgcgcttggctcaacatcttattgtttgagacggggtctccttctgttatccaagctggagtgtagtagtgtgatcttacagctcactgcagcctccaactcttgggctcaaatgattctcctgtctcagcctcccaagtagctagtactacaggtgtgcaccaccatgccctgctgtttctttgttttttttatatggacagtcttgctatgttgcccaggctggtctcaaactcctgagctcgagtgattctgctgcctcagctactcaaagtgctgggattgtaggcgttaactatcaggttaggcctgttctgtttttattagcgtggatgactgctggttactactggccgtttgtatatccttgaattacctctttgtttttagccatttttctccatttgggtgctttttcacagtgacttctgggaatattatgttcttttcttttgatttacctttcaaattttatttttatggatatataatagttgtacgtgtacattatatattcttgaagagttaggcttattgggattccagcctttagtagtcccatgaaggtgagcaaactgaaatgtacttactagtcttagtcatttggttcgtaatatgtaatagaaatggtgcttatcctaaaagaaaaatagaaaacttgagggtgaaggatcagaaattgaagacagtaaatactgcatagaggtttaaatgctagggtttttaggttttcttttttttttgagatagtcttgctctgacacccaggctggactgcaacctctgttccctggcctcaagcgatcctcccaccttagcctcctgactagctgtgaccacagatgtgcaccaccatgcccggctatttttttttgtatttttggtagagatggggtctcgccatgttgcccagtccagtgctggattttcatatcaaaacagggctctgctacttacttgctcttgtgaccaaaatggcaagttaggtttgttttgtatttgttttcatctgcatcggggtatatgttcacagctggatcagcaaactttctgtagtaaggtagggcctggtagtaaatatgtagtatgctttgcagactgcatagggtctctgtcatatgttctttgttttctttacagccttgaacaaattaaaaaacccagtcttcagccttgtctgtagcataataaagaggaaattaaaagtgcttatgttatacgtggtacatactaaaatttattaagtggcgactggcagtttaactaattgacattctcttgtgttaggttaatacaggggttggcgtactatggcctcagtccaaatgtggcccactccatgtttttgtataggctgtgagctaagcattaagcattaatttattacttaaatcaacaaataaagtttatgtggtgtacaacatgatgttttgatgtgtgtacattatggaatggctaactcaagctaatattcattacttcacatacttttttttggtggtgagaacatttaaaatgtactcttaataattttcaggtatacaatatttgtttttgtttttgtttttgttttgagacgaagtctcgctcttgtccccaggctggagtgcagtggcgctatcttggctcactgcaacctccgcctcccaggtacaagcgattctcctgcctcagcctcccaagtagctgggattacaggcgcctgtctccacgcccggctagttattgtatttttagtaaagacagggtttcaccatgttggccaggctggtctcaaactcctgacctcaggtgatccgcctgcctcagcctcccaaagtgctgggattacaggcgtgagccaccgcgcccggctacaatatgttcttaattatagtcagcaatagatctcctgaacttattcttcccagcgtcttcccaatcccacctccaccccctgctaataattaattttaaatgactggggaaaaaattgaaagaactgtttcatgacacttgaacattatataaaattttcatgtcagtgttcataaatacaaacttttattagaacatagccatactatttatatattgaaatacagttgaatttgtcatatgaccaatttattagtattgattaagatgttgagcagtttattcaagtgtggttttgtggaatgaaagagacaggagggattatgaggactctccttagcaggattgatgcatttcactttttttgacaggaaggaaagtttaggttctattttctcagcaactctacttaactgcctccatctgaactatatataggagggggtggatatcagcaaagattaacatcagtaaattttgatgaattctctaaaaattctgatttttaaagagggaattttggctgggcacagtggctcacacctgtaatcctaagcactttgggaggccaaggcaggtggatcacctgaggtctggagtttgagaccagcctggccaacatggtgaaaccctgtctctactaaaaacaaattagctgaatgtggtggcgcgcacctgtagtcccagctccttgggaggctgaggtgggagaattgcctaaacccaggagaggtggaggttgcagtgagccgagattgtgccattgcactccatcctgggtgacagagcgagactctcaaaaaaaaaggtgggtgtgaattttgttatgttgtgcgggctggagtgtagtgcccatccattggcacgatcatagagtactacagctccctaactcccagactcaagtgattctccctcctctgtctccccagtagcaggaactacaggcctgtgccaccatgcccagctttcttagtcttgagggactgcatttacacctatgccttttactctagggtcttttattcatattgctagaaatttggagaagaaagaaaggcataatctctgcagaaaagccattatttctgcagatagttctttttttttttgagatggagtctttctttgtcacccaggctggagtgcagtggtgtgatctaggctcactacaagctccacctcctgggttcacgccattctcctgccttagcctcccgagtagtgggactacaggcacccgccaccatgcccagctaatttttttttgtattttttagtagagacggggtttcaccatcttagccaggatggtctcgatcttctgaccttgtgatccgccgacctcggccacccaaagtgctgggattacaggcatgagccaccacatccggccaatttctgcggatagttctaagctttagttttgaccacgttggttgcctatggccaattcctggattatttgcatgtttccagacacagctatgtgaaagcagggtttgttttaatagtgttttgagcctttgattccagttctgcttccactcttggtctataaggatccctatggcagcaacagaatggcccagccctcatgattggttgcttaaaaaggctttaggatattcaaactgggtggcctgtcttgtttggaataggactaagcatgtcacactttcaccatggaagagttaatccatattctatctgtaagttgtatctccagtcattggttttcaacaagtggtcctatcttaggaggagtggtatattagaacagtccttccagagtaatttttttcattatttcagattttttagttttttttgtttgttttttttttttttttttttaaaggctctcactctgtcacccaggctggagagcagtgatacgatcatagctcactggaacctctacctccctgggctcaggtgatcctcccacctcagccttctgagtttctgggactacaggcatgaaccgtgaggcccagctaatttttgtgatttttgtgttttttgtagagtcagggtttctccatgttgcccaggctggtctcgtactcctggtctcaagtaacctgcccgcctcggccttccaaagtgctgggattagaggtgtgagccaccacacctgtactactactttagtttgaacactatatttaaatctaataattcagacatggcccatttcatacttgacagaaagtatgagtcaaagactcaaatcattcagattctcacatatgtaaaacgtacgcttggccgggtgcagtggctcacgcctgtaatcccagcactttgtgagaccaaggtgggcggatcacctgaggtcaggagttcaagaccagcctgaccaacatggagaaaccccgtctctactaaaaatacaaaattagctggggtggtggcacatgcctgtaatcccagctattcaggaagctgaggcaggagaatcacttgaacccgggaggtggaggttgtggtgagctgagatcgcgccattgcactccagcctgggcaaaaagagcgaaactctgtctcaaaaaaaaaaaaaaaagcaggcttataaaataaaacaaaaatgtcccttatgatttgtcttaaaggtagttgaattaataagagctaaatctagtgtcccatacatctttgtgtttcttactctaccctttagaaagggtgggggtggacgtggataaggcacacagttaattcagggacggtggagtcttggtacttgctctttttccctgaccttgctttggagttattttattttttaaattctgcatttggcatgctattatcacttgcttactattataggtcctattttatctgttgcctagcatattctcatagtgcctaaaatactctaaaagctatttccagagggagctttaatgagacatacaatgcttaatctctcaaatgtaaatgtactagaacaaagcattctggggaagaaaacagtggttgatttaactgaactcacttttccaaaacagtggcttttgattttctgtaaacattgactttattaagcttttcccttgctactatatgcactctctatttcttaaattgcaaagagttattcatgaaatttgtgataaatatttgaatctaaggcaacgtttttggattctttatacgaggtttttagcagcatgtgtacatgtatgtgatagctgttaacggaattcacttaagttttacttagaagcctgggtagtagaacctagaagttgcagtgggaatttttttttaatttgaaagattaaataggtaaaaagtcatctttaatctctattaaacttttttgtataatgtcagaagtgaaagttccccacatctgcttacagcctgtttgtatccttcctgacttgattgattaaatggacatctctatatacatatgcatataatttcaatttttgcttagtaacaaaaacaaaagttacacatactggtgactaatttgcttttttcacgtatgtcatgaaccattttccagggcagttcatctagatctccctcaattctttttaatggctacatattccactattatggatgtaccatatttatacaaccggttccctattgatggacatatggttgtgtctagttttttgctagcattgtgatagattagagcctgtaatgaatggtaaggaagtaagtagatgatagcactactactttgaaggaaaaagtagagaataaacttcctttgccatagtcacttactaaatggaatttaataaaaacactgtcaaaagttgggaggaccaaaattgatactttttctctgatctttttgccatgtgtatatctgaattctttgtttttaaagaagaaacagcattgaagcattatttggggggaaaaacacacacacaaaatccagcaactcagcattcatgagcaactctatactataccagtatgtgcctgtgcagtggaaggaaaacaattttggtaaggattaaaactttagctttaaacttccagcaggttgatattctaatgaatgataaatcaaaaaaaaattttaaatattcttgtattgacagtgcttttttttttaaatcaccctaccttgatatctgtaattttagtttaaactttcccatttttctttaaagaaaaaaatctgaatttgcagccaacaaaaattagatatcctaaggttgtattacttctgacttttattaaaatatcaacatttcttagagatgtttatgggccgactttgtctttttcttcaaggggccaagttcactaattgctgagttttatgcatatgacagcaaccgtccttttgtaggtgtgtgtcgcatccatctagatactttaaaatgctcatctatttcatttttaaaattatgtgtgtgggattatcagtatttttttgttaaacatatgacatctgtagtttatttcactaatgtaaattttttctaccatttgcttgatacaggaaatatatcctggacaattccagccatctctctgtcacaaattcatagccttgtcagataaggaaggaaaactacttcgcaactatacccagaacatagacacgctggaacaggttgcgggaatccaaaggataattcagtgtcatggttagtaaacttcagagtggttttctgtaatttattttagttttataggaagatatttcctataaagctgactgccatcgagaagtggagataaagcattatttaatcatgttatctcatttatcgataacctcagaaaagtagaaaacaaaaataataaaaacagaagtattggccttgacagttaattatagaaaacctcagatattaatttgcttttgatttcaaaagatgctgcagttgcatgcattcaattattttaaataatcttttctggctgagtgcagtggctcacgcctgtaatcctagcactttgggaagccgaggcgggcagatcccatgaagccaagagttcgagaacagcttggccaacatggtgaaatcccaactctactagaaatactaaaattagccgggcatggtggcaggcgcctgtaatcccagctactcaggaggctgaggcacgagaatcacttgaacctgggagttggaggttgcagcgagccaagattgcaccattgcgctccagcctgggagacagtgagactctgtcaaaaaaaaaaaaaaaaaagaaaaagaaattctgaatacaagagtagtattagctgttaatgaagaaatgtgacatctttagtttatgaaactaaaagaactggatagttgagatgtacaggattcagagattcagaaatgtttaaaacaagtatcaacaggccattaggtatctaaagtgtttctaagaactgccgagctaaggtaatagagttggaactgtccaactctgcaggattttagccctggaggagtgagctgttacagttttgttgaaaagagtagctttagaaggcatcattatattagtgtctcagagattgagaatcatattcattctatgtataaatatataaattcttcatcccctagattctcctgtagtatatcacaaaatctgcagtgtgttctgaggtttaaaatcaaagttaaaaacaaaaacaaaaatccttaaaccctcttaacatttgtgatgttaaactttataacgtttgtggtgtgttcaagaaacagaaatacttctttaataaagcatatatatgttgtttgtttttaggttcctttgcaacagcatcttgcctgatttgtaaatacaaagttgactgtgaagctgtacgaggagatatttttaatcaggtaatttgttgcccatattttaggaattgttcatgtctctgaagtatttcttcttttgcctcaaaatccttttttacccctttaaagtatatatggtacagaaagattcaggaagaaaatagttagcatttgggaattttggtaaaatacacgagaacctttcaataccttatatagaaaacagccctataaaggctcttcaaattatgaaattggcttcttagtatctaagccgaacataaaatgtcagatcataagcaagttgttgttgtagtagtttttctccttcctctccctttttgtgcctgtcagatttggaccttaaattagttatggtaatctaaaattatttcatacatgttcattgccaaaaaatataggaaaatttggcagaaaataaaaattatccagaaatatgtcctgtgtgcttagcaatatatggaggtaatcatgtcattacgaaagaggaagaatagtatattaaaatggagtcattggtcgggtgcagtggctcatgcttgtaatcccagcactttgggaggacgaggtgggtcgatcatttgaggtcagaagtgagaccagcctggccaacatggcaaaaccccgtctctcttaaaaatacaaaaattagcctggcatggtggcatatgcctttaatctcagctgcttgggaggctgaggcaggagaattatttgaactcgggaggtggaggttgtagtgagctgagatcatgccacttcactccaggctgggcaacagaacaagactccatctcaaataaataaaatggaatcattttatttgacaaatgtctatttttttttgaaaggatcaattcccatttagtgtatatacacacattatgtttttcctcttaatatatgatggactcttcaatgtcaagtgtttttctacatagatattataacaagagcatagtatttcattgtttcatagtatgttaataaactacccatcattgacagttgctgtttatccatagcttttctgttttgttttttttttaataattctgaaatgtattcttagaggtatggaaatgttgactatttctaacttgggcttactctttgcttctctacctcaaccaaaatctgaaaatatgtaggtagttcctcgatgtcctaggtgcccagctgatgaaccgcttgctatcatgaaaccagagattgtgttttttggtgaaaatttaccagaacagtttcatagagccatgaagtatgacaaagatgaagttgacctcctcattgttattgggtcttccctcaaagtaagaccagtagcactaattccaagtaagttggtgatggtttttggagaacatttctatatataatgtcatgggttgtgggtctgtataatagacgctagtaatcttaactctgcttctgtttgaaagagtggtgaagagctaattttagaaattgtttgtttgtttgtttattgagatggagtttccctcttgttgcccaggctggagtgcagtcgcatatcttggctcactgcaacctccgcctcccgggttcaagcgattcttctgcctcagccttctgagtagctgggatcacaggcgtccaccaacatgcctggctagtttttgtatttttagtatagaccgggtttcaccatgttggccaggctggtctcgaactcctcagctcaggtgatccgcctgtctctgccttctaaagtgctgggattacaggcatgagcccccatgcctggccagaaattctttatttttagtagagatgaggtcttgttgtgttgcccaggctggattcgaactcctgggctcaagtgatcctcctgcctcagccccttgagtagctaggattacaggcacgagcctccacatctggctgaactgtttttttaggtggcattgttcattgagactggtgaatctgacattttgatggggggtggagggttgtcaaaacgcaagtaatgttggtggctcgtgcctgtaatctcagcactttgggaggccgaggtaggtggatcgcttgagggcagcagtttgagaccagcctggccaacatggtgaaaccctgtctctactaaaaatacaaaaattagctgggcatagtggtgtgcacatgtagtcccagctacttgggaggttggggcatgagaatcgcttgaactcaggaggcagaggttgcaatgagccgagaatgtgccactgcactccagcctgggtgacagagtgggactctgtctcaaaaaatcaaaaacaaacccagaagtaatgctaaactctacttctaatttatgtgaaaaattaagacaaaggtagagttcaacttagactttttggtggaatgtgtttttaatgttgcaagggttagcatcaattaatttatgaaatggtcctttatccttatattttttgattacagttttgatctttcaaatttaattgatttcacatttaataaattcaaatgtatagtttggtagaagtgtaacataccatgtaagatggaatttgggggctcagaatgattggttcattcttgtagtaacagccatgccataacggtgatatgtcgatatagtttacccaaaagggtgtgtatataaaagtgttcacataaaatttaaatccttattactctcaggaaaatttctttgtcatatatattctcatactgtctgtttcctcctctagtttagaatcagaggaggagagagagagatttcagttgcatcagatgtgtcctttcataagtgagggaaagaggagaggaaaaatattaaatccctagccagagaattgaattagaccccacatcagcagtcaaggcagccagagtaaacagttggaagaaacatggagtcaagctcttcaattttgtgtctatcccatatctcgtggctttagcagttaactcagtcttacctaattagctgtgaaattctgttaaagtagaatacaagacaatttgcaattaaatgaaacatgaaaatttaatatacaaatctctttgttcttgagttgctcttcttaaagcaaaatcaaaggcactctgcttaaaagcttttctttttattttttagagacgggtgtcttgctgtagctcaggctagagtgcagtggtgcagtttcagctcactgcagccttcaactcctggggacaagcagtccttccacttcagcttcctgagtagttaggaccagaggcgcacaccatgcttggcaaatttttaaatttttttttgtagaaacgggattcactttgttgcccaggctggtcacaaactcctggcctcaagtgatccttcctcctctgcctctcaaagcattaggattacaggcatgagctaccatgcctggtccttaaaaacttttctttcaaaagctttctgtgggatagtatgatgtgttgcaaagataattaaaaaaagaaacaggtttataatagcgtagaatatgtttatatgactttttccctccccccctcccctccctccctcccttccgtttgtccttccttccattcatccttccttctgttagtccttccttctgtccatccttcccgtccgttcttccttccttccttcgtccatccttctgtctgtccttccttccgttcatctgtccgtccttccttcctcccaccctccctccctccctcctatcctccctccctccctcattgcccaggctggagtgcaatggcatgatctcggctcactgcagtctcccgtgttcaagcagttctcctcccaagtagttgggattagaggcatgcgctaccacacgcccggctaattttgtgtttttagtagagatggggtttcaccatgttggtcgggttggtcttgaactcctgacctcaggtgatccgcctgcctcggcctcccaaagtgctgggattacaggcgtgagccactgtacccagctcaccttctttatatcaggagctacttaagtagaacatttatgtaccaagaactcttctgtgcacttgactaactcatttaatcctcaccacagtcttgtggagaagtactattatcatccccattctgcagacaaggaaatttgaggttcagagtgggaaagtctgggaagattgctcaggggtaaccaggtgataggagcagaacttgagcgttttataaaagacacttaactgcccatctgcttgcttgatgaaatgtaatggcttggttaagtatttagtgcatgggtcttttttgggaatttggagctcaagcccttgttggatttttgcataatgtatctgttgtggttttattagcttacttcctcctccctttttctaactcttatttttcaccctattttaggttccataccccatgaagtgcctcagatattaattaatagagaacctttgcctcatctgcattttgatgtagagcttcttggagactgtgatgtcataattaatgaattgtgtcataggttaggtggtgaatatgccaaactttgctgtaaccctgtaaagctttcagaaattactgaaaaacctccacgaacacaaaaagaattggcttatttgtcagagttgccacccacacctcttcatgtttcagaagactcaagttcaccagaaagaacttcaccaccagattcttcagtgattgtcacacttttagaccaagcagctaagagtaatgatgatttagatgtgtctgaatcaaaaggttgtatggaagaaaaaccacaggaagtacaaacttctaggaatgttgaaagtattgctgaacagatggaaaatccggatttgaagaatgttggttctagtactggggagaaaaatgaaagaacttcagtggctggaacagtgagaaaatgctggcctaatagagtggcaaaggagcagattagtaggcggcttgatggtaagaaaggcagtcggaccattttgaaagtataaatgtcataacagtatttccaaaaaattagctatttcggcaggttaatcgatagggtagctttatgtagttgattctgtttagagaaactgtacagttcgtaatcagaaaggtaaatcttctggtatcttaacatgatatggagaaggaagtgtttaatagtgctctgtatgttgtgtttctctaggggatggaaaaataagaatgggttattagctggcagaaatgatgacagatttgagtgcttactgtaggtcagctgctttacatatgttacctgattttaatctgaggtaggaactattactcttcttcaggtgggaaaactcaggaccatagaggttaaatacctcatgcacagtaactactaagaagtggaagaaccagattaaaatccagtctatttatgcttagagcctgcccccttaactactatgcggtgttgtctcagatgtagaacacatctttgttttctctgaggacttagaaaaaacacgcgtgattcttctccactgaatataggaatagtttctaccctgtttagaacatgcatagtctttatcaataagtgttaactgacatgtgaaatcactttctactctttggaagccgatgttttaagtccaagtagtctgtatggtggaaattcctaacttatgttaaaaaaaagaaaaccactgtaacttagctataacagtcttatataacttagaactttaagtctcattccatttaccatacttggcgaaaactgacaaattttagacaactgtatttgagtattccagtcatttgctgtaaatacattttagttcagttgaataaacctttggcctttttcatattaggcactgtggtaagttatggagacacagtgattaatgttgtgtataattataaatgtgagtgatactcattaatactttggtataggtgctgctgaagaacaaagtactttattattgttttgaacaaaacatcacacaaaaggtagattttttttttttttttttttttttttttttgtgacggagtctcactctgtcgcccaggctggagtgcagtggcacgatctcagctcactgcaacctctgcgtcccaggttcaagagattctcctgcctcagccttctgagtagctgaaattacaggcatgcgccaccttgctcggctgattcttgtatttttagtagagacggggtttcgccatgttggtcaggctggtctcaaactcctgaccccatgatccatccacctcggcctcccaaagtgctggaattacaggcgtgagccacggcgcccagccccaaaaggtagattctacttggagattagattacagaaggctttctaaggagcaaaatatttaacaataagtagggatttaaaaagagcagacgtgttcacaggggaaactagaaaaagcatagagggatgcttacgtttgcaaatcgtggcagaagtcagaaagtagaaaaattgctactgacttagatacacagttgtctctagcgtatacaaagtctacctatgcactaagacttgcactgggaacttttcttgaatgtcattttgacagatgtgtcaaacggacaatctctttgcccaggaaacagagttaacctggaacagtcatttttttttaaatttatttattttttgagacggagttttgctcttgttgtccaggctgaagtacaatggtgtgatctcggttcacggcaacctccgcctcccgggttcaagcgattctcctgcctcactctccagagtagctgtagctgagaccacaggcgcatgccctcatgctcagctattttttttttttttttttttagtttttgtagaaacaaggtcttgccacattgcccaggctgataccaaactcctgggctcaagcagtctgccagccttggcctcccaaagtgctgggattacaggtgtaagccactgtgccctgcctgtggtgtcttgggaaactcatgagtactatgtgtctgttgtaatagagggaaataagtggttttcacagtgatttgtagtggactgtgaaattttagggattcaggtcagagttgtcacacaggttgtagtcagggtgagaactgggtcatgatgcagtatgaaaaagttcgagagccactttggagagaacttgagataggccacctaccagtgtggtaaccaggcttttgagaattcgtctgggatacggtacaataaatactacatctattatgtgtgaagagatgttaagttagggacatactgtgaattcaaggatagaaaacttttccatcagtttttagggatcctactctttcacttaaaccccaaatggccaagctaggattgatttggtgtgctgtagaaagaacttcattggtattcatggattcacattacatcttagaggagttttcaaaagcgtcttagactgtatgtgtatatacacacacattctgaagcagtaggtgggtcttggggcctgagatctcgggtgaatgtaaatttaggttcacaggtgatactgtagattcacagtgtctacagagtacactatgaatttgtggtgactacattattgacaaaatattttaggtttataatcagaaaaaagttaaaatagttaatgaagatgctttaaaagcctgtgtactttagagaagctacttaacacaaattgggtatctaatgtaggctgggctggatacttcattttcatcaaatctttttaaaataattggtgaaataacctttattgaatatggttttctacatttttcacacttccctccttcatagggttgtgaaaatttatttcatattctagatgaggaaattgaggcacagaggtacacttacaaagatacaataaatggcagaactaagatttgaacccaggactaagtgtattgcttgtatttatttaattaattaatttttaagagacagggcctcactctgttgcctaggctggcccttgaactcctgggctcaagcagtccacctgcctcagcctcctgagtagctgggactgcaggcacaccatgcctcccagttgtttttaaacactaatagtagtctttcataaggacacttataataaaggcagagctggaacccacacttcattccagactgctcagactgagttagtgttagaaaactgaaagtaacatttttattactgtatttcaggtaatcagtatctgtttttgccaccaaatcgttacattttccatggcgctgaggtatattcagactctgaagatgacgtcttatcctctagttcttgtggcagtaacagtgatagtgggacatgccagagtccaagtttagaagaacccatggaggatgaaagtgaaattgaagaattctacaatggcttagaagatgagcctgatgttccagagagagctggaggagctggatttgggactgatggagatgatcaagaggcaattaatgaagctatatctgtgaaacaggaagtaacagacatgaactatccatcaaacaaatcatagtgtaataattgtgcaggtacaggaattgttccaccagcattaggaactttagcatgtcaaaatgaatgtttacttgtgaactcgatagagcaaggaaaccagaaaggtgtaatatttataggttggtaaaatagattgtttttcatggataatttttaacttcattatttctgtacttgtacaaactcaacactaacttttttttttttaaaaaaaaaaaggtactaagtatcttcaatcagctgttggtcaagactaactttcttttaaaggttcatttgtatgataaattcatatgtgtatatataattttttttgttttgtctagtgagtttcaacatttttaaagttttcaaaaagccatcggaatgttaaattaatgtaaagggaacagctaatctagaccaaagaatggtattttcacttttctttgtaacattgaatggtttgaagtactcaaaatctgttacgctaaacttttgattctttaacacaattatttttaaacactggcattttccaaaactgtggcagctaactttttaaaatctcaaatgacatgcagtgtgagtagaaggaagtcaacaatatgtggggagagcactcggttgtctttacttttaaaagtaatacttggtgctaagaatttcaggattattgtatttacgttcaaatgaagatggcttttgtacttcctgtggacatgtagcaatgtctatattggctcataaaactaacctgaaaaacaaataaatgctttggaaatgtttcagttgctttagaaacattagtgcctgcctggatccccttagttttgaaatatttgccattgttgtttaaatacctatcactgtggtagagcttgcattgatcttttccacaagtattaaactgccaaaatgtgaatatgcaaagcctttctgaatctataataatggtacttctactggggagagtgtaatattttggactgctgttttccattaatgaggagagcaacaggcccctgattatacagttccaaagtaataagatgttaattgtaattcagccagaaagtacatgtctcccattgggaggatttggtgttaaataccaaactgctagccctagtattatggagatgaacatgatgatgtaacttgtaatagcagaatagttaatgaatgaaactagttcttataatttatctttatttaaaagcttagcctgccttaaaactagagatcaactttctcagctgcaaaagcttctagtctttcaagaagttcatactttatgaaattgcacagtaagcatttatttttcagaccatttttgaacatcactcctaaattaataaagtattcctctgttgctttagtatttattacaataaaaagggtttgaaatatagctgttctttatgcataaaacacccagctaggaccattactgccagagaaaaaaatcgtattgaatggccatttccctacttataagatgtctcaatctgaatttatttggctacactaaagaatgcagtatatttagttttccatttgcatgatgtttgtgtgctatagatgatattttaaattgaaaagtttgttttaaattatttttacagtgaagactgttttcagctctttttatattgtacatagtcttttatgtaatttactggcatatgttttgtagactgtttaatgactggatatcttccttcaacttttgaaatacaaaaccagtgttttttacttgtacactgttttaaagtctattaaaattgtcatttgacttttttctgttaacttacattgtttaaggtatataatttttaagtcttacagaatttgtacagcttcgaatgctatagtattagatgctttctttctcatactacatttcttcatttggtttattacattagtctcaccagaccagtacttgcaaaaccctgatggtgctgatcgtagcaggtgatgcatcaccaccaagcatttcaaaaactatttcagccattctaggctagaggcctgagcaagtaaaacatggagaaaaggcagggcagggcctaagaaggatgtgacatgtcctatgataaaggaccaggagtttgggatttgagagagaacaggaagtggtggatagtgaaaatccatctgatgcaaaggctgggttaactgaaaatctgttctgggatgctaggtctttcaagtctgaagactgcagaccacatttggtatcaactttctgaggctgacctgagaacctacttaagccattaaaggttttgagggcgaaagtattactgaagaggccagcagtgtaccccttaaaatgtatgtgtaacttggtcgggtgcagtggctcacgcctgtaatcccagcactctgggaggcctacacgggcggaccacctgaggtcaggagttcaagaccagcctggccaacatggcgaaaccccgtttttactaaaaatacaaaaattagtcgggtgtggtggcggcacctgtagtcccagctatttgggaggctgaggctggagaatcgcttcaacccaggaggtggaggctgcagtgagccaagatcgcgccactgcactccagcctggtgacagagcaagactccgtctcaaagaacaaaaaagtatatgtaatgaataaagctttagcaatttcctgttcccagttctgcctccctccccagcaaactttctaggtagacctgtcctgtatattgttagcactagagaaattacctgtaagatgatatcctcaaaatattacaaaattaaggaacattctatatatgcacaaattgaagaagtcaggtagttgatacttttaaaggtacatagtcaatttaagtggtcaaaaggtatttggcaaaacctaatttaactcaagccctatgcataacgttattgctgaaccactggctaatgcagcatgtactgtatttcactgattgtaataccctaattaatgtcacatggtttaattagcgtttttttttgtagtggtacataaaatgacggtggaccttcaatcaatggtgttttacataatccccaactaagctttatttgaaacacaacttctgacctgtaatctagaaaggggtgggggagtatgtatatgtatgtacaccaaaacctctcccccaaagatctaaagccattctaggccttcagctcaaactaggatactagtagaaagtacagaaaaatggtctaatgacctccccaccttttgaagtgactgtcaaatgagactattaaaaaccacttgaaaacttttaaaaagcaagaatagcctgagacctcctagaaatacagatttaattggtgtaaggtggggtttgtgcagagtattaaaaacgcccccaggcgattcaaaagtatagccagatttgagaaacacccttagctggaaaagaattgaggagctctgttttgatgacttttaacatacactccttagggctggcttaaaaaaggaggttaacttacattagcctcaattcccaaattttacctagaaatgcttcataaattaggtaatttggggttcataagcaaatacagcagagtagggagttatcaaaatagagtgaattcttcagcaaaggaggacaaaactaccataaggcattctggatggtcaaagtgcaaaagaggttggggagtggaggaagagactgatgacaggaatattttgctcttgttttagcaggcttaccatgcactcttcaggggaagactgctctatgccatattacaccttgattcacagctttactaaatgtagtaaaaagctgtaaggaagagcaacctgatagtaaaaattgaccccaatgaatggtccttaggaacagatcctatgagaaggctaaccgtgggaatctaatttaggtctctcagtttttacacctacattctggttttattgttttatttatttttatttttttgagacaagtcttgctctgtcgcccaggctggagtgcagtagcgccatctgagctcactgcaacgtccgcctcccaggttcaagtgattctcctgcctcagcctcccgagtagctgggagtacaggcatctgccaccatgcacggctaattttttgtatttttagtagagagagagagggtttcaatatgttggccaggctggtctcgaactcctagactcaagccatctgcccacctcagccttccaagtgctgggattataggtgtaagccaccacgcccagcctgcattctggttttatttccttttaattgaaaggagtgtcttggttctgctgtcttattaatcatcctgaacaatggctaatagcttgaatgactactaagacaggagagctacacacacactatgtatttgtaccttacaaatagatgtgtggaggccaaatacttcagtatttagccaactcaataatcatagtccctacaatttagcaaatgatctgcagccttgctgctctgatctacaaagctcgagacttcttcttgttttttaaaagtaagtggcaatttcagaaatcttcaatggtattttaactttctaccatgaatctccttgctgttaatacattgtatcacagttctggagtaacagggaggaaaagtccccaaattaaactttgtacagtgtgctcccagatgctattctcttgttaaaatatttgttcatggaactattaatccaaagtgcctgctatttcacaaatcagcttcataatatacaaaggttactactattgagaaagagcatctgacatgcttttgatttgaataattactacctcaagaagtggatgaacagggaaaatggtataatatcaggtatgtggaaacactctcatggggaagaatgctactactttgagacaaagtaccttaggtgagaatattgttttagtgcttctatctatagaagagttctatggttcgccaatagttttttaagttaatctactgaaaagtacaagtccacaatcccttatccaaccccttgggcttatttgcattttggaattgtgaattctgaagaattttttaaagcacccaatagcggtcatagtcttatttagtgaataccataaatagcttcaacaattcagatcaggtttttctgcaaagtgagagatgacaatattcttttcagtttttttaaattttagaattgcaggttaagagactgtggacctctataaattcatgtaggaatagaaacaagtcatccgaaatttaagagaccttccctgaaccatccctctttttgaaaaattttgactcttatatgagaaccactgaaagtttaaatattaaaacaataaatctttattaaacagttttcacggcattttaaaataaatttaaaaaataaatatttgcattatagcagaaagtcacatgtattgcatcaactcacttttacaatttaatggcatgagacaactaagcatcagcaccataaaactgttaagatttgtttcttaaattcaaggaaatagctctaaagcactgcagcatcaataattttgaaagctataacccagtgattggtgctcatagtagccaatgtttctttttattactggcaactgtggagacagagttcttccagtactaaatattaataagttctctgatcgacaatcccccatctatcagtgtgtcaggattcacaaagaaaagaactgcaggttatgtagtatattccctatctgtgatttaggtttgcacaaagacacttattctagcaaaaaagaaaagatagtgtttccaccatgctaccttttttttctttttatagagtctcagagtaagatttaaatcataatttttaacctttaaaagtctgttcaagttcaattacaaccatagaaactgtactggtatcagaacataactattttattacaaaacttaacattatttacaaaatgaaaaaataatcaaatgactattgcaggccaaagttaaaggtttttcactcaatgattgaagaaaaattaagcaatatttccatgcactcacaccagatcatttctgaaatatgcaaactcttaaaattcatgttagtaaaactttaatgtattcataatacttgctatgtttattagaagatggtcaaaaaaaatccatggttctgtacaataatattaacagtttgttcattttcctttaatattttttggcttccatgaacactcgtagattgaacattctgcaagtaagaattataatagtacctctgtcaccttgctgaattcatcaccacaagaaaaacacaaatagtttaatgcttttgcactaaactgaatagttataactccaaagttatattaaactgaagccttcattgtgatcaatagcttggatcagtttagagcgtagagtttctttttctgtatattttggaagatccagaagattaaaacaagtatgggaaactgggagatactcctcaccacctcctgtggactggatgactagtttcagactcttcataccaagaataggaatgcgatcactacctgtcaaaaatactgccaagaaagaaatcattcagtcaaccacttcaaaacaaaaagatacagtagcaagtaatatttggtacagtcgctacagcagagcttcactttaacatctgctctaacgtgttatcttacttcctaatttgtggaagacaagttttttgagacacattctaattgctcatccacacaatattttttctttaaaagtataatcttaatactggcacaaaggaagtgcttaataaatgtttgataagtgagtattttgccattgccaaaacattttgagagcccttttttggaaaagccattcagaactagttgacaaaccaaatacaaaatgcagttttgattatgatttctttttctatttgcttcgtttctgttattttttttaaatcagaaatttataatgggcagccaaaattcaaatcattcttttttttttgagacgagtcttgctcagttgcccaggctggagtgcagtgtgcggtcacagtcacagcagcctcgacctcctgggctcaagcaatcctctctacctcagcttctggagtagctgggagcacagtcaccaagcccagggctaatttttatagagatgaggttttgccatgttgcccaggctcaaatcactcttaaagagtaatgatttctcatccttatgacacacagaagaatttgaccaagattctcggaggttgccaaatcattcctggcaaaagcaggagtatcaaaggaaatgtcaccgatttggacacataaattctgacaactttaaaaataagtcaaatttcaattagaatacagactttaacagaagaaagatacacaggcatcagttataaatgagggaactaaggcctgaaaaagctttattttatatagaaattgccaaagttttagtcttgaagcaaaaagaaaaagaaaaagaaaatgaagaccaaacagagaaaagagcaatacagttggccctccgtatctgtgagctctgtatccatggattgaaccgactgcaaatcgaaaatattttcaaaaaatggatgcttgtgactgtactgaatgtgtcaactgtttttcttgacattggtccctcaacaatacagtataacaactatttacatagcatttacattgtatgaggtattaataacatgtacattcatgtgtcacttaacgatgatgatatgttctgagaaatgcatcattaggtgatttcattctgtaaacatcatatatttacacaacctagacagtatatagtctactacacacctaggctacatgatatagccctattgctcctaggctacaaacctgtacagcatgttactgtactgaattctgtaggtaactgtaacataacagtaggtatttgtgtatctaaacatagaaaaggtacagtagctgtattataatcttacaggaccactatcgtatatatggtctgtcattcactgaaaagtcattatgtggcacatgactgtaatctagagaagatttaaagtataaggatatgtgtaggttatatgcaaatactatgccaatttatacaagaaacttgagcatctactggatttgggtatccttggcagggaggtcttggaatcaatcccccatgtatgccaaaggatgactatactccagagatctttttagaaatctaaaaggaattctacaatcctagtttattgtaaccacagtttattgtaactataacatagctatagtttgctttcatttccaagttagcttccattttacttcatagaatgaatcaatgctattttgaaggcaaactgaatttagcctttgaaataagaaaatacatgtactgaagagtgcagatagttctgtttcaaaaaaattacttgaagattaaaacagggctttggaataatactataattagattccagtctcataaagtatacaactagttagaaatacttacacagaaactgtttcttcttttccaatggtaattcgtgaaatacttcccaaaaaatttttatcgtaggatgttctgcccaatattcccctttgtattctgtattctaaaaacaacataatcttttattagtattaagggacacactggctaatatattagcacataaagctaacatggtccagtagtttgcaacttgtgcaattcaatggattgcccactgttttctggacatttacaatttgaagctattagttccaggagaaaaagaagaaatacgtaagaatcaccagaaatctttcctagcacttcaaagaacatgataggatcatactatcatcttcaaaagtaaataaagagaaactagataaaataatgttataggaccatcaaaagtctgacatggaattatctgtgataatcagaaaattccctttctctgtattcatgaacagaagtcaaaccattacaatttatctctccttttaaaaatatggtactaagcaacactaaaaattttctgaggtagtttccaagatggccaccagtgagcactgcctcctggtattcatgcccgtgtgtataaggatactgtgaatatgaggaatgtatgacttctgagactaaatcataaaaaaaaaaacctctatggcttcagcccttcttctggatcactcactctgggggaaaccagttgtcatttcatgaggatattcaaacatccctatatggagagaagtactcatggtgctatactgaggcctcctgccaacagtcatgtgagtaagccaccttggaagtgaatctctatccttaatcatgcttttagatgcctatagcaccagccaatattctgactgcaacttcatgagggaaccctgagcccaaactactcagctaagccactcctgaattcctgacccacagaaactatgaaacaagagtttcattgttattttgaagccaataagttttggggtaatttgctgcaataggactaaaatatctcccctgtcaaaaatattagtactggccgggcgcggtggctcacgcctataatcccagcactttgggtgtccaagccgggcagatcacttgaggtcaggagttccagaccagcctggccaacatggtgaaaccccatctctactgaaaatacaaaaattagctgggcatggtggcaggcgcctgtaatcccggctacttgggggaggctaaggcaggagaatcgcttgaacttgggagacggaggttgtagtgagccaagactgtgccattgcactccagcctggtcaacaagagcgaaactccatctcaataaaaaaaataaaaaataaaaaaaaaaaaaaacaaaaaaattagtactaaaagagaagcaggtaggaagtagagaggaaatagtttatactgtgaactgttcttatccagccgcagttggctttaactttcagttcttcagatgcgtcaggtcctttggacatactgttccctcagcctacaccactcagacacatcctttcttctttggtcatcaggctaatttttacccttttagggctcagattaaatgccatctaattcattcattgattcatccaacaaatatataatgagttttagtcaatgttttgggccctgggaaaacctcagtgaacagaatcctcacttaccttgtggagctcaccgtctagtaagaggcgttcccagattcatctagcctagatcaggctcctccttacgcaccattcactaaactctttttcactgtattaattaaaactgtgtattaaacatttaatttctagctctcttattagggcaaagaccatgtctctatcttatttcctgccctctcttcaatctcttgcatggtttcagctgtacattatccggcacacagtagaggctcaataaatacttgctaatgggcttcttgaattttggactttccttatttgtagccatgatttatcttaatcactgaactctcaataattcaaatatgcaaaatatttgctgttagttgcacacaagtttgaagaaaacagcttgaattctagcatggaatttatggaatttattcaactgtttgaattaaagtctgtgagcatgttagtggggaatgaaaagaggatggctaaagtttttttttcttttaaatctctaaatggtttggtagaaatgtgcacacatgtcctgattaagaaagaacatttaaagctccaaatcataatcactaaaattgtaatgaatcagatatacaacagaagaaatcaaagtgttaagaataaatacaccatatatatatatatatatatatatatatatatatatatatatatatatatatttttttttttttttagatagagtcttgctctgtcaccaggctggaatacagtggcacgatcttggctcactgcaacctctgcctcccaggttcaagcgattctcctgcctcagcctcccgagtagctgggattacaggcctacaccaccacacccagctaattttcgtatttttagtagagacgggggtttcactatgttggccaggatggtcttgatcttctgacctcgtgatccgcctgcctcagcctcccaaagtgctgggattacaggcatgagccactgcgcccggccgctacaatatactttttaagatgtcctgtcttaactgaatgaacacttaaatcaattatcacttcaggcaaggtttcaagtacttactgagtgctctcctaggtgctgggaatacagcagtgaacaaagaggcaaaaattctgccctcatggtgcttacattgtggtggggggaaggagcaacctaagtaaaattatgtcaaatccaaagaagcaaaataaaacagcgaggggagacaggatacgtgtgcaggagagaggtttgcaattttagatcagttatccagggaaggtctctgagaaggtataaacacacaaaggaggtgagagcaagaatcttttgtgattatcaggggaagagaattccaggcacttggaaaaggaaacaaacgccctaagactggagtgtgcctggagggttctaggctcagcagaggttaataaggctgaggcagagtgagaggaacaatgacaggagatgaggcaaggagggaaaaattgtgtaggatctaaagggtgatgagaagctgttatatcattttcattttaaggtgattagaggtggagtccatttccactgggggaccccttagagttagtatctacaggcttcttcttttgagaagatcaatttactactacacaagaaccttcaatctccttcctgaaggatttacacctggctaccagctgtgtagcatcctcagtgttaccttgtttcccaaattgtaaagcctctctcccaagctgtcttttgctgggtaggagaggggacatgcatggtccaattattctttaaaatggctttaaagtaattctgttgcccttagtccaaccttcatccctgccattaagggtaacatggtataccaattcttgagcctttcagattctaggatataaaatgagttgcctcgggccaggagcggtggctcacacctgtaatcccagcactttgggaggccgaggcgagtggatcatgaggtcaggagttcaagaccagcctgcccaatatggcgaaaccccatctctactaaaaaaataaaaaaatcagccgggaatagtggcatgtctgtagttccagctactcgggaggctgaggcagaagaatcgcttgaacttgggaggcggaggctgcagtgagccaagattgagccactgcactccagcctgggcgacagagcaagactccatctcaaaaaaaaaaagagttgcctcctgacaatcctgtccctctggaggcttagaattcaattttcctctgctctaagtcactcatcaatttatctccttactttctgtcttccaaaactatttcttctcttgttcattgcatttttattttttggtatttttattttatatttctatttttattccatttctgtcattctagtgatatttttgggagggagcagacatgtttattccataatgtttaactagaagtcctaattattcttaaaatcttattccttaaattactacacagtaaaactggctatattctggggtgtatacagttctgtaagttctaagcacatgtgcagatctgtgtaaccactgccacaattaggatactgagcagtcccatcactgttatgctcttagatgcctcttgtgctacctcctctgaagtcacaccctcccactcaaccccttgtctctattcactataattttttgtcttttcaagaatgtcacataaatggagccatacagtatgcaaccatttgaaactggcttctttcactcagcataaagcctcagattcatccagttgttgcatgtatcaatagtgcttttttttcttttttgagacagggtcttgctttgctgcctatgacagagtgcagtcagggctcactgcagcctctacctcccgggctcaagggatcctcccacctcagcctcccgagtagctgggactactggtgcacgccaccataaagggccaatttttgtattttttgtagagacagggttttatcatgttgtccaggctggtcttgaactcctgggttcaaactatctgccaacctcagcctcccaaagtgccaggattagaggtgtgagacaccacacccagctgtgcattttttttttgagatggagtttcactcttgttgcccaggctggagtgcaacggcacgatctccggctcactgcaacctctgcctcctaggttcaagcgattctcctgcctcagcctcccgagcagctgggattacaggcaccacacccagctaattttgtatttttagtagagatggggtttctccatgttggtcagggtggtcttgaactcccaacctcaggtgatctgcccgcctcggcctcccaaagtgctgggattacaggcgtgagccaccgcgcccggcccagctgtgcatttccttttaacacttagtagttattctgctgaataggtatactgtagtaggtttacccattcacccactgaagcacatctaagttgtttccagtttttcactcatttgcaaattaaaaaaaaaagtctttaaaaattaaggcaaaacacacataccataaagtttgtatcttaaccattttaagtgtacacttcagtagcattaactacattcacatggttgtaccaccaaccatctccagaattcatttcatctagtaaaactgaaactctgt

SEQ ID NO: 78 - DNA, 57721 bp, Homo sapiens
acagagtttcagttttactagatgaaatgaattctggagatggttggtggtacaaccatgtgaatgtagttaatgctactgaagtgtacacttaaaatggttaagatacaaactttatggtatgtgtgttttgccttaatttttaaagacttttttttttaatttgcaaatgagtgaaaaactggaaacaacttagatgtgcttcagtgggtgaatgggtaaacctactacagtatacctattcagcagaataactactaagtgttaaaaggaaatgcacagctgggccgggcgcggtggctcacgcctgtaatcccagcactttgggaggccgaggcgggcagatcacctgaggttgggagttcaagaccaccctgaccaacatggagaaaccccatctctactaaaaatacaaaattagctgggtgtggtgcctgtaatcccagctgctcgggaggctgaggcaggagaatcgcttgaacctaggaggcagaggttgcagtgagccggagatcgtgccgttgcactccagcctgggcaacaagagtgaaactccatctcaaaaaaaaaatgcacagctgggtgtggtgtctcacacctctaatcctggcactttgggaggctgaggttggcagatagtttgaacccaggagttcaagaccagcctggacaacatgataaaaccctgtctctacaaaaaatacaaaaattggccctttatggtggcgtgcaccagtagtcccagctactcgggaggctgaggtgggaggatcccttgagcccgggaggtagaggctgcagtgagccctgactgcactctgtcataggcagcaaagcaagaccctgtctcaaaaaagaaaaaaaagcactattgatacatgcaacaactggatgaatctgaggctttatgctgagtgaaagaagccagtttcaaatggttgcatactgtatggctccatttatgtgacattcttgaaaagacaaaaaattatagtgaatagagacaaggggttgagtgggagggtgtgacttcagaggaggtagcacaagaggcatctaagagcataacagtgatgggactgctcagtatcctaattgtggcagtggttacacagatctgcacatgtgcttagaacttacagaactgtatacaccccagaatatagccagttttactgtgtagtaatttaaggaataagattttaagaataattaggacttctagttaaacattatggaataaacatgtctgctccctcccaaaaatatcactagaatgacagaaatggaataaaaatagaaatataaaataaaaataccaaaaaataaaaatgcaatgaacaagagaagaaatagttttggaagacagaaagtaaggagataaattgatgagtgacttagagcagaggaaaattgaattctaagcctccagagggacaggattgtcaggaggcaactctttttttttttgagatggagtcttgctctgtcgcccaggctggagtgcagtggctcaatcttggctcactgcagcctccgcctcccaagttcaagcgattcttctgcctcagcctcccgagtagctggaactacagacatgccactattcccggctgatttttttatttttttagtagagatggggtttcgccatattgggcaggctggtcttgaactcctgacctcatgatccactcgcctcggcctcccaaagtgctgggattacaggtgtgagccaccgctcctggcccgaggcaactcattttatatcctagaatctgaaaggctcaagaattggtataccatgttacccttaatggcagggatgaaggttggactaagggcaacagaattactttaaagccattttaaagaataattggaccatgcatgtcccctctcctacccagcaaaagacagcttgggagagaggctttacaatttgggaaacaaggtaacactgaggatgctacacagctggtagccaggtgtaaatccttcaggaaggagattgaaggttcttgtgtagtagtaaattgatcttctcaaaagaagaagcctgtagatactaactctaaggggtcccccagtggaaatggactccacctctaatcaccttaaaatgaaaatgatataacagcttctcatcaccctttagatcctacacaatttttccctccttgcctcatctcctgtcattgttcctctcactctgcctcagccttattaacctctgctgagcctagaaccctccaggcacactccagtcttagggcgtttgtttccttttccaagtgcctggaattctcttcccctgataatcacaaaagattcttgctctcacctcctttgtgtgtttataccttctcagagaccttccctggataactgatctaaaattgcaaacctctctcctgcacacgtatcctgtctcccctcgctgttttattttgcttctttggatttgacataattttacttaggttgctccttccccccaccacaatgtaagcaccatgagggcagaatttttgcctctttgttcactgctgtattcccagcacctaggagagcactcagtaagtacttgaaaccttgcctgaagtgataattgatttaagtgttcattcagttaagacaggacatcttaaaaagtatattgtagcggccgggcgcagtggctcatgcctgtaatcccagcactttgggaggctgaggcaggcggatcacgaggtcagaagatcaagaccatcctggccaacatagtgaaacccccgtctctactaaaaatacgaaaattagctgggtgtggtggtgtaggcctgtaatcccagctactcgggaggctgaggcaggagaatcgcttgaacctgggaggcagaggttgcagtgagccaagatcgtgccactgtattccagcctggtgacagagcaagactctatctaaaaaaaaaaaaaaatatatatatatatatatatatatatatatatatatatatatatatatatatggtgtatttattcttaacactttgatttcttctgttgtatatctgattcattacaattttagtgattatgatttggagctttaaatgttctttcttaatcaggacatgtgtgcacatttctaccaaaccatttagagatttaaaagaaaaaaaaactttagccatcctcttttcattccccactaacatgctcacagactttaattcaaacagttgaataaattccataaattccatgctagaattcaagctgttttcttcaaacttgtgtgcaactaacagcaaatattttgcatatttgaattattgagagttcagtgattaagataaatcatggctacaaataaggaaagtccaaaattcaagaagcccattagcaagtatttattgagcctctactgtgtgccggataatgtacagctgaaaccatgcaagagattgaagagagggcaggaaataagatagagacatggtctttgccctaataagagagctagaaattaaatgtttaatacacagttttaattaatacagtgaaaaagagtttagtgaatggtgcgtaaggaggagcctgatctaggctagatgaatctgggaacgcctcttactagacggtgagctccacaaggtaagtgaggattctgttcactgaggttttcccagggcccaaaacattgactaaaactcattatatatttgttggatgaatcaatgaatgaattagatggcatttaatctgagccctaaaagggtaaaaattagcctgatgaccaaagaagaaaggatgtgtctgagtggtgtaggctgagggaacagtatgtccaaaggacctgacgcatctgaagaactgaaagttaaagccaactgcggctggataagaacagttcacagtataaactatttcctctctacttcctacctgcttctcttttagtactaatttttttgtttttttttttttttattttttattttttttattgagatggagtttcgctcttgttgaccaggctggagtgcaatggcacagtcttggctcactacaacctccgtctcccaagttcaagcgattctcctgccttagcctcccccaagtagccgggattacaggcgcctgccaccatgcccagctaatttttgtattttcagtagagatggggtttcaccatgttggccaggctggtctggaactcctgacctcaagtgatctgcccggcttggacacccaaagtgctgggattataggcgtgagccaccgcgcccggccagtactaatatttttgacaggggagatattttagtcctattgcagcaaattaccccaaaacttattggcttcaaaataacaatgaaactcttgtttcatagtttctgtgggtcaggaattcaggagtggcttagctgagtagtttgggctcagggttccctcatgaagttgcagtcagaatattggctggtgctataggcatctaaaagcatgattaaggatagagattcacttccaaggtggcttactcacatgactgttggcaggaggcctcagtatagcaccatgagtacttctctccatatagggatgtttgaatatcctcatgaaatgacaactggtttcccccagagtgagtgatccagaagaagggctgaagccatagaggtttttttttttatgatttagtctcagaagtcatacattcctcatattcacagtatccttatacacacgggcatgaataccaggaggcagtgctcactggtggccatcttggaaactacctcagaaaatttttagtgttgcttagtaccatatttttaaaaggagagataaattgtaatggtttgacttctgttcatgaatacagagaaagggaattttctgattatcacagataattccatgtcagacttttgatggtcctataacattattttatctagtttctctttatttacttttgaagatgatagtatgatcctatcatgttctttgaagtgctaggaaagatttctggtgattcttacgtatttcttctttttctcctggaactaatagcttcaaattgtaaatgtccagaaaacagtgggcaatccattgaattgcacaagttgcaaactactggaccatgttagctttatgtgctaatatattagccagtgtgtcccttaatactaataaaagattatgttgtttttagaatacagaatacaaaggggaatattgggcagaacatcctacgataaaaattttttgggaagtatttcacgaattaccattggaaaagaagaaacagtttctgtgtaagtatttctaactagttgtatactttatgagactggaatctaattatagtattattccaaagccctgttttaatcttcaagtaatttttttgaaacagaactatctgcactcttcagtacatgtattttcttatttcaaaggctaaattcagtttgccttcaaaatagcattgattcattctatgaagtaaaatggaagctaacttggaaatgaaagcaaactatagctatgttatagttacaataaactgtggttacaataaactaggattgtagaattccttttagatttctaaaaagatctctggagtatagtcatcctttggcatacatgggggattgattccaagacctccctgccaaggatacccaaatccagtagatgctcaagtttcttgtataaattggcatagtatttgcatataacctacacatatccttatactttaaatcttctctagattacagtcatgtgccacataatgacttttcagtgaatgacagaccatatatacgatagtggtcctgtaagattataatacagctactgtaccttttctatgtttagatacacaaatacctactgttatgttacagttacctacagaattcagtacagtaacatgctgtacaggtttgtagcctaggagcaatagggctatatcatgtagcctaggtgtgtagtagactatatactgtctaggttgtgtaaatatatgatgtttacagaatgaaatcacctaatgatgcatttctcagaacatatcatcatcgttaagtgacacatgaatgtacatgttattaatacctcatacaatgtaaatgctatgtaaatagttgttatactgtattgttgagggaccaatgtcaagaaaaacagttgacacattcagtacagtcacaagcatccattttttgaaaatattttcgatttgcagtcggttcaatccatggatacagagctcacagatacggagggccaactgtattgctcttttctctgtttggtcttcattttctttttctttttctttttgcttcaagactaaaactttggcaatttctatataaaataaagctttttcaggccttagttccctcatttataactgatgcctgtgtatctttcttctgttaaagtctgtattctaattgaaatttgacttatttttaaagttgtcagaatttatgtgtccaaatcggtgacatttcctttgatactcctgcttttgccaggaatgatttggcaacctccgagaatcttggtcaaattcttctgtgtgtcataaggatgagaaatcattactctttaagagtgatttgagcctgggcaacatggcaaaacctcatctctataaaaattagccctgggcttggtgactgtgctcccagctactccagaagctgaggtagagaggattgcttgagcccaggaggtcgaggctgctgtgactgtgaccgcacactgcactccagcctgggcaactgagcaagactcgtctcaaaaaaaaaagaatgatttgaattttggctgcccattataaatttctgatttaaaaaaaataacagaaacgaagcaaatagaaaaagaaatcataatcaaaactgcattttgtatttggtttgtcaactagttctgaatggcttttccaaaaaagggctctcaaaatgttttggcaatggcaaaatactcacttatcaaacatttattaagcacttcctttgtgccagtattaagattatacttttaaagaaaaaatattgtgtggatgagcaattagaatgtgtctcaaaaaacttgtcttccacaaattaggaagtaagataacacgttagagcagatgttaaagtgaagctctgctgtagcgactgtaccaaatattacttgctactgtatctttttgttttgaagtggttgactgaatgatttctttcttggcagtatttttgacaggtagtgatcgcattcctattcttggtatgaagagtctgaaactagtcatccagtccacaggaggtggtgaggagtatctcccagtttcccatacttgttttaatcttctggatcttccaaaatatacagaaaaagaaactctacgctctaaactgatccaagctattgatcacaatgaaggcttcagtttaatataactttggagttataactattcagtttagtgcaaaagcattaaactatttgtgtttttcttgtggtgatgaattcagcaaggtgacagaggtactattataattcttacttgcagaatgttcaatctacgagtgttcatggaagccaaaaaatattaaaggaaaatgaacaaactgttaatattattgtacagaaccatggattttttttgaccatcttctaataaacatagcaagtattatgaatacattaaagttttactaacatgaattttaagagtttgcatatttcagaaatgatctggtgtgagtgcatggaaatattgcttaatttttcttcaatcattgagtgaaaaacctttaactttggcctgcaatagtcatttgattattttttcattttgtaaataatgttaagttttgtaataaaatagttatgttctgataccagtacagtttctatggttgtaattgaacttgaacagacttttaaaggttaaaaattatgatttaaatcttactctgagactctataaaaagaaaaaaaaggtagcatggtggaaacactatcttttcttttttgctagaataagtgtctttgtgcaaacctaaatcacagatagggaatatactacataacctgcagttcttttctttgtgaatcctgacacactgatagatgggggattgtcgatcagagaacttattaatatttagtactggaagaactctgtctccacagttgccagtaataaaaagaaacattggctactatgagcaccaatcactgggttatagctttcaaaattattgatgctgcagtgctttagagctatttccttgaatttaagaaacaaatcttaacagttttatggtgctgatgcttagttgtctcatgccattaaattgtaaaagtgagttgatgcaatacatgtgactttctgctataatgcaaatatttattttttaaatttattttaaaatgccgtgaaaactgtttaataaagatttattgttttaatatttaaactttcagtggttctcatataagagtcaaaatttttcaaaaagagggatggttcagggaaggtctcttaaatttcggatgacttgtttctattcctacatgaatttatagaggtccacagtctcttaacctgcaattctaaaatttaaaaaaactgaaaagaatattgtcatctctcactttgcagaaaaacctgatctgaattgttgaagctatttatggtattcactaaataagactatgaccgctattgggtgctttaaaaaattcttcagaattcacaattccaaaatgcaaataagcccaaggggttggataagggattgtggacttgtacttttcagtagattaacttaaaaaactattggcgaaccatagaactcttctatagatagaagcactaaaacaatattctcacctaaggtactttgtctcaaagtagtagcattcttccccatgagagtgtttccacatacctgatattataccattttccctgttcatccacttcttgaggtagtaattattcaaatcaaaagcatgtcagatgctctttctcaatagtagtaacctttgtatattatgaagctgatttgtgaaatagcaggcactttggattaatagttccatgaacaaatattttaacaagagaatagcatctgggagcacactgtacaaagtttaatttggggacttttcctccctgttactccagaactgtgatacaatgtattaacagcaaggagattcatggtagaaagttaaaataccattgaagatttctgaaattgccacttacttttaaaaaacaagaagaagtctcgagctttgtagatcagagcagcaaggctgcagatcatttgctaaattgtagggactatgattattgagttggctaaatactgaagtatttggcctccacacatctatttgtaaggtacaaatacatagtgtgtgtgtagctctcctgtcttagtagtcattcaagctattagccattgttcaggatgattaataagacagcagaaccaagacactcctttcaattaaaaggaaataaaaccagaatgcaggctgggcgtggtggcttacacctataatcccagcacttggaaggctgaggtgggcagatggcttgagtctaggagttcgagaccagcctggccaacatattgaaaccctctctctctctactaaaaatacaaaaaattagccgtgcatggtggcagatgcctgtactcccagctactcgggaggctgaggcaggagaatcacttgaacctgggaggcggacgttgcagtgagctcagatggcgctactgcactccagcctgggcgacagagcaagacttgtctcaaaaaaataaaaataaataaaacaataaaaccagaatgtaggtgtaaaaactgagagacctaaattagattcccacggttagccttctcataggatctgttcctaaggaccattcattggggtcaatttttactatcaggttgctcttccttacagctttttactacatttagtaaagctgtgaatcaaggtgtaatatggcatagagcagtcttcccctgaagagtgcatggtaagcctgctaaaacaagagcaaaatattcctgtcatcagtctcttcctccactccccaacctcttttgcactttgaccatccagaatgccttatggtagttttgtcctcctttgctgaagaattcactctattttgataactccctactctgctgtatttgcttatgaaccccaaattacctaatttatgaagcatttctaggtaaaatttgggaattgaggctaatgtaagttaacctccttttttaagccagccctaaggagtgtatgttaaaagtcatcaaaacagagctcctcaattcttttccagctaagggtgtttctcaaatctggctatacttttgaatcgcctgggggcgtttttaatactctgcacaaaccccaccttacaccaattaaatctgtatttctaggaggtctcaggctattcttgctttttaaaagttttcaagtggtttttaatagtctcatttgacagtcacttcaaaaggtggggaggtcattagaccatttttctgtactttctactagtatcctagtttgagctgaaggcctagaatggctttagatctttgggggagaggttttggtgtacatacatatacatactcccccacccctttctagattacaggtcagaagttgtgtttcaaataaagcttagttggggattatgtaaaacaccattgattgaaggtccaccgtcattttatgtaccactacaaaaaaaaacgctaattaaaccatgtgacattaattagggtattacaatcagtgaaatacagtacatgctgcattagccagtggttcagcaataacgttatgcatagggcttgagttaaattaggttttgccaaataccttttgaccacttaaattgactatgtacctttaaaagtatcaactacctgacttcttcaatttgtgcatatatagaatgttccttaattttgtaatattttgaggatatcatcttacaggtaatttctctagtgctaacaatatacaggacaggtctacctagaaagtttgctggggagggaggcagaactgggaacaggaaattgctaaagctttattcattacatatacttttttgttctttgagacggagtcttgctctgtcaccaggctggagtgcagtggcgcgatcttggctcactgcagcctccacctcctgggttgaagcgattctccagcctcagcctcccaaatagctgggactacaggtgccgccaccacacccgactaatttttgtatttttagtaaaaacggggtttcgccatgttggccaggctggtcttgaactcctgacctcaggtggtccgcccgtgtaggcctcccagagtgctgggattacaggcgtgagccactgcacccgaccaagttacacatacattttaaggggtacactgctggcctcttcagtaatactttcgccctcaaaacctttaatggcttaagtaggttctcaggtcagcctcagaaagttgataccaaatgtggtctgcagtcttcagacttgaaagacctagcatcccagaacagattttcagttaacccagcctttgcatcagatggattttcactatccaccacttcctgttctctctcaaatcccaaactcctggtcctttatcataggacatgtcacatccttcttaggccctgccctgccttttctccatgttttacttgctcaggcctctagcctagaatggctgaaatagtttttgaaatgcttggtggtgatgcatcacctgctacgatcagcaccatcagggttttgcaagtactggtctggtgagactaatgtaataaaccaaatgaagaaatgtagtatgagaaagaaagcatctaatactatagcattcgaagctgtacaaattctgtaagacttaaaaattatataccttaaacaatgtaagttaacagaaaaaagtcaaatgacaattttaatagactttaaaacagtgtacaagtaaaaaacactggttttgtatttcaaaagttgaaggaagatatccagtcattaaacagtctacaaaacatatgccagtaaattacataaaagactatgtacaatataaaaagagctgaaaacagtcttcactgtaaaaataatttaaaacaaacttttcaatttaaaatatcatctatagcacacaaacatcatgcaaatggaaaactaaatatactgcattctttagtgtagccaaataaattcagattgagacatcttataagtagggaaatggccattcaatacgatttttttctctggcagtaatggtcctagctgggtgttttatgcataaagaacagctatatttcaaaccctttttattgtaataaatactaaagcaacagaggaatactttattaatttaggagtgatgttcaaaaatggtctgaaaaataaatgcttactgtgcaatttcataaagtatgaacttcttgaaagactagaagcttttgcagctgagaaagttgatctctagttttaaggcaggctaagcttttaaataaagataaattataagaactagtttcattcattaactattctgctattacaagttacatcatcatgttcatctccataatactagggctagcagtttggtatttaacaccaaatcctcccaatgggagacatgtactttctggctgaattacaattaacatcttattactttggaactgtataatcaggggcctgttgctctcctcattaatggaaaacagcagtccaaaatattacactctccccagtagaagtaccattattatagattcagaaaggctttgcatattcacattttggcagtttaatacttgtggaaaagatcaatgcaagctctaccacagtgataggtatttaaacaacaatggcaaatatttcaaaactaaggggatccaggcaggcactaatgtttctaaagcaactgaaacatttccaaagcatttatttgtttttcaggttagttttatgagccaatatagacattgctacatgtccacaggaagtacaaaagccatcttcatttgaacgtaaatacaataatcctgaaattcttagcaccaagtattacttttaaaagtaaagacaaccgagtgctctccccacatattgttgacttccttctactcacactgcatgtcatttgagattttaaaaagttagctgccacagttttggaaaatgccagtgtttaaaaataattgtgttaaagaatcaaaagtttagcgtaacagattttgagtacttcaaaccattcaatgttacaaagaaaagtgaaaataccattctttggtctagattagctgttccctttacattaatttaacattccgatggctttttgaaaactttaaaaatgttgaaactcactagacaaaacaaaaaaaattatatatacacatatgaatttatcatacaaatgaacctttaaaagaaagttagtcttgaccaacagctgattgaagatacttagtacctttttttttttaaaaaaaaaaaagttagtgttgagtttgtacaagtacagaaataatgaagttaaaaattatccatgaaaaacaatctattttaccaacctataaatattacacctttctggtttccttgctctatcgagttcacaagtaaacattcattttgacatgctaaagttcctaatgctggtggaacaattcctgtacctgcacaattattacactatgatttgtttgatggatagttcatgtctgttacttcctgtttcacagatatagcttcattaattgcctcttgatcatctccatcagtcccaaatccagctcctccagctctctctggaacatcaggctcatcttctaagccattgtagaattcttcaatttcactttcatcctccatgggttcttctaaacttggactctggcatgtcccactatcactgttactgccacaagaactagaggataagacgtcatcttcagagtctgaatatacctcagcgccatggaaaatgtaacgatttggtggcaaaaacagatactgattacctgaaatacagtaataaaaatgttactttcagttttctaacactaactcagtctgagcagtctggaatgaagtgtgggttccagctctgcctttattataagtgtccttatgaaagactactattagtgtttaaaaacaactgggaggcatggtgtgcctgcagtcccagctactcaggaggctgaggcaggtggactgcttgagcccaggagttcaagggccagcctaggcaacagagtgaggccctgtctcttaaaaattaattaattaaataaatacaagcaatacacttagtcctgggttcaaatcttagttctgccatttattgtatctttgtaagtgtacctctgtgcctcaatttcctcatctagaatatgaaataaattttcacaaccctatgaaggagggaagtgtgaaaaatgtagaaaaccatattcaataaaggttatttcaccaattattttaaaaagatttgatgaaaatgaagtatccagcccagcctacattagatacccaatttgtgttaagtagcttctctaaagtacacaggcttttaaagcatcttcattaactattttaacttttttctgattataaacctaaaatattttgtcaataatgtagtcaccacaaattcatagtgtactctgtagacactgtgaatctacagtatcacctgtgaacctaaatttacattcacccgagatctcaggccccaagacccacctactgcttcagaatgtgtgtgtatatacacatacagtctaagacgcttttgaaaactcctctaagatgtaatgtgaatccatgaataccaatgaagttctttctacagcacaccaaatcaatcctagcttggccatttggggtttaagtgaaagagtaggatccctaaaaactgatggaaaagttttctatccttgaattcacagtatgtccctaacttaacatctcttcacacataatagatgtagtatttattgtaccgtatcccagacgaattctcaaaagcctggttaccacactggtaggtggcctatctcaagttctctccaaagtggctctcgaactttttcatactgcatcatgacccagttctcaccctgactacaacctgtgtgacaactctgacctgaatccctaaaatttcacagtccactacaaatcactgtgaaaaccacttatttccctctattacaacagacacatagtactcatgagtttcccaagacaccacaggcagggcacagtggcttacacctgtaatcccagcactttgggaggccaaggctggcagactgcttgagcccaggagtttggtatcagcctgggcaatgtggcaagaccttgtttctacaaaaactaaaaaaaaaaaaaaaaaaaatagctgagcatgagggcatgcgcctgtggtctcagctacagctactctggagagtgaggcaggagaatcgcttgaacccgggaggcggaggttgccgtgaaccgagatcacaccattgtacttcagcctggacaacaagagcaaaactccgtctcaaaaaataaataaatttaaaaaaaaatgactgttccaggttaactctgtttcctgggcaaagagattgtccgtttgacacatctgtcaaaatgacattcaagaaaagttcccagtgcaagtcttagtgcataggtagactttgtatacgctagagacaactgtgtatctaagtcagtagcaatttttctactttctgacttctgccacgatttgcaaacgtaagcatccctctatgctttttctagtttcccctgtgaacacgtctgctctttttaaatccctacttattgttaaatattttgctccttagaaagccttctgtaatctaatctccaagtagaatctaccttttggggctgggcgccgtggctcacgcctgtaattccagcactttgggaggccgaggtggatggatcatggggtcaggagtttgagaccagcctgaccaacatggcgaaaccccgtctctactaaaaatacaagaatcagccgagcaaggtggcgcatgcctgtaatttcagctactcagaaggctgaggcaggagaatctcttgaacctgggacgcagaggttgcagtgagctgagatcgtgccactgcactccagcctgggcgacagagtgagactccgtcacaaaaaaaaaaaaaaaaaaaaaaaaaaaaaatctaccttttgtgtgatgttttgttcaaaacaataataaagtactttgttcttcagcagcacctataccaaagtattaatgagtatcactcacatttataattatacacaacattaatcactgtgtctccataacttaccacagtgcctaatatgaaaaaggccaaaggtttattcaactgaactaaaatgtatttacagcaaatgactggaatactcaaatacagttgtctaaaatttgtcagttttcgccaagtatggtaaatggaatgagacttaaagttctaagttatataagactgttatagctaagttacagtggttttcttttttttaacataagttaggaatttccaccatacagactacttggacttaaaacatcggcttccaaagagtagaaagtgatttcacatgtcagttaacacttattgataaagactatgcatgttctaaacagggtagaaactattcctatattcagtggagaagaatcacgcgtgttttttctaagtcctcagagaaaacaaagatgtgttctacatctgagacaacaccgcatagtagttaagggggcaggctctaagcataaatagactggattttaatctggttcttccacttcttagtagttactgtgcatgaggtatttaacctctatggtcctgagttttcccacctgaagaagagtaatagttcctacctcagattaaaatcaggtaacatatgtaaagcagctgacctacagtaagcactcaaatctgtcatcatttctgccagctaataacccattcttatttttccatcccctagagaaacacaacatacagagcactattaaacacttccttctccatatcatgttaagataccagaagatttacctttctgattacgaactgtacagtttctctaaacagaatcaactacataaagctaccctatcgattaacctgccgaaatagctaattttttggaaatactgttatgacatttatactttcaaaatggtccgactgcctttcttaccatcaagccgcctactaatctgctcctttgccactctattaggccagcattttctcactgttccagccactgaagttctttcatttttctccccagtactagaaccaacattcttcaaatccggattttccatctgttcagcaatactttcaacattcctagaagtttgtacttcctgtggtttttcttccatacaaccttttgattcagacacatctaaatcatcattactcttagctgcttggtctaaaagtgtgacaatcactgaagaatctggtggtgaagttctttctggtgaacttgagtcttctgaaacatgaagaggtgtgggtggcaactctgacaaataagccaattctttttgtgttcgtggaggtttttcagtaatttctgaaagctttacagggttacagcaaagtttggcatattcaccacctaacctatgacacaattcattaattatgacatcacagtctccaagaagctctacatcaaaatgcagatgaggcaaaggttctctattaattaatatctgaggcacttcatggggtatggaacctaaaatagggtgaaaaataagagttagaaaaagggaggaggaagtaagctaataaaaccacaacagatacattatgcaaaaatccaacaagggcttgagctccaaattcccaaaaaagacccatgcactaaatacttaaccaagccattacatttcatcaagcaagcagatgggcagttaagtgtcttttataaaacgctcaagttctgctcctatcacctggttacccctgagcaatcttcccagactttcccactctgaacctcaaatttccttgtctgcagaatggggatgataatagtacttctccacaagactgtggtgaggattaaatgagttagtcaagtgcacagaagagttcttggtacataaatgttctacttaagtagctcctgatataaagaaggtgagctgggtacagtggctcacgcctgtaatcccagcactttgggaggccgaggcaggcggatcacctgaggtcaggagttcaagaccaacccgaccaacatggtgaaaccccatctctactaaaaacacaaaattagccgggcgtgtggtagcgcatgcctctaatcccaactacttgggaggagaactgcttgaacacgggagactgcagtgagccgagatcatgccattgcactccagcctgggcaatgagggagggagggaggataggagggagggagggagggtgggaggaaggaaggacggacagatgaacggaaggaaggacagacagaaggatggacgaaggaaggaaggaagaacggacgggaaggatggacagaaggaaggactaacagaaggaaggatgaatggaaggaaggacaaacggaagggagggagggaggggagggggggagggaaaaagtcatataaacatattctacgctattataaacctgtttctttttttaattatctttgcaacacatcatactatcccacagaaagcttttgaaagaaaagtttttaaggaccaggcatggtagctcatgcctgtaatcctaatgctttgagaggcagaggaggaaggatcacttgaggccaggagtttgtgaccagcctgggcaacaaagtgaatcccgtttctacaaaaaaaaatttaaaaatttgccaagcatggtgtgcgcctctggtcctaactactcaggaagctgaagtggaaggactgcttgtccccaggagttgaaggctgcagtgagctgaaactgcaccactgcactctagcctgagctacagcaagacacccgtctctaaaaaataaaaagaaaagcttttaagcagagtgcctttgattttgctttaagaagagcaactcaagaacaaagagatttgtatattaaattttcatgtttcatttaattgcaaattgtcttgtattctactttaacagaatttcacagctaattaggtaagactgagttaactgctaaagccacgagatatgggatagacacaaaattgaagagcttgactccatgtttcttccaactgtttactctggctgccttgactgctgatgtggggtctaattcaattctctggctagggatttaatatttttcctctcctctttccctcacttatgaaaggacacatctgatgcaactgaaatctctctctctcctcctctgattctaaactagaggaggaaacagacagtatgagaatatatatgacaaagaaattttcctgagagtaataaggatttaaattttatgtgaacacttttatatacacacccttttgggtaaactatatcgacatatcaccgttatggcatggctgttactacaagaatgaaccaatcattctgagcccccaaattccatcttacatggtatgttacacttctaccaaactatacatttgaatttattaaatgtgaaatcaattaaatttgaaagatcaaaactgtaatcaaaaaatataaggataaaggaccatttcataaattaattgatgctaacccttgcaacattaaaaacacattccaccaaaaagtctaagttgaactctacctttgtcttaatttttcacataaattagaagtagagtttagcattacttctgggtttgtttttgattttttgagacagagtcccactctgtcacccaggctggagtgcagtggcacattctcggctcattgcaacctctgcctcctgagttcaagcgattctcatgccccaacctcccaagtagctgggactacatgtgcacaccactatgcccagctaatttttgtatttttagtagagacagggtttcaccatgttggccaggctggtctcaaactgctgccctcaagcgatccacctacctcggcctcccaaagtgctgagattacaggcacgagccaccaacattacttgcgttttgacaaccctccaccccccatcaaaatgtcagattcaccagtctcaatgaacaatgccacctaaaaaaacagttcagccagatgtggaggctcgtgcctgtaatcctagctactcaaggggctgaggcaggaggatcacttgagcccaggagttcgaatccagcctgggcaacacaacaagacctcatctctactaaaaataaagaatttctggccaggcatgggggctcatgcctgtaatcccagcactttagaaggcagagacaggcggatcacctgagctgaggagttcgagaccagcctggccaacatggtgaaacccggtctatactaaaaatacaaaaactagccaggcatgttggtggacgcctgtgatcccagctactcagaaggctgaggcagaagaatcgcttgaacccgggaggcggaggttgcagtgagccaagatatgcgactgcactccagcctgggcaacaagagggaaactccatctcaataaacaaacaaacaaacaatttctaaaattagctcttcaccactctttcaaacagaagcagagttaagattactagcgtctattatacagacccacaacccatgacattatatatagaaatgttctccaaaaaccatcaccaacttacttggaattagtgctactggtcttactttgagggaagacccaataacaatgaggaggtcaacttcatctttgtcatacttcatggctctatgaaactgttctggtaaattttcaccaaaaaacacaatctctggtttcatgatagcaagcggttcatcagctgggcacctaggacatcgaggaactacctacatattttcagattttggttgaggtagagaagcaaagagtaagcccaagttagaaatagtcaacatttccatacctctaagaatacatttcagaattattaaaaaaaaaacaaaacagaaaagctatggataaacagcaactgtcaatgatgggtagtttattaacatactatgaaacaatgaaatactatgctcttgttataatatctatgtagaaaaacacttgacattgaagagtccatcatatattaagaggaaaaacataatgtgtgtatatacactaaatgggaattgatcctttcaaaaaaaaatagacatttgtcaaataaaatgattccattttatttatttgagatggagtcttgttctgttgcccagcctggagtgaagtggcatgatctcagctcactacaacctccacctcccgagttcaaataattctcctgcctcagcctcccaagcagctgagattaaaggcatatgccaccatgccaggctaatttttgtatttttaagagagacggggttttgccatgttggccaggctggtctcacttctgacctcaaatgatcgacccacctcgtcctcccaaagtgctgggattacaagcatgagccactgcacccgaccaatgactccattttaatatactattcttcctctttcgtaatgacatgattacctccatatattgctaagcacacaggacatatttctggataatttttattttctgccaaattttcctatattttttggcaatgaacatgtatgaaataattttagattaccataactaatttaaggtccaaatctgacaggcacaaaaagggagaggaaggagaaaaactactacaacaacaacttgcttatgatctgacattttatgttcggcttagatactaagaagccaatttcataatttgaagagcctttatagggctgttttctatataaggtattgaaaggttctcgtgtattttaccaaaattcccaaatgctaactattttcttcctgaatctttctgtaccatatatactttaaaggggtaaaaaaggattttgaggcaaaagaagaaatacttcagagacatgaacaattcctaaaatatgggcaacaaattacctgattaaaaatatctcctcgtacagcttcacagtcaactttgtatttacaaatcaggcaagatgctgttgcaaaggaacctaaaaacaaacaacatatatatgctttattaaagaagtatttctgtttcttgaacacaccacaaacgttataaagtttaacatcacaaatgttaagagggtttaaggatttttgtttttgtttttaactttgattttaaacctcagaacacactgcagattttgtgatatactacaggagaatctaggggatgaagaatttatatatttatacatagaatgaatatgattctcaatctctgagacactaatataatgatgccttctaaagctactcttttcaacaaaactgtaacagctcactcctccagggctaaaatcctgcagagttggacagttccaactctattaccttagctcggcagttcttagaaacactttagatacctaatggcctgttgatacttgttttaaacatttctgaatctctgaatcctgtacatctcaactatccagttcttttagtttcataaactaaagatgtcacatttcttcattaacagctaatactactcttgtattcagaatttctttttcttttttttttttttttttgacagagtctcactgtctcccaggctggagcgcaatggtgcaatcttggctcgctgcaacctccaactcccaggttcaagtgattctcgtgcctcagcctcctgagtagctgggattacaggcgcctgccaccatgcccggctaattttagtatttctagtagagttgggatttcaccatgttggccaagctgttctcgaactcttggcttcatgggatctgcccgcctcggcttcccaaagtgctaggattacaggcgtgagccactgcactcagccagaaaagattatttaaaataattgaatgcatgcaactgcagcatcttttgaaatcaaaagcaaattaatatctgaggttttctataattaactgtcaaggccaatacttctgtttttattatttttgttttctacttttctgaggttatcgataaatgagataacatgattaaataatgctttatctccacttctcgatggcagtcagctttataggaaatatcttcctataaaactaaaataaattacagaaaaccactctgaagtttactaaccatgacactgaattatcctttggattcccgcaacctgttccagcgtgtctatgttctgggtatagttgcgaagtagttttccttccttatctgacaaggctatgaatttgtgacagagagatggctggaattgtccaggatatatttcctgtatcaagcaaatggtagaaaaaatttacattagtgaaataaactacagatgtcatatgtttaacaaaaaaatactgataatcccacacacataattttaaaaatgaaatagatgagcattttaaagtatctagatggatgcgacacacacctacaaaaggacggttgctgtcatatgcataaaactcagcaattagtgaacttggccccttgaagaaaaagacaaagtcggcccataaacatctctaagaaatgttgatattttaataaaagtcagaagtaatacaaccttaggatatctaatttttgttggctgcaaattcagatttttttctttaaagaaaaatgggaaagtttaaactaaaattacagatatcaaggtagggtgatttaaaaaaaaaagcactgtcaatacaagaatatttaaaatttttttttgatttatcattcattagaatatcaacctgctggaagtttaaagctaaagttttaatccttaccaaaattgttttccttccactgcacaggcacatactggtatagtatagagttgctcatgaatgctgagttgctggattttgtgtgtgtgtttttccccccaaataatgcttcaatgctgtttcttctttaaaaacaaagaattcagatatacacatggcaaaaagatcagagaaaaagtatcaattttggtcctcccaacttttgacagtgtttttattaaattccatttagtaagtgactatggcaaaggaagtttattctctactttttccttcaaagtagtagtgctatcatctacttacttccttaccattcattacaggctctaatctatcacaatgctagcaaaaaactagacacaaccatatgtccatcaatagggaaccggttgtataaatatggtacatccataatagtggaatatgtagccattaaaaagaattgagggagatctagatgaactgccctggaaaatggttcatgacatacgtgaaaaaagcaaattagtcaccagtatgtgtaacttttgtttttgttactaagcaaaaattgaaattatatgcatatgtatatagagatgtccatttaatcaatcaagtcaggaaggatacaaacaggctgtaagcagatgtggggaactttcacttctgacattatacaaaaaagtttaatagagattaaagatgactttttacctatttaatctttcaaattaaaaaaaaattcccactgcaacttctaggttctactacccaggcttctaagtaaaacttaagtgaattccgttaacagctatcacatacatgtacacatgctgctaaaaacctcgtataaagaatccaaaaacgttgccttagattcaaatatttatcacaaatttcatgaataactctttgcaatttaagaaatagagagtgcatatagtagcaagggaaaagcttaataaagtcaatgtttacagaaaatcaaaagccactgttttggaaaagtgagttcagttaaatcaaccactgttttcttccccagaatgctttgttctagtacatttacatttgagagattaagcattgtatgtctcattaaagctccctctggaaatagcttttagagtattttaggcactatgagaatatgctaggcaacagataaaataggacctataatagtaagcaagtgataatagcatgccaaatgcagaatttaaaaaataaaataactccaaagcaaggtcagggaaaaagagcaagtaccaagactccaccgtccctgaattaactgtgtgccttatccacgtccacccccaccctttctaaagggtagagtaagaaacacaaagatgtatgggacactagatttagctcttattaattcaactacctttaagacaaatcataagggacatttttgttttattttataagcctgcttttttttttttttttgagacagagtttcgctctttttgcccaggctggagtgcaatggcgcgatctcagctcaccacaacctccacctcccgggttcaagtgattctcctgcctcagcttcctgaatagctgggattacaggcatgtgccaccaccccagctaattttgtatttttagtagagacggggtttctccatgttggtcaggctggtcttgaactcctgacctcaggtgatccgcccaccttggtctcacaaagtgctgggattacaggcgtgagccactgcacccggccaagcgtacgttttacatatgtgagaatctgaatgatttgagtctttgactcatactttctgtcaagtatgaaatgggccatgtctgaattattagatttaaatatagtgttcaaactaaagtagtagtacaggtgtggtggctcacacctctaatcccagcactttggaaggccgaggcgggcaggttacttgagaccaggagtacgagaccagcctgggcaacatggagaaaccctgactctacaaaaaacacaaaaatcacaaaaattagctgggcctcacggttcatgcctgtagtcccagaaactcagaaggctgaggtgggaggatcacctgagcccagggaggtagaggttccagtgagctatgatcgtatcactgctctccagcctgggtgacagagtgagagcctttaaaaaaaaaaaaaaaaaaaacaaacaaaaaaaactaaaaaatctgaaataatgaaaaaaattactctggaaggactgttctaatataccactcctcctaagataggaccacttgttgaaaaccaatgactggagatacaacttacagatagaatatggattaactcttccatggtgaaagtgtgacatgcttagtcctattccaaacaagacaggccacccagtttgaatatcctaaagcctttttaagcaaccaatcatgagggctgggccattctgttgctgccatagggatccttatagaccaagagtggaagcagaactggaatcaaaggctcaaaacactattaaaacaaaccctgctttcacatagctgtgtctggaaacatgcaaataatccaggaattggccataggcaaccaacgtggtcaaaactaaagcttagaactatccgcagaaattggccggatgtggtggctcatgcctgtaatcccagcactttgggtggccgaggtcggcggatcacaaggtcagaagatcgagaccatcctggctaagatggtgaaaccccgtctctactaaaaaatacaaaaaaaaattagctgggcatggtggcgggtgcctgtagtcccactactcgggaggctaaggcaggagaatggcgtgaacccaggaggtggagcttgtagtgagcctagatcacaccactgcactccagcctgggtgacaaagaaagactccatctcaaaaaaaaaaagaactatctgcagaaataatggcttttctgcagagattatgcctttctttcttctccaaatttctagcaatatgaataaaagaccctagagtaaaaggcataggtgtaaatgcagtccctcaagactaagaaagctgggcatggtggcacaggcctgtagttcctgctactggggagacagaggagggagaatcacttgagtctgggagttagggagctgtagtactctatgatcgtgccaatggatgggcactacactccagcccgcacaacataacaaaattcacacccacctttttttttgagagtctcgctctgtcacccaggatggagtgcaatggcacaatctcggctcactgcaacctccacctctcctgggtttaggcaattctcccacctcagcctcccaaggagctgggactacaggtgcgcgccaccacattcagctaatttgtttttagtagagacagggtttcaccatgttggccaggctggtctcaaactccagacctcaggtgatccacctgccttggcctcccaaagtgcttaggattacaggtgtgagccactgtgcccagccaaaattccctctttaaaaatcagaatttttagagaattcatcaaaatttactgatgttaatctttgctgatatccaccccctcctatatatagttcagatggaggcagttaagtagagttgctgagaaaatagaacctaaactttccttcctgtcaaaaaaagtgaaatgcatcaatcctgctaaggagagtcctcataatccctcctgtctctttcattccacaaaaccacacttgaataaactgctcaacatcttaatcaatactaataaattggtcatatgacaaattcaactgtatttcaatatataaatagtatggctatgttctaataaaagtttgtatttatgaacactgacatgaaaattttatataatgttcaagtgtcatgaaacagttctttcaattttttccccagtcatttaaaattaattattagcagggggtggaggtgggattgggaagacgctgggaagaataagttcaggagatctattgctgactataattaagaacatattgtagccgggcgcggtggctcacgcctgtaatcccagcactttgggaggctgaggcaggcggatcacctgaggtcaggagtttgagaccagcctggccaacatggtgaaaccctgtctttactaaaaatacaataactagccgggcgtggagacaggcgcctgtaatcccagctacttgggaggctgaggcaggagaatcgcttgtacctgggaggcggaggttgcagtgagccaagatagcgccactgcactccagcctggggacaagagcgagacttcgtctcaaaacaaaaacaaaaacaaaaacaaatattgtatacctgaaaattattaagagtacattttaaatgttctcaccaccaaaaaaaagtatgtgaagtaatgaatattagcttgagttagccattccataatgtacacacatcaaaacatcatgttgtacaccacataaactttatttgttgatttaagtaataaattaatgcttaatgcttagctcacagcctatacaaaaacatggagtgggccacatttggactgaggccatagtacgccaacccctgtattaacctaacacaagagaatgtcaattagttaaactgccagtcgccacttaataaattttagtatgtaccacgtataacataagcacttttaatttcctctttattatgctacagacaaggctgaagactgggttttttaatttgttcaaggctgtaaagaaaacaaagaacatatgacagagaccctatgcagtctgcaaagcatactacatatttactaccaggccctaccttactacagaaagtttgctgatccagctgtgaacatataccccgatgcagatgaaaacaaatacaaaacaaacctaacttgccattttggtcacaagagcaagtaagtagcagagccctgttttgatatgaaaatccagcactggactgggcaacatggcgagaccccatctctaccaaaaatacaaaaaaaaatagccgggcatggtggtgcacatctgtggtcacagctagtcaggaggctaaggtgggaggatcgcttgaggccagggaacagaggttgcagtccagcctgggtgtcagagcaagactatctcaaaaaaaaaagaaaacctaaaaaccctagcatttaaacctctatgcagtatttactgtcttcaatttctgatccttcaccctcaagttttctatttttcttttaggataagcaccatttctattacatattacgaaccaaatgactaagactagtaagtacatttcagtttgctcaccttcatgggactactaaaggctggaatcccaataagcctaactcttcaagaatatataatgtacacgtacaactattatatatccataaaaataaaatttgaaaggtaaatcaaaagaaaagaacataatattcccagaagtcactgtgaaaaagcacccaaatggagaaaaatggctaaaaacaaagaggtaattcaaggatatacaaacggccagtagtaaccagcagtcatccacgctaataaaaacagaacaggcctaacctgatagttaacgcctacaatcccagcactttgagtagctgaggcagcagaatcactcgagctcaggagtttgagaccagcctgggcaacatagcaagactgtccatataaaaaaaacaaagaaacagcagggcatggtggtgcacacctgtagtactagctacttgggaggctgagacaggagaatcatttgagcccaagagttggaggctgcagtgagctgtaagatcacactactacactccagcttggataacagaaggagaccccgtctcaaacaataagatgttgagccaagcgcggcggctcacacctataaacccagcactttgggaggccaaggtgggcggatcacctgaggttaggagttcaagaccagcctggcaaacatggtgaaacccccatctctactaaaaatacaaattagctgggcgtggtggcacacacctgtaatctcagctacctgggaggctgaagcgggagaatcacttgaacccgggaggcagaggttgcagtgagccaagatggcaccactgcactccaacttgagcgacagaatgcgactctgtctcaaaaaataaataaataaataaaaaataaagctgggtgctgctttatttttataattttatttaaaattgtatttatttttgagatagagtctcgctctgttgcccaggctggagtacagcagcatattattggctcactgcaatctccgcctcccgagttcaagcgattctcctccctcagccttccgaacagctgggactacaggcgcttgccaccacggccggctaattttttgtatttttagtagagaagggtttcaccatgtttgccaggctggtctcaaactcctacctcaagtgatccacccgcctcggcctcccaaagtgctgggtttacaggtgtgagccaccgcacctggcctcttttacttactatagtttttaaactgccttaaaaacaaccctagatcaaaaagacaaaaatgcagatacctatcaataggagactcatatactgtgaaacaactttaaaatagaatgctacacagccttctttgaaaaataaggtatatctgttaagtgctgttacgaaattattctcaagaatattatatggtgaaaaaagatagaaaacaaggtgtttttgattctgttggcaatcatttatcaagtattaaaaacttatgctgacatccctcccctatcccaacacaaattttttttccccctgaatgatttccaagagtttcaccatggtaaccattaaggacagatattaggggcagcaaagactgaaggaaggggcaaactatatatagatatatgatttttgaaagatactgcacacgtctgggtatcagagacaggccctgtctcaaatatatatataattatatatatttatataactttttttttaatgctaagaatgtatcctggggtttttgtggattttgggtggatacaggtggcagtggcatgataaatcagccaaatcagctaaatcccaaagtgctcggattacaggcatgagccactgcacccagccctaatagaggattttatttcaacctttccaagctgcaatacgacaaaacatatcaggagacttaaaggcttaaagaagaactttgacatgtttctctgaaattcaaaactgaaattcactttcaggaatttatcctaagaacactggagacataccaaaaaaggacaactgtagcaacactatttgtacatccaaatgtacaaatacagaattacagttcaccacttcataaataaccattaaaaagtattcaagcacctcacagaaagtaagtttattatattaagtagaatatactacaaattgaaagcaaagtaaaacagccaagttttttcttttcagggatgggtcttgctctgtcactcaggctggtgtgcagaggtgaggtcacagctcactgcagcctcaaactctttggttcaagcaatcctcccaccttaccctcctgagttgctgggactacagtcgcaagccactgggcccagcaaaagccaaattttatgctaaaaatgtaacataaatccagctacaatactataaacgtatagatatataatccatatacatgttgagtattaaaacattattttcagatgaatggcactgtgactaccatctattttctttttactgacgttgatttttaataagcttgttctagaactcaaatttttaactattaatacataatctggtatgtttgcatattatcaataaagtaataattttttgaacaaatgtaaaaatacattcttggaattaagttcataaaattcagttcgtgtttctccctctaccttttcttgtattttaatcactagggaaagaacagtgaattcagtatgggacagaaactacactcttcgaacatagtatagtcccttttctttttttttcttttctttttttttttttttgagacagagtctcactctctcgcccaggctggagtgcagtggtgccatctcagctcactgcaacctccgcctcctgggttcaagtgattctcctgcttcagcctcctgagtagctgggattacagcatgcgccaccacatccatctaatttttgtatttttagtagagacagggtttcaccatgttggtcaggctggtctcaaacttttgaccgcccgctgtggcctcccaaagtgctgggattacaggcgtgagccaccacgcccagccgaacaacagtcctacttaaaaaaaaaaaaaaaaaaaaaaagttattttatacatcctaattcagtttcgccttgactctaaatacaaccactcatttttattaacatcagtgaattattttaggtttctgagaaccatgaccacaacttattatcaatttaagtcattatgcaggataagaacacagtgcaggctgggcgaagtggctcacgcctgtaatcccagaactttaggaggccaaggtgggtggatcacctgaggtcaggagttcgagaccagcgtggccaacatgatgaaaccccatctctactaaaaattcaaaaaattggctaggcacagtggctcatgcctgtaataccagcactttgggaggcagaggtgggtgaatcacaaggtcaagagttcgagaccagcctggccaatatggtgaaaccccgtctctactaaaaatacaaaattagccaagcatggtggcgggcacctgtaatcccagctactcagcaggctaaggcagaactgtttgaacctgggaagcagaggttgcagtgagccaagatcccataatcaagtctactcaagaggctaaggcaggagattgcttgaacctgggaggcggaggttgcaagtgagccgagatcacaccatcgcactccagcctgagcaacaagagtgaaacttcatctccaaaaaaaaaaaaacaaaatacagttcagaaatggccccacagctttaaaactggccttaactgttcttgtgtgaaagaatccaaagtggtaccacagctaagcacactgtaacacactggtgctcagagagtaatttcttttttttttgagatggagtctcactctgtcaatcaggctggagtagagtggtgcgatctcggctcactgcaacctccgcctcccaggttcaagtgattctgctgcctcagcctcccgagtagctggaattacaggtgtgcaccaccacgtctggctattttttgtattcttagtagagacagggttttgccaagttggccagggccagtcacctgggcttaagtgatctgccagcctcagccttccaaagggctgggattaaagttgtgagccacctcagttagcctcaatgagcaattttgcaaggaacattttgaagacattttttattgtcaggacttggggtggggatacaaacgtaggtggagaccagcgaattttttttttttttttttttttttttgagacagattcttgctttgtcacccaggctggagtacagcagcgcgatctcagctcacggcaaactcagcctcctgagttcaagtgattctcatgtgtgtcaccacacccggctaatttttgtatttttagtagagacagggtttcaccatgttggctggtctcttctgaactcccagcctcaagtgatccgcccacctcagcctcccaaagtgctgggattacaggtgtgagccgctgcacctggccggccagggacattgccaaacatcctacaacgcacaggaaagttccccatagcaaataaatatcagcccaaggccgggtgcagtggcctatgcctacaatcccgacactctgtaaggctaagcaggagaattgctggaacccaggatttcaagaccagcctggacaacatagtgagaacttgactctacaaagaaaaaagaaagtcaaaaacacatttagctaggtatatggtacgtgcctatggtctcagctactcaggaggctcaggcaggagcctcctgttcaaggagcccaggagttcaaggctgcaacgagctgtgatggctcgacagagtgaaactatctcagaaacaaaaagaaaaatccagcccaaaatgtcaatagtgccaaatttaagaaactgctctaacagagcaataacttccttaacacacctctccattacttgaaatttccagtctaaatgaaatttaagggctgggcgtgggagactcacgcctgtaatcccagcactttggcctaggcgggcggatcacctgaggtcaggagttcgagaccagcctgaccaacatggtgaaatcccgtctctactaaaattagaaaaattagctgggcgtggtgatgggcacctgtaatcccagctactcagtagactgaggcagcagaattgcttgaactcgggaggtgaaggttgtagtgagccgagatctcaccacggcactccagcctgggtgacaagagcaaaactgtctcaaaaaaaaaaaacaaaaaaaaaaaaaacaagttaattctcaataatcacatacaatcaatgatataatagatggtatagaaattctttccaaaaaaaaaagaaagtctctctttccttctgaagtatctaaatttcaccaatatttccttttcatggcttcatttttaatgttttctcataagtagcaaaaatcataaaccactttagtgaactttctgcctagtacactgactcacagaaaagcttaggttatcctatgaatattctattcttgtaatatttagaaattcagtaaaatatcgacaatatttacataccctccccatcctccgtgtcaggatactatcctgcactctttgtccttacttatttctccttaagcgctttcggctcactgcaacctccacctcctggcttcaagcaattctccccgtctcagcctcctgcgtagctgggacgacaggcgcccgccacccaagcctggctgatttttgtattttttattagagacggggtattgctgtgttggccaggctggtcttgaactcctgacctcaggtgatccacccacctcggcctcccaaagtgctgggattacaggtgtgagccactgtgcccagactggaagctttctttttttagtcagttcccaatgtgagaattaaaggatggacaaagaattatatgtgagtaacaactgtaaagcctagctgatttaaccattaccataaatgaaaactcagaaaagcaaaattaaatttatcagctggacattgtggctcacacctgtaatcccaacactttgggaggctgaaacgggcggatcacgaggtcacgacgagacacgtccttgccaacatggtgaaaccccgtctctactaaaagtgctgatcgtgatggcacgtgcctgtagtcccagctacttgggaggctgaggcaagagaattgcttgaacccgggaggtggaggatgcagtgagccgagatcgcgccaatgcactacagcctggcaacagagcaagactccatctcaaaaaataataataataaataaatttatataaacaggattagaagaggctacaccttataagtgactgaattttttttcagtttaacaataaaaaatgtattctccataactagtgagtcaagttttttgtagttgatttaagatcaaagtaacttctagttacttgctggtcttctgatagtgtcaatgtctgcgctacgtggagattttataaatgccagtgtcctagctccaattcaagaaacctttaagtcatacttcactggtcttcaaaaccatgcagtagtgccactagcaggagtaggttaaaacagtaaatcttcactaatccataattaacaaaaaataactttacattatttatttaatccaggtatgaaccagttgtctgctctaaaagctagatatagatgaccatcatcattacggatatatgaagtaaaaagttcaaattatataagttttaagttaaaaattctcttgatagcctgaaaacttttcaaattcagtttagtaatcatattcaagaattaatataattttcccactttacactaatgcccatttaatataccacaacctggataaaacaaaagttacatggggtggaggggtgtagtgattagggtctcactgtgttgcgcaggctggtctcaaactccggagttcaagagatcttcctatctcagcttcccaaagcactgggattataggcacgagctactgcatccaaaaaatcactttttttttaaagacagtcgccaatttaagtaacataatttattctgaattagcaaagcttctcctgtagtcatgtaaatataccacatggtctgaaagtagataaggccactgtttagttaaaatttaggttcatcggcagggcgcggggcgcggtgcctcgcacctgtaatcccagcactttgggaggctgagatgggcggaccacaaggtcaggagttcaagaccaacctggccaacatagtgaatccccgtctctaccaaaaatacaaaaattagccaggcatggcagcacgcgcctgtagtcccaacaactcggaaggctgaggcaggagaatctcttgaactcgggaagtggaggttgtatggtgagcagagatcacaccactacactccagcctgggaaacagagccagactccgtctccaaaaaaaaaaaaaaaaaagctaggttcattaacttctggattcattaaagaagtccctattcacaacttctaacgattaggtggggaaaaagccactaatacaagactccttcgctggaagccatcatcctcagcaaactaacacaagaacagaaaaccaaacaccacatgtcctcactcataagtgagagttgaacaataagaacacatggacacagggtggggaacaccacacacagaggcctgtcaggaggtggggggcaaggggtggaaaagcattaggacaaatacctaatgaatgtggggcttacaacctagatgacaggttgatagatgcagcaaaccaccatggcacatgtatacctatgttaacaaatctgcgcattctgcacatgtatcccggcacttaaagtaaaataaaataaaatgactctttcaaatatatatacctccaagtttaacaataacaaattttgtaatttctttccaaaagactgaaatacaggaaagaaaacagttttctaatgactcaatctcttgagaatggtgtaatgcattattaaactttctatgctaaagcagagctgtacaataggtacataatgtgagacatacatataactttaaattgtttagtaaccacattaaggtgaaaactggccaggcgcggtggctcacgcctataatcccagagccttgggaggccgaggagggtggatcacctgaagtcaggagttcaacaccagcctggccaacctggtgaaaccctgtctctactaaaaatacagaaattagctgggcatggtagcgggcgcctgtaatcccagctactcaggatgctgaggcaggagaatcacttgaacctgggaggcagaggttgctatgagccaagatcatgccattgcactccagcctgggggacaaaggaagactacttctcaaaaaaagaaaaaaaaaaaaagtaaacttcaaaaaacatacatatattttggaaacactcttgctctgttgcccagggtggagtgcaatggcagatcatggttcactcagtcttgagctcctgagctcaagggatcttcccacctcagactactgagtggatgggtctacaggtgcacaccaccatgctcagcaaattttattatttattttgtagagatggagtctcattatgttgctcaggctggtctcaaactcctgggctcaactgatcctcccaccttggcctcccaaagtgctgaaattacaggcatgaggcaacacgcacagcccaaaatacattttatttaacccaatatcaaaagtatttcaaaagaattcaaaattaattttaagtattttttccatataaaaaccaatatttgtttaatatttgatgaataaaactaatgaaatactttgtattttccatactggatctctaaaatccaatatgtcttctacacttattgcacatatcaatacatttcaagtactcaacagccacatgtggctagtggcttctgaactggacggtgcaactctagagcagaataatgatcctctgcaatttgctgacaaaaatgcaacccaagaatcttcccattctctaattacaaatgatttttcaggcacatccttatgttaaaacttgactacgaaacaccaaagtgatgttataacctttacaatctctaataaaatattaaaaatcacaagttatgttacttttatatggtgtgcaaacctcttaaaaaagcccaggcagaataacgaccatcgctgcagtgcaaattttaaaaatatgaactatctctttgaaaataagctcactcctaaaatgaagtagataatagtcctcctctaggaataaaggaattctagccataatgagtgatcttactccgccacagtagcagcattcactttactaaacaatgaacgataaccttaaggtggctgtatgtgaacaaaatactttttcatgagagaaggccaaagaaacaaccagaagagttcatagtacctttgcaaacttgaagaatggtcttggatcttttctgaaatattcaatatcaaacatcgcttgaggatctggaagatctgggaagtctacagcaaggcgagcataaataccatcccttgacctgaagtcaggtattccacatgaaacagacacctaaaatgtgcatggcataatttgtaaaattaaatcttctacctttataggaactagctagctctcttaccatataattaggtaagagttgagaaagaaaattttagtctgaaacttcttttaagaaataaaaatacaaccctacccttatttcagaaataaaactcccaaataactgagtaaaattaaacatacctcatattccatctttaacacagataaggaatttttaagtcaggccaattttaagccttttaagcatttagccaacaaattaaagcaaatgcaacttgagaagaaaataaaccatttcaacaaattattttaagtagggaagaattttttctttttttttttgttttttttttttttgagacagagtctcacactgtcgcccagtctggagtgcagtggtgcgatctcggctcactgtaagctccgcctcctgggttcacaccattctcctgccttagcctactgattagctgggaatgcaggtgcctgccaccgcgaccggctgattttttgtatttttagtagagacggggtgtcaccatgttagccaagatggtctcgatctcctaacctcgtgatccgcaggcctcagcctcccaaagtgctgggattacaggtgtgagccaccgcgcccggctttttgttttttttctttttagacagtttcgctctgacgcccaggctggagtgcagtggtgccatcatggctcattatggccttaacctttccggctcaagcaatcctcccacctcaacctccttagcagctgggactacaagtacgcaccagcacaccaggctaattttttgtagagtcagggtctatgttgctcagggtgatctcaaactccagggctcaagtgatcctcccactttagcctcccaaagtgctggaattacatgcatgagccactccaccagccaagaatttctattacagagaagtaattccaaagaaattgctcctttagttaggattctattacctcaatactacaacaattctctattttcattaaaaaaaacaatgtatagccaggcacggtggatcacgcctgtaatcctggcactttgggaggccaaggcaggcggatcacaaggtcaggagtttcagaccagcctggccaatatggtgaaaccccatctctactaaaaatacaaaaattagccaggtgtggtggtgtgcgcctgtaatcccagctactcaggaggctgaggcaagagaattgcttgaacccaggaggcagaggttgcagtgagccaagatcctgccactgcactccagcctaggcaacagagcaagactcaggccaggagaggctgagactgcagtgagccatgatgacaccactgcactccagccagggcaacacagcaagaccctgtatccaaaaaaaagaaaaaaaaaaaaggtgtataatatttcaattcttcatttctttgagacgtgcccactaatcgtacaaaaaaatcctgacatttcaaatagagatttcagaagttattgtttcatcatcttaccagagttgactccaatttgacctggagtcaaggtcaatttaagttaaacaaacttgtctacatcgttatctgtgagcaaaacatactcctgatgatcatctaagattatgtaacaccctttcgcaactcgaaatggcagaaaacaggacaaaattttactacagcagttgctctggttgctaacatgtaatatactctgtataaaacacacactatgcaatagtcttaggtaactaattagctgcaaccctaaggtagatcaaatagaaaatgtcaagtcgccacaatcacatcatcttaattaatatggagggaaggtaggaatctgttactcttcccaacactaagcttttcacttgtgaataccaattaggtttccagtttctcataaagatctaacaaatacccaatttctccatcagactgacatcccttaacaaaagcagagtttcaattccctgcatctcctttaggagctatgatataatgtaggtagaaatcttgccttaactccatttacccactgtgctataaataagcagaagcaaatatttttttaaggctggagaggttttaaaaatctgaactaatttagcaactgctgctgcactcagtttttggcagttcccaaacatccattatcatgtaaggataaatccttctaaaccagaaaaatgtttcctacttggaaaaggcataagaaaatacatatacgacctccccatgtactagtcttacataccccagctccagttagaactataatttttttgcactcttgcagtaatttcacagcatcttcaattgtattaatatcttttctttttttcctttttggtggttctgaaaggatattaataacaatctgccacagtgtcatatcatccaactcaggtggaggtattgtttccggcaataaatctttaagaattgttcgaggatctgtgccaatcataagatgttgctgaacaaaagtatatggacctacaataagggggaaaaggcttaaagtcaacttatcaagtaattcaaaatctcatttattttctgaagtaatgagttagcattctgtgagggttttttgcaaagtaagaaaatgcaatttaatggtatttcattctcggtacactcagaattaatgctatatcccaatgagattaggaagatctaatgaagagttgggaagacccccttcagctgtaagtatatatttcaagagtctaattaattaacaaccagaattaagttcttatggttaatatctagaaacacacaccataataccaaaagtatttacaaaagggttctacgacatagaaaaatcgtaccagtcctaaaagcctgtactacttatcattaaaaccacacaggaaaaagaaatgaaaatctatacataactgccatcttaatttttttccggtaatttttcaatttgatcttaacccatcttccaagataatacatacaatgttgatgttctgagaactaatcattttcttttaccctgagattgctcaaaccagctccctaggcttgagaaaacaaaaataaataaataaataaattacagacaccaaagagaaactgatcttcactatgtttaaataatcaagccatttgtaagagtgagaacacaaaaagatccactttcaagatggttatacctttggtataaaaaactgataatgctttctacatcgaaatactttcccatttcattcacatatttattaaatatttattgagcacaaactatgtgccaggcacttttttaggcactgaaaagacaggagtatacaagtcagtcaaaaattcctgctcccgtagaacttatattctagaccaggaaacaacacaatttaaaaagtaagatacagagcttttcaagaagtggtaagtgtacaataaagtgaaaaaacaaggaatatgaagtgagggaggaagatattctaaccggatgaagaacactacacaaaaaggggacaagtgaggtggggcaaggtggcacatgcctgtaatcccagcactttgggaggcccaggcggacggatcacctgaggtcgggagttcaagaccagcctgaccaacatggagaaaccccgtctctactaaaaattcaaaattagccgggcgtagtggcatatgcatgtaatcccagctgctggggaggctgaggcaggagaatcgcttgaacctggaaggcggagggtacggtgagccgagatcgcgccattgcactccagcctccgcaacaagagcgaaactctgtctcaaaacaaacaaaccaaaaaccgtacatttactctctaaaattaacagctctgagccatacctatccgtggccttggagtccagtcactagagcttgcatgtgaggctctatcctcctcatcactttcacaggaatgaaaaccattagtgataatttcatcaccgaacagaaggttatctgcaaaagaaaccaagtcagtcaaggctatcaaaacaacatgcacctaaaatgtatgaacggttatagagcaatcattttcatcgagtacagcatttaacatttacacggcgtgtgtaaagcatgcctatggggtcagcttgcactgttcattggaacagtttcttcatctttaggaattctgctcactcagtttcagccaaaatctaaaaataaattaagtctacttaaaaaacagaaaagatagccgggagcggtggctcacgcctctaattccagagctttgggaggccgaggcaggcggatcacctgaggttgagaattcgagaccagcctgaccaacatggagaaatctcgtctctactaataatacaaaaattagccgggcatggtggcgcatgcctgtaatcccaactactcaggaggctgaggcacgagaatggcttgaacccgggaagcggaggttgcggtgagccgagatcacgccattgcactccagcttgggtaacaagagcgaaactccaccttttaaaaaaaaagaaaaggaaaaaaaaaaagaaaagataataatctagctagaatgtatcatacaatcacaaacaatagcgttcgtgaaacgtgtaataaatggacatttacataaaaacgtcattcaaatataaccttggcaatgcgcacgttaaacttacacaatactacaagtacctctgcattgtttcctctattaaataaacagtattaataacacaattattattaggtaaataataaattagtactcaactgtgttgcttgaaatcagggtctctttactaaatcagtccctaaaaacacatattacttttttttttttttttttttgagacggggtctcactctgttgcccaccctggagtgcagtggcaggatcacagctcactgcaacctcgaactctagtacctgggactaaaggtgtgcgacaccacgtcccgctttttttacttttagtagagaggaggtctcgctatgttgcccaggctggcctgaaactcctaggctcaagagatcctcccgctttggcctcccaaagtgctaggattacacgaaagagccaccgcgcccggcctgacccaaatattgataaagatgaacacctatcaaggatagaaactcctcagatcaaaaataagaaacctgaccgggcgcggtggctcacgcctgtaatcccagcactttgggcggccgaggcggacggatcacgaagtcaagaaatcaagaccatcctggccaacatggtgaaaccccgtctctgctaaaaacacaaaaattagctgggcgtggtggcgggtgtctgtagtcccagctactcggcaggctgaaggagaatcggttgaacgcgggaggcggaggttgcactgagccgagatcgcgccactgcactccagcctagcgacagagcgagactccgtctcaaaaaaaaaaaaaaaaaaaaaaagaaaccttcaagaacatgacaactgcaacatatctgcttcattatgctagaagtgttaagtttgtgtctcaatactacatacatacaaaaaaagcatgtttagcccaaacaccattaccgcacaagagcaagattagaataaaagtaatatgaacagctctaaaagtactctctctcccatacccactcctaactgcattacagaatggtaatgtcttcaggaacagccacgttctttaaattttgcaagctgtgactatagaaacagctttcctctttcaaaaattgtaatttcagtcataaaaatatagaccaaaaaaagcaaactgcacaggtgtcaagtttgcaaaaagcaattgaaaacgcagaccaacgggacagccaaaaagttgcagacttaagtgtgctggggggtagaggagaaaagcaatgaaaataaaaaataaagaaaaagaaaaaaaaagctctaacaaaagcaatatgctaaaagagtaagagggggagagaaacttattttaaagcgactgcgagagtctcccgacctggctgctgcggaaagaacaaggccgcccaggcgggccacggacggaggaaaagagcgaatccactggcagctcgcgcagtaggaaccgcagccccggaggagcgcggctgaacggagggccggggtggggaggggaacgccgcggagcctgccccgagcccccagccgccctcaacctcaggccagtaggagcccggggagagggaggaggagatgcgcagttccggccgcccgcaccctgcgcacctcggtacccaatcgccgccgccgccgcctcttcctcctcctcgccctcgtcgtcgtcgtcttcgtcgtacaagttgtcggccagcggtggctcccgagatgggccctgcaggcccggcccattgtctccttccccagccgccgcagtcgcctgggcctcttgctccccgcctgccgccgccgcctctgcctccgcctcccgccacagcgccgccgccgccgcacccgggcagcccctggccgccgccggcacctcacgctctggggccgccccaccgggctcgcccgggctccgctcgaggccgggaccatctctccgcggcctcttgcggagcggctccccggcgggggacgacgcggcctccctgtcggcccccgccgccgagggggagccgccgggctgaagggcgagggccgcctcgtccgccatcttccaactgcctctctggccctcctccctcgcctcctctgctcccgctcgacgcgcggcactggcgcccccgcggctccggctgcgggagatttaaaccccatcacgtgacccgccccatcgccgcccccgccctctcggcgctcccgccacccacgcgggccagaccacaacactacgggtcacgtggcgggcggaggctgttgcgtctaccgctccgcctgggctggaagcgcactcggccccggcggccggcggcccttcctctttgtggcgagcgtgtagtgcagccaaattcgcccctcggccgctttctcaacttctctttcaaactgacctcaaatcactaccgccggaacagctcaagttttggtccgccctgggaatttccacgtcttcctgaagtgtacacctggcctgccttagccttgtctatatttagctaagggttaaaacacagctgaagctggctaagacttagctccctgaaatacgttggatagtcgttctgttttgttaataagtaggaagagaggcaaaaggaggcggctcctttcccactctcctcacaccgttctgacagctcctcttttgctcctttttctgctccttgcttttctccttagtcggttgcttttttcccctctctcccatcacttgtagggtggtatacattgtaaaatccttgaaggcatatgtcctcctgggaagacctttgacgtggaggtttggagatcagccgatctactttctggccccagcttggcttcaaacgtgtgtgaattccctcctccgggcctcagttttctcacgtgcagaatgggtttgttgggtcagtatgagagcatgggaaggaaatgacttggcctccatgcacatctgcccttggttaaaatttggagtccttcctttctagcgtgagctatctagccgtttctaaacttaatttttctcatgtcttaaatggtaataagtattttaaaacgtcatagatttaaatgagataaccagatgtaaaacgaggggtacctagtagttcaaaaggcttagtggaaagcccttccactttcctctctccctgaaattctggcacactgtgactccatatctaatcttaactaaggacccatataacccatggtagatctagagccagtgtttgttatggcatctgcctggagcacagcgtttctatctgtttaaaggacctctacgagtttatggtacactgtcccttaagcctagtatgggttctggccatactgcatcaattacctgcgtgactttaggcaaccaacttaaagctgtttcttcatccttaaaataaaaaataaaaagctggaaatatatcgctaaggtcctatctacatccaaaagtcttatttcatctggtcaccactattcatttctgaaagtaatcatctccagtcctagaagccttaaaaccatctttggttgcgtgggggtcaaggggagggagagcattaggacaaatagctaatgcatgcgggacttaaaacctggctgggcgcggtggctgctgcctgtaatcccagcactttgggaggccgaggcggacagatcacctgaagtcggaagttcgagaccagcctgaccaacatggagaaaccccgtctctactaaaaatacaaaattagccgggcgtggtggcacatgcctgtaatcccagctactcagaaggctgaggcaggagaatcgcttgaacccagcaggcagaggttgcggtgagccgagatcgcaccattgcacaccagcctgggcagcaagagcgaaactccgtctcaaaaaaaaatataaataaaacctagatgaggggttgattggtgcagcaaaccaccatggctcacctataagtatgtaacaaacctacacattctgcacctgtatcctggaacttaaattaaaaaaaaaatctttgaagcgttccttcataccaatccctctgaaatccatctgaccaatcaatgaccaaatcctgttgtccttcctttcttgctacactcctcccaattcctgactaggcaccacactcctagtggttgacatacttggtcctccccactttctgtcttacactacaaaatatttcataaattgactctcagctacgttggtggaatgcaatatatgaaatgttgagagtcagtatcccaataaaacagaaacaaaattcccagcttttttgagaaaaagatgtctgtaagcttatgagcatcctgttgttcattaattcatttatatttatagtatattattgacacgtgaagtttatgaactacaagaaatgctatgtgatcaatattattgttagtatgctgagaggtcagagatgcagtatgcttttcaggtaggataaatgagaaacagaaattgtattacaacaaacacaaaaacaaaaaatcccaattagacttctggtctaccactggttaagaactaacattaaggctaggcgctgtggctcacgcctataaatcccagcactttgggaggccaaggcgggcggatcacctgatgtcaggagttcgagaccagcctgaccagtatgatgtaaccccgtctccactaaaaatacaaaaattagcccagagtggtggcatgcgcctgtaatcccagctactcgggaggctgagacgggagaatcgcttgaactcaggaggtggaggttgcagtgacctgagacagtgccattgcactccagcctgggcaacaagagtgaaactctgtctcaaaaaaaaaaaaaaaaaaaaaagaacattaatattctggctgacttagtagttctattctcctaagttaataaattggcctgccaagcacggtggctgacgcctgtaatcccagcactttgggaggtcgaggcgggtggatcacgaggtcaggagatcaagaccatcctggctaacacggtgaaaccccgtgtctactaaaaatacaaaaaattagccgggtgtggtggcgggcgcctgtagtcccagctactcgggaggttgaggcaggagaatggcgtgaacccaggaggcggagcttgcagtgagccgggatcgcgccactgcactctggcctgggcgacagagtgagactccatcgcaaaaaaaataaaaataagaataaataaaaaatgaataaataaaaaaataaattggcctaatagctctgatatcagtctcatgtgactacaattagtaagggagttagtatcaactcttttgtactaataaaatgttattgtcaaaactgaaaaacacaaatggaaatccctacttcacacaatatacgaaaataaattccagccaggcgcggtggctcactcctgtaatcccagcactttgggaggctgagggggggcagatcacctgaagtcgggagttcaagaccagcctggccaacatggacaaactactactgactctactaaaaaataaattagccaggtgtggtggcacattcctgtaatcccaactacttgggaggctgagggaggagaattgcttgaacctgggaggcggagattgcagtgagccgagattgcaccattgcactccagccagggcaacaagagcaaaacttcatctcaaaaatataaaaaattaaaaattccagatggattgaagatctaaatgaaaaaatacaaaaataaaaatatgacattttagaatatttataactttggatcaagaaagaactttttagcaaggcaggagccattttttaaatgataaaaatatttgacaatataaaaatttaaaatatgctcaaacctattagtagtcagggatacgtagtgaaaaaatgtcctagccaagtacaatggctcatacctataatcccagcactttaggaagctgaggtggaaggatggcttgagaccaagaatttgagatcagcctgggccacacagtgagacctcatctctccaaaacctttaaaaattagtccagcatcctgctttgcgcctgtagtccgagctacttgggaggctgaggcaggaggactgtttgagcctgaaggtcgaggctgcagtgagccacggtctagccactgcactccaacctgggcaacacagcaagaccctaactcaaaaaaataaaatacggctgggcgcagtggctcacgcctgtaatcccagcactttgggaggctgaggcgggcagatcatgaggtcaggagattgagaccatcctggctaacatggtgaaaccccgtctccactaaaaatacaaaaaaattagccaggcgtggtggtgggcgcctgtagtcccagttactcgggaggctgaggcagaagaatggcggaaacccaggaggcagagcttgcagtgagccaagatcacgcactgcactccagcctgggcgacagagtgagactccatctcaaaaaaaataaataaagtaacatccgggtgcggtcagtcatgcctgtaatgctagtactttgggaggccaatgtgggcagatcacttgacgtcaggagttcgaaaccagcctggccaaaatggtgaaaccccatctctactaaaaatatacgataattagccaggcatggtggtgcacgtctgtaatctcagctactcgggaggctgaggaacgagaatcacttggacctgggaggtggaggttgcagtgagccgagattgcgccactgcactccagcctaggtgacagagtgagactccgtctcaaaaataaaataaaataacattaaaacatgaccgggagtggtggctcacacctgtaatcccagcactttgggaggctgaggcaggaggtcaacagtttgagaccagcctggccaatattgtgaaaccctgtctctactaaaaattagccaggtgtggtggcacaggtctgtgatcccagctactcaggaggctgaggcaaggcaatcgctgaacacaggaagcagaggctgcagtgagccaagatcgcaagatcatgagacagagtgagattccatctcaccaaaaaaaaaaacaaacaacaacaacaacaaaaaaccaaggtattacttttcacccctcaaataggcaaaaggaaaaaaaaagtttttattgtcactgtctgttgctaagcagaatatggagaaactgatacattgttgacataatgttggaaagtaatctggaaacatttatttaaattatacgtatataatccgagcattttgggaggcagaagcaggtcgatcacttgaggtcagagtttgagaccagcctgcccaacatggagaaaccctgtctctactaaaaatacaaaaattaggccgggggcagtggctcacacctgtaatcccagcacttcgggaggctgaggcgggtggatcacgaggtcaggagatcaagaccatcctgactaacacagtgaaaccccgtctctattaaaaatacaaaaaaattagccgggcgtggtggtaggctcctgtagtcccagctactcgggaggctgaggcaggagaattgcttgaacccgggaggcggaggttgcagtgacccaagatcgcgccactgcactccatcctgggcaacagagcgagactctgtctcaaaaaaaataaaaaaataaaaaatgaaaaaataaaagggtttgtaactgtcgttgttgaggagtgtgtgtgaaacactgtgagtgaaaaaagcaagttgcacagtaatgtgtgcattattgtcctttcttatttaataaatatccctttattattattttattttattaattaaattttttttgagatggagtctctctctgttgcccaggctggagtgcagtggcacaatcttggctcactgcaacctccacctcctgggttcaagcgattctcccacctcagcctccccaatagctgggactacaggtgtgtgccaccatgcccggctaattttcatatttttagtagagacagggtttcgccgtgttggccaggcgggtctcaaactcctgacctcgtgatccacccgccttggcctcccaaagtgctggcattataggtgtgagtcactgtgcctggccaattattattattttttaaacctctatatgcctatgagaaaagaaaagtatttttatctgatgaatgtgagtcattttaaattattaggcccaaagagacataaaaacgagacagcagactgggcacagtggctcacagctgtaatcccaacactttgggaggctgaagcgggagattgctcgaggtcaaaagttcaagaccatcctggccaacatggcaaaaccccgtctctacaaaaaatacaaaaattagccaggtgttatggcccatgcctgtagtcccagctacttggaagtctgcggtgggaggatcacctgaccctggggagatccaggatgcagtgagccgagattgcgccactgtactccagcctgggtgacagaacttactccccactttgtgtattcgtctcttgaaactgcttgccacaagtagctataaattcacccaatgcttcagcatatcataagagtgaaaagaaaaaaaaattcatccaataatgccacaccagacactataaactgcaccctataacttaacaatgtatagccaatcactaatcattgctttttctgtaaaccaatgagaatttctgacagatacctttgttattggctcactccccgcccactttttcacttaaaaaaccttcttgtaatggataaggagctgagtgaagctcatatccaagattacttgggtctgaatcttccaggcagctatcttcactttggctcagttaaactctttaaattatattttgtgcctcagcttcttccttttaggtcaatgtctttttttttttttttcttttttcttgtttttgagaccaagtctcctgctgtcacccaggctggagtgcagtggcgcgatctcggctcactgcaacctctgcctcccaagttcaagcgattctcccacctcagcctcctgggtagtagctgggattaccggcatgcgttaccatgcccggctactttttgtatttttagtagagacagagtttcaccattttggccaggctgatcttgaactcccgacctcagatgattcacccgcattggcctcggaaagtgctgggattaaaggcgtgagacatggcgccaggcctaggtcaaaatctatatacaaatctacatacaagggcaggtgcggtgtctcacacctgtgatcctagcactttgggaggccaaggcagggagactacttgagcccaggagtttgagaccagcctgggcaacatgaggaaaccccatctccataaaaagtacaaaaattagccaggtgtgggctgggcacggtggctcacgcctttaatcccacaactttgggaggcagaagcaggcggattgcaaggtcgagagttcgacaccagcctgaccaacacggtgaaaccccatctctactaaaaatacaaaaattagctgggcatggtggtgcatgcctgtaatcccagctactcaggaagctgaggcaggagaatcgcttgaacccgggaggtggaggttgcagtgagccaagatcatgccattgcagtctagcctgggcgacagagggagactccatctcaaaaaaaaaaaaaaaaattagccaggcgtggtggtgcgcactggtagtcccagctacttgagaatctaagggaagagaactgcctgagcccagaaggcagaggttgcagtgagctgaggtcgcaccattgcactccagccttggcgacaggagtgaaaccctgtcttgaaaaaaaaaaaagaaagaaagaaaaagaaaaaatatctacatataaatacggctataaggctgggcgcggtggctcatgcctgtaatcctagcactttgggagcctgaggtgggtggatcacgaggtcaggagtctgagaccagcctggccaacatagtgaaaccctgtctctgctaaaaatacaaaaattagccgggcatggtggcgcatgcctgtagtcccagctactagggaggctgaaggaagagaatcgcttgaacctgggagatggaggttgcagtgagccaagatcgcgccactgcactccagcctgggtgacagagcaagactctgtctcaaaagaaaaaaaaaaaaaaggctgtagaggcttagaaaaagtatggcaagttacatatcaaaatgttaacattttaacatccctgattgaggggcctggacatagatgggagggttgaggacacattaataactatttcttgctaaaatttcacattattaaaatgagaacttttttcagaaatttaaaggaaaaagagtaactttttttgtaactgcaagctgagcgctagcccttgagctctggtgaccctcccactctttgaggcttgagcagttggctgactttattgtcctacgtctcttcattttagatttcctaggcatacctacacatttaacagatgctactctttcatggtttaaaatatgttgttttttcagaaacaggatcttactatgttgcctaggctggagtgcagtggcacaatcatagtttgctgctgcagcctcaaactcctgggttcaagcaatcctcacttcagcctcctaagtagctggtctacagccatgtaccaccatacctggctaatttttaaatttttaatagagatggggtcttgctatgttgcccaggttggcctcaaactcctgacctcaaggcatccttctgcctgttttgtctttttgacgaggttaaaagacaaatgttgtactttccaacagaacttaagattctgcactttatcaaacaccatttggggagctgtgtgaaatttccaaactataacaaataggcagtttagtcatgcagcctgccttccaccagcagtatataaacctagatcagtggttctcaactgggagattttgccctccatcccctagaggacatttgacatttcaaagacttttctagttgtcacacctgggagaaggatgtactgctggcatccagcagatagaagccaagggtgttgctaaacgttctagaaatctagaaaacagccatctacaacaaataattatccagccaaaatttcaacagtgccatgcctgagaaacactggcctaaaatttcaaccatatagggcaagtggtaatgattggggctctaaatgaggaaggttcccaagggaatgaaagggcaagcttttattatcaaggctaggttgcagagcagcagaggagtgattttcacattggtttttatcagcagaatccacccactgaatgaacttaactctactgtacagtatcataaagatatatttcctttataaaggactctcattaatcagtaagaaaaagattgatagcgtagttggaaatgaagagttcagttcacagaaaataggacacaagtggcttttaaacatatgaaagttgtaaaacctcactcataaatacacaactatgcattaacctataacaaaatgtcagttttcacccatcaaaatagtaaggaactggccaggcacggcctgtaatcctagcattttgggaggccgaggcgagcaaaatcacttgaggtcaggagttcgagaccagcctggccaacatggcaaaactccgtctctactaaaaatacaaaaattagctgggcatggtggtgggcatctgtaatcacagctactcaggaggctgaggcaggagaatcacttgaaccagggaggaggaggttgcagtgagccaagatcgtgccactgcactccagcctgggtgacagagcaagacttttttttttctccctctttttttttttgttgagatggagtcttgctttgtcactgttgatgtcatctatgatgtcatgagagtggcggccatcaacattacagcccacagactgggcagtccccaggatctctttaatggttccagagagttctctggctaaggatcggtgccgcatctgtcgagcaaccttgatgatctcatcaaaagtgatattcccactgtgtttaatgtttctctgtttctttccgtctcttggtggctccttgagggctttgatggtcagggcggaggcagaaggcaccacctcaatctgggcttgtctgttctgaattgtcagtttcactgtaatcctcaggcccttccagtcacccgttgccttggcaatgtcatcaccaaccttttttggagacagacccagggggccgatcttgggggccagggcagaagtggcaccgacttcacctccggtgcacctcaggtatacgactttgatcttgttggggtcgaacttcggtggcatggtggaggcggctggtgtgggatgaacccggattcggaacgacggaagaaagttgcaccttggcctcctccgagccgaaagccgagagctgttttcatattgttgtgtttcatgttttcttttcttttttttttttttttgagacagagtctcgttctgtcacccaggctgaagggcagtggcgcgatctcggctcactgcaaccttcgcctcccgggttaacgccattctcctgcctcagcctctcaagtagctgggactacaggcacgtgccaccacacccggctaatttttttgtatttttagtagagacggggttttaccgtgttagccaggatggtctggatctcctgacctcgtgatctgcccgcctcagcctcccaaagtgttgggattacaggcgtgagccaccgcgcccggtcttatgttttctatatattctagaaaaagtcctttgtcagattggtgacttgcaaatatttctcccagactgcagcttatctttcattctcttaaacatgttctttgcagagcagaagttttctatattgttgttgttttgagacagaatctcgctctgttgcccaggctgcagtgcagtggcgtgatctcggctaaatgcaacctccgcctcctgggttcaggggattctccagtctcagcctcctgggtagctgggattacagctgcccgccaccacacctggctaatttttgtggttttagtagatatggaatttcgccatgttggctaggctggtctcgaactcctgacctcaggtgatctgcctgccttggcctcccaaagtgctgggattacaggtgtgagccactgcgcccaggcagaagttttttatattggtgaagatcagcttaccatttattttttttttatgaattttactgttgatattatgtgtagaactctacctaacccaaggttccaaatattttctttggttttccttctgaaaattttatttttcttttttttgagacagagtctggcttcatagcccaggctgcagtgcagtggcgcgaacttggctcactgcaacctctgcctccctggttcaagtgattctcctgcctcagccccccgagtagctgggagtacaggcacccatcaccacatctggataatttttgtaattttaggtcgggcgctgtggctcacgcctgtaatcccagccctttgggaggcctaggctggtggaacacgaggtcaggagctcgggatcagcttggccaatatggtgaaaccccgtctctactaaaaatacaaaaattagctgggtgtggtggcacttgtagtcccagctactaggaagtctgaggcaggagaatcgcttgaacctgggaggaggaggttgcagtgagccgagatcgcaccactgcactccagcctgggtgacaccgtgagactccatctcaaaaaaaaaaaaaaaatcaattgctcatgcttccgtaggtccccttctggactctattctgttccattgatgcaaatgtctatcctttcaccaacacagtactaccctgtctttttttttttttttttttttttttttctgagacagagtctcactctgtcaccatgctggagtgcagtagctcgatctcagcttgctgcaacctccacctccccagttcaagcgattctcccacctcagcctcctgagtagctggaactacaggcgtgcaccaccatgcccgggtaatttttgtatttttagtagagacgggttttca

SEQ ID NO: 79 - DNA, 44028 bp, Mus musculus
gatccacctgctgtggctgcagatctgagatcatagccaaaagctctgagctgccacagacagagtccccctctgcttcgtgggtctctcagcctagctggctaaggatgtggctcagttggcatgatgcttacctaaatacgcaccgtgacctgggttcaatgcttaaagctcaggtgactcatttgtataaccccagaccggaaggctatccggggagatcggaagtacaaagtcatccttgattacacagtgagtttgaggctaacctgggaaaaaggagaccctgtccctaaacaagaaaaagcatcagaagtttctcggggcatctctccagttttactggcacagtcctacagaatccagtcagcccttgatgtccacaggggatgggttccaagacaaggagacaccaaaattttctcatgctcaagcctctggtctaaactggaatagcatttgtttatttgtgtgtttgtgcatgctcagctgcctaccactgtctgcctgttcctttccctgaacctcgcattttttccaggttgagcagccagcaggctctagccatcctcttatccccacaccctccttgcccagagctgaaggtacaggggtgcccaggatggctggcttattctgtgggtattgggatctgaactctggtcttcacgatcgcgtggtaaatgctcttacctgctaggccatctttccacctcaccctcttgcgtttggattgcagctggatgaaccttagatgcagggcatgcagtggctcgcctgaatagcctaataaggaaggagctatctcctggtagtcacaggccacagcagcacttacgagcaggggcgttagtcacttttcttgtcactgacagaatatctgtcagaagcagcttgaggagaaaggatgcgttttgacttacagtttctgggaatttcaggacattacaagttgggagggtggagtggaatggcttcagagcagagggacatcagcctgttgcttcttacatagtggtcaggtcagggagcagcaaatgagaccggaagcaaggctgggttacaagcttcaaaagttctgtttctggggaaagtgaggtgttctctctcggttttccgaggcagagtttctctgtgcagccctggctgtcctggtactcactctgtatacctggctggcctcgaactcagaaatctgcctgcctctgcttctgagtgcttgccatcaccaccccactctttgtctcgttattaaaagaatttaaggacaggtttggagcttagagaacaatttaaccagtttaagagaaaaaagctgggcagtagtggtgcatgcctttaatccaggcactcctgaggaaagtggatgtctgccagttcgaggtcagactggactacagactaagctccaggacacagagaaactgtgtctgggaaaaatgaaaaacaaacaagaaagaaagaaagaaagaaagaaagaaagaaagaaagaaagaaagaaagaaagaaagaaagaaagaaagaaaggaagaaaggaaggaaggaaggaagaaagaaggaaagaaagaaggaaagaaagaaagaaagaaagaaagaaagaaagaaagaaagaaagaaagaaaggaaggaagaaagaaagaaagaaagagcgggtggtgggtggtgcacgcctttaatcccagcactcgggaggcaagagtcaagcggatttctgagttcgaggccagcctggtctacaaagtagttccaggacagccagggctacacagagaaaccctgtctcgaaaaaaaaacaaaaacaaacaacaacaaaaaaaaaagaaaagagaagagaagaaaagaaagacagacagacagacagaagcacaaggaaggaaagctgtacatctcagctgcctgaaggataaggaaaaggagagagagccaattgtcttagggttctattgctgtgaagagacacgatgaccaaggcaactcttataaaagcaaacatttaattggggccggcttacagtttcagaggttcagtccatttttgacttggtaagaaccatggccgcatgcaggcaggcagacatgaagcaggaggagaagctgagagttctacatctggatcctaaagcagccaggagtctctctttcccaggcgaccaggaggagagtctcttctgcactggagagagcttgagcataggaccaacactcctaacagtgccacttcccataggccaagcatattcaaacgaccaaattgtccctttctgggtttacgcatgacaaatgggaggtagcctccaggaaagaatgaaaaagacaaaatctcaaattactggggaaagcacacttaccctctgggcagggtctgaaagggacagagcaggaggaggaggagctactggaagagaaggctcagctgcttaagtgctcagtgctcctcagaggagagcccagttccctagtagcccacaaaggcctgcaatttcccattcaggggatctgaagcctgctctggtcaccatgcatacaggaggcacagacacacacccgtgcagcacagacgcatacacatacaaataaatacaaattaaagaaaggtgactcagccttgaactatacccccaaagctagtgagttggtaggccgtactggatgaatgcctttgttttgggtagcctggaatgttaagtctctacctgaggccagaggtagttctatccctggggttgatccaatttgaatttatcccccctctagcttacaaatgaatgagactctgactattgttattttatttggctttgacaattactgggggggagcaatctactaatctacttttctaatggctagcctggctatgtccacaatggtggcccccaaatacttgctgtttctcctggtcatgtgttcatggtccatctcctctcatgaaggctttctccttcctccctccctccctccctccctccctccctccctccctccatccatccatccctccctgtctgcctctctctctctctctttctctctccaacccccaaccccagctaactcagcaccctcccccacctctaatccctccagtaatttgctgtagccatttttattcaaccaaggtttgcacaacagaagctgttgagaattcactcctaggcaactagaccttcagctacagaatttagcattaaaatacatagcaactgaccagaccttaacttatcccttaacagggactcaacaatgccctgatcaaggccactgtaatgtctccctgcctgtgaagagggaacctgaaaatcatttaggagatgggctgaaattggaggagagatgaaagcccacctccactattaaaagctaaagatctagttctaaagctgttcaccagaaggaacttgtatctaaactggagtttcagtcctcccccgcgggcagatgtgctccctctggctagccctgccctgagttccaaggagaatccttaggacagggttgcctctattaccgacttttctattgctataataaaacaccataaccaagcaggtacggcgatgcacacctttgatcccagcactcaggagacagaagagggtggatctctgagtttgaggccagcctgctctacagagtgtgttttaggacagccaaagctacacagagaaaccttatcaaaaacaaaccaaaaccaaaaccaaaaccaaaaccaacaaacaaaaaaacatcccaacaacaccacgaaccaaaaaccaaaaccaactgaccaaccaaacaaaaattccccaccacatctcgtgcaatttatagatgggcttactttggggcttacagtttcacagggataagagtctgtcactatcacagaaaggccgtgtggcagcaagcaccaggcatggtggagggaaaaggcaagaactcacacctaaaacctcaggcagacaacagagagaaacctggaacagcaaagtgtttagaaacctcaaaggccacctccagggccacatacctaagccttcccagacagcaacaaaccaggggaccaagtgttcacatatcagcactaggtgggatgtgtcatttaaaccatcacactgcctggcagtttctataccctgtttccatcagttctgctcagaagacctacttttgactgccaggtcccacaacctcccaaagcagcaaggtcagctgagggccaggtgttcaaatatacaggatagatcacttttgagccatagaggaataacaggatacgtgtactaggggccagagctttcccaggtataactgaattccaattaactttgcttcgtcctgtttcttttctgagcgtggcactgggcattgaacccagcggtcttctgcgtgttaagcaagccttccgtggaagtgtaccttgggtccattccagtatatgcatttaatattttgagagatttctttctttttctttttcttttttatttatgtgtatacatgtgtgtcaggcccaccggcagcactcgaacagcctctgtgggagcagtgagggtgattctaggaaagacagagagaagagatgagagatagattaggagggcttccagttaatactgaagccctgagttgattttacatagcctttttataccccacagtaccgtgggaggcaaggctgaaaacgctgttctagctcctttgtgtggctgtttaagaaagaaagaaagaaagaaagaaagaaaggaaggaaggaaggaaggaagaaagaaagaaagaaagaaagaaagaaagaaagaaagaaagaaagaaagaaagaaagaaagaaagaaagaaagatgggccagacatggtgggccacacctttttgctttgtttttggttttttgaaacagggtttttctcttgtgtagccctggctgtcctggaacgcactctgcagacctcaaagtcacacatttctacctgactctgtctgggaccaaaagcatgcaccaccaccttaaaggcatgggtcatacctttaagtctagcacacaagagacagaggcaggtggatctctgttgagtttcagatctctgtgagttccaggccagcttgatagtgaagccctgagaaagaggaggaagaggaagaggaggaggtagaggaagaggaggaagaggaggaggaggaagaggaggggtggtgaaaattacatgaatctaggcacggaggcacatgcctacaatcccaacacttagaaagcagagagatagacaggagaatcataaaccagcttgggctgcctctggaaacctcaactcaaagcaatcaactgtattaaatttcattgctgtatacactgagtgcactacatgtgaaactccaaaattctggagaaaaacatattcaaggtactcattatggtgccttaaaatcatttaatattccccaaactttcctagcaaggtgcctctaatcgaagaaaataaagtataattagcagttggtaagtctagcccaaacttatcacaaaattagaccctgaatgactttgatgactaagtagcaaatatttctgaaagtcaggtagtttccagccttttgccttctgcaaaccaaaggagaaactaatctcttttttggttagtaggtcattaaatgatgttcatgctgggcttaggtgtagaaacccaaaagccaggttctcaggtttgagtcttggcttcataacaaattccatgccaacttcagctaggtagtgagatccagagaggaagggaagggaaagagagagagagggaaggaagggagagggaagggagaggggggagggagagaagatggaaaggagtgtgtgacagtgaggagagagaggggaaacagagattatgttgaaaactcttgaaaacagagctatgctattttcagcataaaaaaaacaaaaacaaaaacaaaaacccagaacttgaaaaagtgtggtggtttgaatatgcttggcccagggagtggcactattaggaggtgtggcctagttggagtgggtgtggcctagttggagtaggcgtgaccttgttgaagtaagtatgtcactgtgcgggtgggctttgagaccctctgtcccaaccacttgggagccaattttcttttagcgtctttcagatgaagatgtagaagtctcagcaacaaagtctttcacaggtctactaggatggcccattaagccccacttaaagcattccactgctttccaaatccaaagtcccaaatccacattcttccaaacaaaagcaaggtcaggcctctcacagcaatgcctcagctcctgataccaacttttgccttaagttagggttttcctgttgtgatcagacactgtgaccaaggcaccttttctaaggacaacatttaattggggctggcttacaagttcagaggttcagtccattatcatcatggtgggagcatggtagcatccaggcaggcatggtgcaggaagagctgagagttctacatcttcatctgaaggctactaggagaaaactggttcccacatggttaggacagagggtgtcattgcctgcccccacagtgacacacttcctacaacaaggccacacctactccaacaagggaaaacagatatatactcttgaaaacagagttgcgctatttttcagctttaaaaagaccacaaaaacaaaaacagaacttgaaaaacttttgtactatagcaaaatcccttacatgtatgtctatttgtatatgtatatgcatatctgatgtgaaaattatctcatcccaacaataactcatattcatactgtttggacaaagatgcttctagctgctcctcttcctcctccctcctcctcttctttagtagccctactgctgaaacatgctaggtaagcattttgctgctgagcttcatagactgcacagtgaagtgtggtgtggtgtgtccactcagaaggctgaggcagaagaacttcttgagcccaaaagtagaaaatcctgctttaaaaatgggggtgagggtggggtaggaactagagagaaggttcagcagctaagagcgtttgctgctcttctagaggaccagagaatttggtccccagcaccctctggtgctcaccatctcctgcaactcctgcttcatgtcttctgacacccagttctggcctccctggtcacctgcacatcaaccagacaaaaacaaatatattatttgtcccagcatggctgttctaattatccatgagctgggtacttaactcatttctcagattctagagatggggtagctgagaatatggtgcctggctgtcctagaactcctgacacagaccaggctgctcttgaactcacagagatctgcctgtcactgcttcctacctgcttagattaaggaagggcatcactatgctagaatgtctttcataggtgctctaattccattcctgagattgacaccttcatgacctaaccagttcccaaagatgtacttcctaatgctggccctttgcagattgggctttcaaccaatcacaaagcctgtctctgatatcatgcaaagagtggatctagtaggttacgggaataatttgtaatcttacaatggggagctaggggtgcttctcagtggtactgtgttttgtgtttcttttttcttttcttttctttcttttttttggtttttcaagacagtttttttctgtagcttttggtttgtttgtttgtttgtttgtttgttttcaagacagagttttcttctgtagccctggctgtcctggaactcactctgtaaaccaggctgcccttgaactcaaagatctgcctgcctctgcctcctgaatgctgggactaaaggtgtgtaccaccactgcctggcttcagcagtgtcttttcttttcttttcttttctttttttttttttaaagatttatttattattatatctaagtacactgtagctgtcttcagatgcaccagaagagggcatcagatctcattacggatggttgttagccaccatgtggttgctgggatttgaactcaggaccttcggaggagcagtaggtgctcttaaccactgagccatctctccagctcggcagtgtgttttcttaaacttcacgatactcttagtttaattcccagtgctggaaaataacaatcattactgccaccaccaccactgccacaattataggtaatccagcagccaacacaagcacaatacacatagctacgatatctttttcatttccttttgtgtggtgaggctaaaacccagggcattctatctaaataatctaccactgagctacaatccccagcaacctcccccccaatcattgtctcttctcttcttcctactcctttggcctcctctttcccttccatccttcctgctctactaccttcacttcaagacggaatcttatgttgctctgtctggccatgaatttgcttagacaagtgtcttatttaaggtttcagttgctgtactaaaacaccatggacataactttgggagagaagggtttatttctgcttccaactctcaggtcatactcagtcactgagggactttaggacaggaacttaaggcaggaacctggaggcaggaactgaggcagaggccatggagggatgctgcttactggagtactctatagcttgctcagcctctctctctctttctttctttctttctttctttctttctttctttctttctttctttctttctttctcctgattatatatatatataattttttatttttttatacaagctttctctatgtagccctggctgtcctggaatttgctttgtagaccaggttggcctcgaactcacagagatccacttccctctgcttcctgaggaatcctgctgggattaaaggcatgcaccaccactgtttgactcagcctgctttcttatagcacccaggatcagggttggcaccatccacagtgagccgggccctttccacatcaatcagacttgctgacaggaaaatctagtgggagcattttctcaaccgagattccctcttctaaaatgtctctacctatgtcaagttgacataaacctagccagcataacaggactgacatgtgactttctatcttcctgcttctacttcccaggtgctgggactgcagaccacgttccaccatgcctgatttctgaggggctaggattgaatgcagagctttgtgcattgctatgtggtaccaaaggtactatatcagtcctgattcttgcctgattcatgaacttctctagtctgccaactggaacaatacaacctgccagtcttctttgtgtataggtgcaccactaacttctagaaagctggatgcaataagtagcaagtgccacttgctttcatggttagcttgtaaaaccccttcaacgtatgcttaaacagcacagtgctatacatgtttcctgcctcctgtgctgtgtggcttggagatcctctttttctaccacgtgggccccagagatcaagttatcatcaggctgttccccatagatccatgtccctgtccccatttttttttttttttttttttacttttgtttggtacagtctttaatgatgtagtccttggtagcctagacataagtaaaacaagctggcctcaaactcatggagatccacctgctgctgccttcctagagctgggattaaaggcgtgtaccactgcgggggacctaaagaatattactatttattgtttttgagacagggtctcactctacagttctgtctgccttggaacttgctatgtaaactatgcgggcctcaaatctccattctgcctcctgagtgctaaggttgaaagtgtgttcagccacatccatcctgggcctaaggatttttaaaaattgtttgcattgtttgtgagtgtgagtgtgtgtgtgtgtgtgtgtgtgtatgctcgagtgcacaaaacacctttggaaatcagaatagtctggaactggagttacaggtggttgtgagccacctgaaataggtgctgggaaccaaattcaagttctctgaaagattattgcatgtgcttaaccactgagctatagcaacactcccaggtttaatattttaattttaattatttttttttttttagtctttgagcctacgtggccctggcttgcctgaacttcatatgtacaccaggatgcctagatttgcctgcatctgcctcaagtgcagggagtaaaggtctgtcccatcatgccaggctcctgagtcctgttgtaaaaggtgtgtgctgccacgtgtggctagtgttttgtttttgagatagggtgggatcaaatttattacctagtgcaaatggatttaattttctgatcctgctgcctctaactctaaaatctggggaaaccccactgtaattgaaccatgtgcaattgagccctaatgatccaaatggatacaggtgctcagaatttcatggtaactagaaagtgaaggggcttagagttgtgaaggaactaaggattatttaaaaaattatttaaatatgtatttttatgctgggcttgctggtgtacatctttaatcccagcagttcaagaagcagaggcaggtggcctctgagttcaaggacagcctgatctacagagttcctggacagccagggctacacagagaaaccctaactcataaaacaacaacaaagaggatttttatgtgtttgggtcttttggctccatacatgtctgtgtttaccaaaagcaggtgtcagatctgaaggtatgagctgtcatgtggatgatgggagtcaaacctagggcctctgcaggagcaacaagtgctgttaactacagagccatttctacaattctagaagtaagattattttttcgagacagggtttctttgtgtagccttggctgtcctagtgaacctcctcctgtctcctccagcttgctgggattaaaggcctgtgccaccatcaactgcctaggattttaaaactaatgtcatttactttaaacctgactagctgatttctcatggtctatcgttttaaatttcgtttttgagacgaggtcttatgtattccaggccttttttgaacttcctaagtagttggagattaccttcaacttaccctccttcctccctctctctagggcttcggggttgtctggcaagcgtgactttacaactgagctacagtctctttcggtcctggccctgtcattttagagatgattaaaaactgggcttagaaaaggttcagtcaatcgcccaagtcacaagagcccaggcccaatctgactcttaacacagaagtttgtggagaaccaaccactctcccttctgtcctctctcttgctgccccaagagatgaattttaccaaagactaaagcgaggtacagaggacctggtgggtccagagagcagatagggcgggtcctcaatcgccagatctttccaggagggcaacaggccccgagggctggcttgggcattccattgcacttgagaagggagattgggagagagcgcaaacttcctgaggagagaccacaggggtaacctgaggaagagctgtcacagagcaagggcaaggcaggtggaggagttctcctcaggaaggccggcgtcggccaggttgggctctccagagcccctgaggtaaaagccgacttgaggcgaagaggcgcaggcaggcaaggtgcacgcgtgaggcccaggtgggaagtggcggcgccatcgcaaacttgaaccaccgcggcgatcccggacgagcaagcgagcgagcgagcgagcgagcgaacgggtcgggcgggcgggaggcgccagaggccgctgaggggagccgagccgccctgggtggggccgggaagggcccaggccgcgggcggcgcccggccacgtgacccggcgtgttgtggtccggcccgcgtgggtggcgggagaggcgcgggggcggggaggggcgggtcacgtgacggggtttaaatctcccgcagccgagccgcgggggcgccagtgccgcgcgtcgagcggagcagaggaggcgagggcggagggccagagaggcagttggaagatggcggacgaggtggcgctcgcccttcaggccgccggctccccttccgcggcggccgccatggaggccgcgtcgcagccggcggacgagccgctccgcaagaggccccgccgagacgggcctggcctcgggcgcagcccgggcgagccgagcgcagcagtggcgccggcggccgcggggtgtgaggcggcgagcgccgcggccccggcggcgctgtggcgggaggcggcaggggcggcggcgagcgcggagcgggaggccccggcgacggccgtggccggggacggagacaatgggtccggcctgcggcgggagccgagggcggctgacgacttcgacgacgacgagggcgaggaggaggacgaggcggcggcggcagcggcggcggcagcgatcggctaccgaggtgagtccgcgcgcgctgccgcgcagccgcgtccctccgcgtccccgcctgtgacccggtcccaggttgcccagggccccgagagctccgcgggctccgcggcggcggcggcggcagcggcgcagctcggccctggctcggccgcgcgccgccgagctcgccggccctgctgcggagccgcgcgcggactcgccgctcgcctgggccgccttgcgctgctgcgcgcagtcgccgggaccgcggttctcgcagtttggcgttagagtgaagttttccctccctcggtttggtttccctcccgatgcgcctttagtgaagttatagttttcctcactgcacactttgctttgcgactttggggctgtcccgtggatcgacatgcgatttcgttttgcaaactgacacctgtgttgcttttttttttttttttcttttttggatagacctatgtctttttttgaagttagaaattttaatacaccaaagctatttcttgagacacagtctaaaaaatgtaaggaaatggctattcctaaaaatgttgcttttctgcgattgcatttatcacttcgatatagaggagttatagttgtactgtactttcgtaagttttcttttcctttcaaaatcatgctcgcaacatttttagattaacaaacctgaaacaaacctgcttggttttgccctattgacgccaaacgtttgggttacttttttgttttgtttttgtaataatgccacttatcgtcttcctgaaaagctttgtacagaatttatcagagtctgtcagtgcccttgtagatgtttgtggctcgtataatggtgccatgaattaaaaaacaacaaaacgtgttagggactgaaataggaaatgacccttgatgtcaggtattaaaggggaaacaagtcgcataaagtatgcttcgtgttctttaaatcatacatttactaacacccagtggctgaagcaggtagattgctacttgaaagggctacggaaagagactttctctggttggggcagtgagaacacagccagggattgatttttatctcagtgatatttagaagtaatttctatttgatgcatttcatgaagttgtatttctttgtcctgggcatggaaccctgagctgcttttgtagggctacacagattttatttgtgtgtgtgtgtgtgtgtcttcattttggattttttgaggtagggtccctgtttagcccaggctggtccggaactcactattttatatatgtcaggctggtttccaatgtctgtgccttccaggtgctggagttacagatgtgtgtgcttctgtgcctttctggttttttgtttttgtctcaagaacctgtgtgtgtctcaccatacaggccaaacgggcctcaaagtacctgggattgcaggtgtggaccgcagggcccagctggggattgtctgagccgcagccttttgatctctttgacagacaacctcctgttgaccgatggactcctcactaatggctttcattcctgtgaaagtgatgacgatgacagaacgtcacacgccagctctagtgactggactccgcggccgcggataggtatgcttcaggcatgtgcatctttgaaacaattgcaaacttccttcattccttccgtccttctgtccgtccttcctttttgagacaagatattttatagcccaagctagttaagctactctgcagtctctgcccagcctctggagtacatcacaaccaaagctctttttgacttactcttccttctctcttttcttgattttttttttttttttttttgacattttcatctatcctatgatggctttaaacttgtggagtctaggatgtaaggatgacattgatatcctgactttaccagcagtccagagtgctgggattataggtgtgctgtatgtaccatgtccgtttgtcagtgcctgaggttaggtcctcacctcttttcttctgtacattgtttttgctttctgtgtacagcctttgggggttttgcttgcttgttttgttgtggttgttgtcgttcgtctgcttgcttgttgagacaggaacacgtatagcctagactggcttgaactcattggctgggtagccagccagcacatattagccttgaatttctgatcttgtgtctaaatgctggggattatagttatttggtaccaccccaacagctgcttttgtaccaactttaaattctctgtcacctttaccatttagatttagttgctcaggtattggtaagattttttttttcttggcctcctgcatggtaatccttgagtcgctcaccacgtcctcccatctaaggcagtcagaatacctagacagtccaggcagtagtggcaggcatctttaatcctagcactcaggaggcagaggcaggagaatcttgagttctaggccagcctgatctacagagcaagttccaggagagccagggctacacagaaaccctgtccccaaccaaccaaccaaaaaaaccccttagacttaagcacaccctccccaaactgaattagtcagatcttgttagggatatgacatgaaatacatataaattgtattctttgcataaaaatgtatatattgctaactcattgcttgaaaaaatagctttttattagaagtggaattgatgtgagtctttcttcccttaatataggtccatatacttttgttcagcaacatctcatgattggcaccgatcctcgaacaattcttaaagatttattaccagaaacaattcctccacctgagctggatgatatgacgctgtggcagattgttattaatatcctttcagaaccaccaaagcggaaaaaaagaaaagatatcaatacaattgaagatgctgtgaagttactgcaggagtgtaaaaagataatagttctgactggagctggggtatgtaagacgcagaaaaacagtaaagagaaagctagtagatattccttttccagctaactttttctgctcttgatgtagcctttgttcataaaaactgaagagagcctcatttgttaaactagttcagtgttttgaaaagtttgacaactttaaagatttgtatatttatagaacaattggtaagtggaattatggtttatttttttgtttttatttaagatcgtgtgtgtgtgtgtgtgtgtgtgtgtgagagagagagagagagagagagagagagagagaaacagactcattcattcattgatttttgcctacatgcataaatgtgcatggtacccacagaggccagaaatgggtgttgggttcccagggatttgagttagtcagatgtaggccaccatgtggatgctagcaaacctggattcttttcaaggagcagcaagttctctttagtggctagactctctagctcctggacttgtttggttttaattttatgtatatggatgttttatctatatgtatgtttttgtaccattgtgtgatgtgcccaaggagtccagaggcatcagatcccctgaaactggagtgatgatgtttgtgagcctcccaagtcctctgcaagagcctcaagcctctttcaaacctggaatttttacacattatatgctggctcctaaagatgatttagaagaattagagctttttgaagtctatggtagcaagagtctagtggagaaagttttctttcattcttttttaaagatttatttattaaaatgagtacactgttgctgtactgatggttgtgagccttcatgtggttgctgggaatgaaagttgctcactcaggtcaaccccgctggctctggcctaaagatttattattatatctaagtacactgtagctatattcagacgcaccagaagaggacgtccaatctctttatgggtagttgtgagctccatgtggttgctgggatttgaactcaggacctttggaagtgtaattgtactcttaaccgctgagccccctgccctccttcattttacctttgtaagattgtagagacttggtctagaaccaagtcatactgtgttgtgttgtatgttaggcattatgttagcaaccagagcagtttgaacagagtgaaaagtatgaatgaatcagaatctcagttgtgggaggcagaggcaggtgagcatgccaaagcaggtcggtgtgtgctggcccctcagccccagacgagggctagggttgcttcaggtgtgatttagactagggttcgcctcttatttttatttttatttatttattttttttatttttagggacaaacattaagttttgtgtttgggtgcgtgcatgtggtggtttgtgagctatagcactgtgggagtcagtacaccctgagttgtgagttgcttgtccttcctcactgtcagtcttggctccaggcttcatcagaagcaccttaactggctgagctattctgtaggcccccagttttagttattcttgaaacgggcttactcacagccctggatggcctggaacttggcagagatcctcccaactattgggattatttcaggtatgtactaccatgcctggctttattttttttgagacggtctctatagtttaggatggtttcaaacttgcagcagtccttctgtttcagaaaaattgggattaggagtatatagcaggagacaatctgtttgttttgttccaagttgaatggatctgtaaaactggaatggaagaaagcttgtccattcccctatcgggagtgtcaagatttatctacagaaacgggtattgtcttaatttatttggagacaggattatactatgtagctctggctggcctagaacttcctttgtagaccaggctggcctcaaacttgtagagatccagtcctattctggctcccaaatgcaaagattaaaggccagtgccatcatacctggttattaaaaaaattttgtgtagccatgtgtagtaacacatgcttttaattctagcacttgggaggcagagactggtgaatctgtgagttggaggccagcctggtctacagagcaagttccaggacagccagggctcacagagaaagcctgtcttgaaaacctcccaatttttttgttttcttgtgtggtgtgtatatgtgggtatgcacgcacatgagtgtgtcagaggacaacttgcaagtattacatgtggtcatccagtacggtagcctttagctgctgagacatctcactggccctttgttgtaatttattattttcactgcttgagcctggacagacactctacagttgacctatccttagccctttttaggttccttagggtggctacctgaacttaaaagatcctgcctcagctatcttagctctgactataaacttgtgccactgtcctgggttttatcattataatttataattaaatgcatatccttagctggctatggtgatgcattttctgttatcccagcatttgcctttcagggccttagtgactgtaacctcagcattaggatgtagacacaggcagatccctggagcccaatggctacccagcctaactaaagacactatctcaatgagaatcgaggtggcccatgccactagttctagaggcaggtaggtgtgtgtgtgtgtttgtgtttgtgtttgtgtgtttgtagtgagaccatgtcaaacaaaagacaaaaattaagctattaataagtaagtaaatgattcattcttgggctagagagatgacttagaatttaagaggtcttactataaggccaggggcccagattcagttcccagtacccatatggcaattcacaactgcatgattgatgcattctgacctccgtggacaccaggcacctgtgtagaacacatatacatgtaggcttccctatgttcatataaaataataaagcctaatggcttctgaaaaaaaaaaaaaccaaacaaacccaacaaactttgctgtgatatgtgtaaggtagttctaactcctggacaacataacaaagatcccaaacccttttttgagaatgattttgctgctgtgattgtccccaggtagtcttggaaatcagagcccaaacagcccttcagtctccctgagtatctgagactttaagcatgaaccagtgtgctcagtctataatacagtattgaataaagtttcaaaacttgagtattcttgaggtagtaaagctgcctatgtgaggtcagtttggaatgattggtaaaaagttgtacctactttttggttaaaaaatgaaattgagctgggtgtggtggcgcacacctttaatcccagcactcgggaggcaggggcaggcggatttctgagttcgaggccagcctggtctacaaagtgagaaagtgagttctaggacaggcagggctataaagagaaaccctgtctcgaaaaaccaaaaaaaaaaaaaaaaaaaagatttattccaaccaattgtatttgttttaatttgtttaaatgctcaaagggttaagattagcccattaaagcagtatgtggcagatttaattatacttatttacgtattttacctgtatttgaaattagaaagcttgtggtgtttctgttcaaactttgatttttcatctcttcccactaaattgtatgtagtaaaggtacttactgtgaaggtagacagttaatgggttgacttaggtcttgtctgtttcaggtttctgtctcctgtgggattcctgacttcagatcaagagacggtatctatgctcgccttgcggtggacttcccagacctcccagaccctcaagccatgtttgatattgagtattttagaaaagacccaagaccattcttcaagtttgcaaaggtatcacacgtttttgtctttatgataaagagttctcacgtgtaggctttttaagtttacattcattgcccagtgatttggaggctaccagtgtggtagttagaacttaagttgtttaggactgattttaaataatgtaattttggtcttttgcctgtgtgtcttgccctctcctttggaagtttgtagatctgaaaaaaaaaagaaagacttgttttcacttactcttttttttctgaatcataaaggttctatgactactatgtggtatgttttataatggacaggtcttaatatatgcatatgtctaaaatgatttttaataactcaaggttgagattacatgttttgggaaacattacaagggacgtctttctagttgataagtcagtcaccaccatgtgactgcatgtggctattgaatgtgtgtaatgacacagtgagggcatgcttacttaaggattttaaatactttgctaaagaaaagtgaaatatactaattgtacttattaaatactaacaagcaaacatttttatgtttgggactatgttcaggagccaggcataataatacaagtcctgcagctccgggatttcaggggcacaggatacttcatgacctgccagggagggctacatcatgagactcagcttcaaaaacaaagcagtagcaattttttattaggcatttgaaaatttcactttcatgtgaactaaagaaattgaacacttggctcctatgtctgctgtgcagctctgctctgctgtagaatataaagtttatataaattgtctcaagattttagtcactagaaactttgcaaggttttatttgttttgtttctttgtttttttgttttttttttccagtttaatcttaaggttttttgttttgaggcagtctgatgtaggccaggccggtcttgaattttgcttagccatggcttttgaatttcctgagcctcctgcgtctaactcccatctgttgggattagagcaggagctgctatgcctggctgttatgttcactgttagggaacttggaaatacatatgcaaggcttttctgatttagagagatgttttagagacgtctttaaaagtttcatctgtggaggggtggagtggtgaatggtgttgcactcccaagtgcaccggtggatgtgacagcactaccttagtttagggggttgggttcccccacatcacacgagagttcctggattagaactcaggtcagcagattaggcaacagacttatctcccaatccacctcccatcttgtaagccctaaggtggattagaaaggctgtcttccttcagtacagtctcagaactgtaagggtgctttagttcttgtctccgtatcctggtgctgggattagaggatggccagactttgcagctaaggtgtactattggaagctgtgctgctacactgtttaaagaataccagtcaaagattgttttaatggatgcaggaccctggtgtatcatggtgtctactataagtagacacagatttaggaaggccagcaagtaaaagttactttcatcttatacaagcatagctggttagtgattatatgttagtattcccacaacttttcttataaattctatgttgtgagttggggaaactgcattgtcataactagtctttttttttttcccccccagtattttaccgggattgtcaagtgcagatacatatctaaaattgaaagttccacatgttcttaaaattacatttagttatttattgcttatgtaggtgtatgggcaagcatcattttgttcctctttaggggattataaggactagaattccagtaaacttagctctccaataatgcgtaacaagctaacccttttatgtccctaatccagggtttaggaggtggaggcagaagggtctcaagagttaagggcagtctctgctaaacacttgagttccaggctctcctgggttacagagtgaaatagcacacagtggtagaccatttttagcacaaggccccagattttgctacccacaaagaatacacatgctaaagtatgtttttcctaaattttaattgtgttttagggcagattaaaggcataaaaaattagtttgattaaaaaaagatagatgggataattaaagtgaccttagtttgtggatgatattctatatgtagaccctaaaagcctcaccagagaactccccctttttatgtaccacctaacaaacatgggcagggaggaaatctggaaaaagtcttcatagtcatctcagacaacagaggctggagaggcgagccagtggttatgtgtgcatgctgctgcttgcacctttcagaggtcagtttccagcatctgtatccagaggctctacagctgcagttatccccaggcccagttgagtcacgtgctgctggccttcaggcctccacttcatggcacctgcactcacccacatcctctaccccagacatgcagataattaaaagtgttaaaatgggggccgttgagagcagcacttgttcttgcacagaggatcagagtttggttcctaccactcacatggtggctcataaccatccattactccacttctctccaactcccctttctgtcatccttgggcaccaagcaagcatgtggtacatatatattaccttcaggcaaagcactcatttatataaaattacttcttaatataaaaaaccaagggttaggtatggtagtgcaggtctttaatctcagtcctttggagttagaggcaggtggaccatctagggctacataataagaccctacctttaattcagttttatccatatgaactatgtataacatgaagtatgtgtaatgctctgcattatcatatgtgtgtgagttttgcatgttcatgttcaagttcagtaagaattagttcatagcttccctagttgaaattcttttatttggttagtcggtttggcatacatactatcaaaattatttcctgaaatgtgatgaaatattgtataattctccatgagtgatgacctatggattactttaagtggacagataagtgcattttttatggtatacattatattgtatttataggatggctatatcgttaacatccattactttacataggtatttctactcttacatcaagacattgtagatacacaatgttagtaattgtaatctctagtctaaatattgttctccctcagagattatgtgtcggctcactagcttcttcccaatcttactctaccatattagctgagaattaattgttaataactgggagctgtcacaggaccactgttttacatttactattctgtccttgagtcagttttatgaccgccacgtctatttacagatcatctttgacttctttttctatatgagaccatatggcaaatgtatagcccataaagcctaaaatattccctgttgtgaccctgtacagaaaatatgttctgttaaaattaaataaccttcaagaggtagctgtcaagaaattgagtggagtttaatgaataagtaggaggagggttcttagtggaattttgtttcacattgcatgtgtgtggtgtgtatgcagtgtgcagtgtagatctcttgttttgaggcagtctgatgtaggccaggctctcgccatctcttgggacaggggatcctgctagactgttcagctggagtcccttgtttctgcctcctgcattcagagttagagcactgggcctcaaactgacagtgtaaatacttcccactgctctagtttctctaccccttcacatttttatgtgctgttgggattaaactctgtgcctcccatgccaccagccttctagtgtttatagaatgaaaatgtaggttataaccaaacaaactcaactgttttcctaggttctacaactctaagattaggtgaattttgcctctacctccgagtgctgggattaaaggtgtatgccaccaacactacgcaggctattatcttttaacaaaaaaatttaaacttttgatctcagcagaatacccaacatagttggtttcttaaaagcctttaggatgtttagacttgagatgggtgacctatctttttgatttggaataattaacccatgccctataaaaaaactccaagctatttgagttacagcagaatttttagattcagtctatataaggcaaaattttcattaaaagtttttagaatttttagaatttatagaatatttccagctgtttcttaatgggattccaggcatgtgccactcagtccagcttcatgagtgctttctgaatgcactgtaatggagagcaaaattaaagacaggaccatccatatgtatatacacataacttcagtttttgcttaatacaaccagaaagattacaccctggtgactaacttgctttgttcatgtgtgtcatggtctatttttaggtcagtacatgagagccctctcattctctcagtggctgaatattccactgtatggttgtaccttgcacaactagtttccgtattgatggacatacatatggttgtgtttagtttttgctaacattataatgggttagataaagcctataatgtaaggaaacagatagtgtaagctacttgaaagaaaaaagaaacttccttgccacagtcactcactaaatgaaattgaataagaacactatcaggagttgtgaggatgaggggctgaagagatggctcagcacttaagagcactggctgctcttccaaagggcctgggttcagttcccagcacccacatggcatgtggatctgacaccctcacacagacatacatgcaggcaaaatatcaatgcacatataaatgagtaaattaataaatgtatatatttaaaaagttgggaggaccaaaattgatactttttctctgatctttttgccatgtgtatatctgaattctttgtttttaaagaagaaacagcattgaagcattatttggggggaaaaacacacacacaaaatccagcaactcaacattcatgagcagctctgttctataccagtatgtgcctgtgcagtggaaggaaagcaattttggtaaggaattaaaacttcagctttaaactcccagcaggttgatatttatcaatgatgaatcaaacagaaagttttaaataattcattgacagccttttttttagttgtaaagtcaccatacctttaatatctgtaatttcagtgtaaagttttcccccctttttccttaaagaaaaactatgaatttgcagccaacaaagtttagatgtatctaaggtatgtatttcttctgacattaagtagtccattacgatgtgttatcttgcacttcaagggaccaagtttactaattgctgagttttcataaagtaacaagctttttctaggggccatccatttagatgctttaaaatgttcatgtattttggttattacagaatatttattgttagtacctgtttgactaaacataagcaggatatctgttatgcttctttcattaattaaacttttctgccttttgcattacataggaaatatatcccggacagttccagccgtctctgtgtcacaaattcatagctttgtcagataaggaaggaaaactacttcgaaattatactcaaaatatagataccttggagcaggttgcaggaatccaaaggatccttcagtgtcatggttagtgacgtcacagtggctctcgtagggcgttcaataggtaaccgggcttggaaagaagctgctgtctagtgacgagactaagcgttatttagtaaccttgagtggacaaaattgaaaaggacacaaacaaagctgaaggcctcagatgtggtgggtatactttgataacaagttcaaggctagccttgactaaacaagacacagccaagctaaggtaactcagttggaaccttccagctgcagttttggcacttgcagagttatgttattgcaaatagtagctttagaagataaggtctatatacacatgtattagtagataaactatatcacatgtattatattccttaaatacgtcacaggagagttcaggttagtcttcatggtggggctagagagatggctctgcatttaagagcattaagagcactgactgctcttccagaggtcctgtgttcaatccccagcaaccacatggtggctcacaactatctgtaatgaatgccctcttctggcatgtagcagtgcaggcagatacagcattcatacataaaactgtaaaaagtcttcatggagcaagccacaaatagcccttcaataaatgttctatttggtgctggagagatggctcagtggttaagagcaccaactgctcttccaaaggtcctgagttcaaatcccagcaaccacatggtggctcacaaccatctgtaatgagatctgacgctcctctggtacatctgaaatctgaagacagctacagtgtacttagatataataataaataaatattaaaaaaaaaaataaatgttctattttggttgttttaggttcctttgcaacagcatcttgcctgatttgtaaatacaaagttgattgtgaagctgttcgtggagacatttttaatcaggtaatttaattcatctcattttaggaattgtgtaaacttcacttttggttgtatcttcatccccccccccccccccttctgagaagcatgagtgttagaaatcctgatgtaaacaggtcttttttgcaagagcatgttagagcacacttgaaggctgaggcagggcactgtaagagtcaggctaacctgagctggatagcaagagtctcattttttaaaaaaaaagtttttctgttgctcagttggtagatcatggctgcttagcatttgtagtcctgggattgctctcctgcctgaaatcctaccatttaaggaggttggagaataagaagttgaaggtcatggtcacctacaaactctttctcaaaccaaccaacctaaagtcctccttaatacacctaagcacctccttatataatctaggcctaagtcacaagttgcagggaacacctctggaattagtcttacattagttgtggtaagatttaaaacacttttcaaaatgataatgaagtatttattacaggaaaatatagcaacacacatccagatatatgttttaactttgaactcatgtataaccaggaaaaaaaaagacagtatactcaaatggagtcattttcataaatatttttaaaaggtcttgttttcattctttaccacgctctttgcatatttatagtatcttgtgggtgcacagtgcgtatggggaaatgatagcatgtgtggagactggataagagagatcaggctgtggaggtcagaagatcaacctgggagtcagttctcaatttctacctgggagttaaatttggttgtccggcttggtgaaaagtgtccctgcctggtaggtcacccacccccaggctccacactggctccacagcagacactatcaaattcacagcgctttgtttgctgggaatgtgccgagtgctaacctgggctacttgactttcatgttttgtgcaggtagttcctcggtgccctaggtgcccagctgatgagccacttgccatcatgaagccagagattgtcttctttggtgaaaacttaccagaacagtttcatagagccatgaagtatgacaaagatgaagttgacctcctcattgttattggatcttctctgaaagtgagaccagtagcactaattccaagtaagttgatgtttaggggacagttgtgcatgctgtgagttgtggatctgtgtaagatgtgattttactcttttcatttagaaaatagttgaaggtctaagttttactttttaggtgatactcataaagtgacattttggtatgggaatgggactgtgaagacagaatatcagattttaattgtagttcatataaaatcaaagcaaaactgtttgacgcatgctttttagtagtgtgcatattaaagttgcagaggtcagctttaattaattccaggaatagtctcttctttttattttatgtgtgggggtgtttgcctgcatgtctgcctactttggccagacaagaatgttaagagtgtccttccaaggggctggtgagatggcttagcagttaagagcactgattgctcttccaaaataacactttaaaaaaaaaaagtgtcgccccctcccccaaacagtagttctcaaccttcctaatgatgtagtcccttttgtacaattcatgttataacctccaatgataaaaaatttgttacttaacctataatttttgctagttataaatcacaatgtaaatatctattttctgatggtcttaggcaagccctgtgaaagggtcattcactcccaaaggagttgtaaccacaggtcgtgtgacccactgctctagaatatgtacagtattagtatcccctcattgctattttatgtgcttatgtatgaaagaagtgtgtgtgtgtggtgtgtgttccagagatggactgatcagtagtgaagaacgctattcttgagtggacccaggactcacacccaaattttgtcagtttataggggatctggtgctttgtttggccaagtacttacattgtacacttacatggatgtaggcacataacccgtccccctctcccccaacacactccatttcttgaaacagatctcactatacttggcacctgggatacctatgtagactaggctagccccacattccagtctcctgagtgatggatgggatcaaagctgttcccagctaatctttggtagccaggagtggtagtatttggtagcaggggtgcctgtaaaccatgtggtatagggcaggaagagtcaggagttctactcagcagatttgaagccagcctaggatagatgaaaaaaatgagttctattccataatagttgtagttccacaagaatatttacttatgtctaggagttcagcctatgggccaacataatcccaaagggtaaattttttgaattgaaaccactcctccatgtccaagtttctgtcattcttgatgtcctcaaagatccacccgcctctccctcccaagtgttaaagccatgagccttcacaaccagctagacttttatttttttaagctaatttaaaggattagtttaagctttctgaactggaacacctaggatctcagctaagtcttgaacagaagtgccatgagtttaaggcctgagcgggaggaaagtctactgtttgttattgagaggaagttgcttttgaaaatgtgatttgtatttctgcttgcccctctttttgttgttgggattagcgggggtgtgctaccatgcccacctcttgacagttgttaaaattaacttctcttttctaactccccttttcaccccatttttaggttctataccccatgaagtgcctcaaatattaataaatagggaacctttgcctcatctacattttgatgtagagctccttggagactgcgatgttataattaatgagttgtgtcataggctaggtggtgaatatgccaaactttgttgtaaccctgtaaagctttcagaaattactgaaaaacctccacgcccacaaaaggaattggttcatttatcagagttgccaccaacacctcttcatatttcggaagactcaagttcacctgaaagaactgtaccacaagactcttctgtgattgctacacttgtagaccaagcaacaaacaacaatgttaatgatttagaagtatctgaatcaagttgtgtggaagaaaaaccacaagaagtacagactagtaggaatgttgagaacattaatgtggaaaatccagattttaaggctgttggttccagtactgcagacaaaaatgaaagaacttcagttgcagaaacagtgagaaaatgctggcctaatagacttgcaaaggagcagattagtaagcggcttgagggtatggaatgcgttttgttgaatcactttcaaagtactgtgatcagaggagggtgattcccaatgtcagataactgttttgacattagttgatgaaggtagtgctatgtgtttgtgtgtattaagttaaagtaagtttgggcgatgagtttgtctttgctggcagtagtgtgtatgattaaacctggggcttcaagcagctagggaacgagatctgtcagctgagttatatcccaaaagtgggttttactccgttctcccacctccccagcaaatgattaagacttgggtcagtttatgatcttatagggtgggaaccatgttctgggtgggaaaactcagggttgaagatgtaccccagaaggtaattaggcctaggtctgccttaaggctgtaccctcttctaccttcttgctcaaacaaggctgccttgtttaagatctcgaaaacagggttcctatctactggacacctattttgtcctgtcaactgttagggtggtgcaaacactgctccctcccctctaacacaggcacaatctgttcatacacaatgggaggcttgtgctctgggaattgcacttggcctgtatcatatttgcccctggaacaagctttggaagtatgtttctggtcattggtgcaaacaagggagctgttagacttgaaaagatgtaatcccagccttcaggaggcagaagtaagagttgagttcaagagtaagccaacaagttaggtactaagggacacataaaattctaagtgctattttcttctgtatttcaggtaatcaatacctgtttgtaccaccaaatcgttacatattccacggtgctgaggtatactcagactctgaagatgacgtcttgtcctctagttcctgtggcagtaacagtgacagtggcacatgccagagtccaagtttagaagaacccttggaagatgaaagtgaaattgaagaattctacaatggcttggaagatgatacggagaggcccgaatgtgctggaggatctggatttggagctgatggaggggatcaagaggttgttaatgaagctatagctacaagacaggaattgacagatgtaaactatccatcagacaaatcataacactattgaagctgtccggattcaggaattgctccaccagcattgggaactttagcatgtcaaaaaatgaatgtttacttgtgaacttgaacaaggaaatctgaaagatgtattatttatagactggaaaatagattgtcttcttggataatttctaaagttccatcatttctgtttgtacttgtacattcaacactgttggttgacttcatcttcctttcaaggttcatttgtatgatacattcgtatgtatgtataattttgttttttgcctaatgagtttcaaccttttaaagttttcaaaagccattggaatgttaatgtaaagggaacagcttatctagaccaaagaatggtatttcacacttttttgtttgtaacattgaatagtttaaagccctcaatttctgttctgctgaacttttatttttaggacagttaactttttaaacactggcattttccaaaacttgtggcagctaactttttaaaatcacagatgacttgtaatgtgaggagtcagcaccgtgtctggagcactcaaaacttggtgctcagtgtgtgaagcgtacttactgcatcgtttttgtacttgctgcagacgtggtaatgtccaaacaggcccctgagactaatctgataaatgatttggaaatgtgtttcagttgttctagaaacaatagtgcctgtctatataggtccccttagtttgaatatttgccattgtttaattaaatacctatcactgtggtagagcctgcatagatcttcaccacaaatactgccaagatgtgaatatgcaaagcctttctgaatctaataatggtacttctactggggagagtgtaatattttggactgctgtttttccattaatgaggaaagcaataggcctcttaattaaagtcccaaagtcataagataaattgtagctcaaccagaaagtacactgttgcctgttgaggatttggtgtaatgtatcccaaggtgttagccttgtattatggagatgaatacagatccaatagtcaaatgaaactagttcttagttatttaaaagcttagcttgccttaaaactagggatcaattttctcaactgcagaaacttttagcctttcaaacagttcacacctcagaaagtcagtatttattttacagacttctttggaacattgcccccaaatttaaatattcatgtgggtttagtatttattacaaaaaaatgatttgaaatatagctgttctttatgcataaaatacccagttaggaccattactgccagaggagaaaagtattaagtagctcatttccctacctaaaagataactgaatttatttggctacactaaagaatgcagtatatttagttttccatttgcatgatgtgtttgtgctatagacaatattttaaattgaaaaatttgttttaaattatttttacagtgaagactgttttcagctctttttatattgtacatagacttttatgtaatctggcatatgttttgtagaccgtttaatgactggattatcttcctccaacttttgaaatacaaaaacagtgttttatacttgtatcttgttttaaagtcttatattaaaattgtcatttgacttttttcccgttaacttccattgttcatagcatactagcccagtaagggttgctatcactaaatgcctcaagaaagtctatcttaacacatttgttacctgtgtttagtaagactgagggtgttggttttctagtgtcagaccagagtgaatccaaagctggccatgtaaaagacacctggcaaagaaagctaaatacaccaagtggagaaatggtttaatgtggtctgtggttccccctcctcctccaatttggaaagaatgccaaatgagatgacagtacaaatagccagagcctcacccagaacactgctgggtgtggtgggcatgcccacagtaggtgactcttgtacatacacagggactaacttactaacttaagatctcattttttgtagggaggagtgcgctttgaaggaaaaaggtgtgtgtcccaactaagcatttttagacaggagtccgttttagtgaatagcccaaatagcctcaccaaaacaattcaaaatagtgttggctgcaagagttcagcagttgagtgcttactgcttttgtgtggttctcagcttgtgactgggatgcctggcctacacataacacaaaccacctaagttaaatcaaagatattaagtattttaagctttttatggcatttctgttagatgtaccacatcaattcatattcagttatcccacattaataaactgaaaataagcaacagcaccatttaaaatctcagattttctaagcactaaaaattgaatactgcagcatcagtagttttaaagctgtaactcgtgattgtttctcacagtggcttatatctatctcaggactcagaaagcttaaagttaagtaacacttaatttaggtctgcatattgtagcaaaaagatcatttccgccgggcgtggtggcccatgcctttaatcccagcactctggaggcagaggcaggcggatttctgagttcgaggccagcctggtctacaaagtgagctccaggacatccagggctatacagagaaaccctgtctagagatcatttccaccatgatttttacagatagaatctgcaagtgagactgaatcataaattttaacccttaaaactctgttcaattacaaccatagaaactactggtatctgaatgtcactattttattacaaaatttttatttacaaaatggaaaaataatcaaatgactgtgggcaggccatcgtagtctttccccccagtgattgaagaaacagtaagcaacatttccatgcacccacacatcaggtaatttccgaaatatgcaaactcttaaaattcctgtgagtaaaactttaatgtattcacaatacttgtatgaggatggacaattcatggttctgtacagtttagtattaatgcacagtttttaattttgggctttcatcagtacagtagtgaacaatttataagtaagaattacagaagtaactctcactgtgctgaattcacaagagaaacacgagtggtttttgtactaaacagaaaagtccaaggtcatattaaactgaagccttcattgtgatcaatagcttggatcagtttacatcggagggtttctttctctgtatattttgggagatctagaagattaaaacaggtatgggaaaccgggagatagctctcaccacctcctgttgactggatgactagtttcagactcttcataccaagaatgggaatccgatcactacctgtcaaaaatactgccaaggaaaacaatttagacaacacagtctagttttgcattcattattttaaaggaagtactcaatacttgatgaacaatggcaaaagcttttagaaatcctttttggaagagccatttagaaaactggttagttaagctttctaagttctctccttttccatgtgggtcccagggactgaactccaagtcaggcttcccttgctaagctgcgctcccagctctctctagttctccaacgctgtttctttgacacaggatctcaggcaactgcagacatcacttgagctctatagataaagcccacaactataaaagctccagggggtctgacgcatggcatacccttctggccttccgggatacctgtatacattatactcggcacagatacaacatacatgtaaataaaaatcttaataacaaagactaaactgagctaatactttagattattgtctcagaatatacttacatagaaattgtttcttcttctctagtggtaattcatgaaacacttcccaaaaaatttttatcgtgggatggtctgcccaatactctcctttgtattctgtattctaaaagtaatacaaccttttttagcattaaggagtattccatgaaacctatcatgttaagagtaggaatattacaaccctggcattttacaatgtgaagatactgactccccaggaaggaagaacagacccgtcacctttgtaagtaagagtttactaaaatagtgagaggtttattaaacacaaacatgggactgggtaaatgtttcttgtactattttcaggaagacaaatcagaatgtttctactaattttttccccctttttattacatgtaagtacactgtagctgtcttcagatgcaccagaagagggcatcagatctcattatgggtggttgtgagacaccatgtggttgctgggatttgaacttcagaccttcggaagagcagtcaggtgctcttacccactgagccatctcaccagcccctttccccgctttaaaacaaaagtgttaagagcaccaaggcttttccctttccttttttttaaacaattttcttattagatattttcttcatttacatttcaaatgctaccaaggcttttccttttgtagtcctctcccaccatggtcaagcttaacactgggatttggtagaaaaacaggaaacaaaagccttaattaagcatgggtagaaagtcactcagtcttgggctagggttcctatagcacgcctcccaatcacctcaccagtgccgccacacagtgcactgtagggcaggaggggcaggcaagtgtctacaataagcacagcaaggagctataggaagggcaaaagcacacaagggctagatttccaataacgcatagttttgcttttccactgacaagtagagattggtttttccttaccttctccagttctttccaatcataatttgtattcccaataaccatagcttgtaattcattaggctggaagagcagaagaacttttcctccacagaccttatgaaagcccgcatggaaagcatcaaataaagatgccactgatttattgaatatgtaatccacataggcatcaacaaactcctgcctagaaataaaagccaggcatagatgcacaagtcacacgcaccatttatggagaatacccaatgcttatcattacatttttgctccttcatttcttgctactttcaactaaactcagaaaaatgagtatagagttcaatgggtaaaaagaaaccaatcccaagctacactaaaccatagctaattccttcattaaaaataaaccaaaccaaacaagcaaacaaaaacatcttaaagatgatcttgaaagaatgcttaatagctatttcttagaaatatatattgtatagattccttaaaaacaaagggactgaaaaatctacttgttctcagtaggacggagctgacccagggctctaactccctccctcttgcccagtagttaggccagaccagctgttgaactgagtattttttgatgatttaggaatactttgaaattatatgatagccagttaccttattctgaaagtatttttcttaagaaatagcctagaaataatctcaagtgccttatagacaggctttaaaaacaaaacaaaacaagcccacagggtctctcagagactactaggctgtcctcaaactcaaatccaagcgcttttgcttcctgagttttgggattaaaggcgtgcaccattgcctggcactttctaagactgagtttagttcagcatctgaactgctgttctgcaaaataaactggtgtcttctgggtattccagtccatcactgctttctctgatttgctaatcagtggccatcatttcctttcaaaccatgtttgctgttgtttcttctcatttctcatgtttgttttgttcctttacttataggcgatttcacgagcaaaggcacattaaacgttcaaatgttatggtgtttgtttgtttgtttgtgtttggactatgagacagggcatcattacatagtcctagctggatcagagacagctgcctgcctttgcctcctgaagtgcgctaccatacacaacatacaatagtgttttctttaagttgtgatgttttcagtaatttagaaaatgcctactaaccctggtcacttcgctgagtccagtgcaatccacttaccgattctgtctattaacagcagtgtctgccccgttcagaaccagctcttttacttctgttgcaccgaagttctcaactgtgatctagaaattaaaaaaaaaaagtagcatctctcattaaatatagtcaaaattatgccaccaagagcctactcacaatttttgggggactgagggggggagtttgagttttttttgagacagggtttctctgtatagccctaattgtcctggaactcactttgtagaccacactggcctcgaactcagaaatctgcctgcctctgcctccgaagtgctgggattaaaggtgtgtgccaccactgcctggctttttcttttttttaagattcattcattcattcattcatttattataagtacactgtagctgtcttcagacacaccagaagagggcattggatgccattacagatggttgtgagccaccatgtggttactggaaattgaactcaggacctctggaagagcagtcagtgctcttaactgctaaactacccagcctagttagttaatttttaaaaaattaactccctcctaaactcattcctacctgttatactgggcccctgcctgccagagtaagcaatataaactcaagagtctctctcagagggcaggaagctatgctgcaaaggtgattctgagagcagaccagctgcctggaggaagtcacttggcaaggacactctccaccctgctgagctgcctacaggctgtgcagtgcagtgagctctaggttcccaacttttgtgacctgtcacctgcgttggggtgagtcttggtgatgcaactgtcatttctgctcctgtaagtaattccctatccatattcctgtaagcaaccccaatctcactggtttaccaagctgggctttggtggtatccatctctctccaggaaaagttttgtcacacaagacccaaacataaagtgctgctgtggctggatggggtcacccactttggaaacacaccaggaaccatacatgtaaagaaaactggtgctgccttcaccggaagccttcaactgaggtgtgtaggtctgaatatgcgaatgtgtatcaaagtgcaggtgcctgtggaggccagaggcatggtgccatgtaagagaaataagtgttcttctcttgcagctcccagtaagatttttcttgtgataaataaaataaaataatgcactaattttacttcaacttaaagcatgcactgaatttccttgcaaacacgctggacgttccaatcttacaacaatctaagaggtctggcaagatggctcagtagataaaggtgcttgcttgtgcaagcctgacaccgtgagttcaattcccagatccatggtggaaggacagaagtgacaagttaagcaagcatggccgtcagtgaggaggagagacaaactggacaaatccatctacgaggcagtctaagtgcattagtaacgctacgctgtgtctaaatcatctttccatctctgatcgtcctatagccacaggctcagaacgaatccctgactctcctaagttctcttcttaattagcaaagtacctaattactgaaggcatagagcaggtgaacaatggctgacatgcaactatttcagttttccttatctgtaaattaaggataaaaactcacaggatcggtgtggataaaatgaaataatgctgggacatagtaaaagctcaataaatgtatcgtggctggctgctcttccagtgaacctggatttcaagtctcagtccccacataacagctaacaaccatctctatgtaactccagtcccaagatgtgttgtgcccacataatcatgcagactaatacccatatgtactggctagttttgtgtcaacttgacacagctggagttatcacagagaaaggaccttcagttgaggaaatgcctccatgagatccaactgtaaggcattttctcaattagtgatcaagggggaaaggccccttgtgggtgggaccatctctgggctggtagtcttggttctataagagagcaggctgagcaagccaggggaggcaagccagtaaagaacacccctccatggcctctgcatcagctcctgctttctgacctgcttgagttccagtcctgacttcctttggtgatgaacagctgtatggaagtgtaagctgaataaaaaaccctttcctccccaacttgcttcttggtcatgatgtttgtgcaggaatagaaaccctgactaagacaccatataatatccatcttaaatgtatacattttatttatttatttatttatttatttttgatttttcgagacagggtttctctgtatagccctggctgtcctggaactcactttgtagaccaggctggcctcgaactcagaaatccacctgcctctgcctcccgagtgctgggattaaaggcgtgcgccaccacgcctggcttaaatgtatacattttaatatacatttaaaaaactgcattggtggcagaggcaggcagatctccttgagttagagggcaacctggtctacagagcaatttacaggccagtcagggctacaaagaaaccctgtcttggtaaacaacaaaaagcatttgctctatggaacgagaaatcctaaccgaggccaagctcctgctcatcttaccgtaaagtttagacaaaatgtttcctctatgtcatcttctggatagtccagcaattgctgcatgcttctgcaaacagaacagaacaaaaccaaaccgagtgcgtctttacagtaaaacgtatgttcttactgacagctctgctcatgagtcagcacacactgggctgtcctgaacccgttagcacagacaaggaagccacggctgtctccagcaggcaagcctcgtgtgcagtcctctcctctcagcctcaagccctcctcggcactttccaaccactgacctcccgacggctggcatcagctctttcagatcatccagggacggcttccttttcagcagtttcttatataaagccaaagggaaatggaggtccacaatggtaaaattataaattgctaatccacagataacaccgatcaagtggaacaaatcactgtcttcaaatgtctaaaacacagagaagaaaaaagtgaaagacttgtcttgcaagctaaaccttgatttttttagtacaaaaacttattttctacagtagaaaaaaaaatcgactacacagaaaaatcaaccaatgagaaagaagctcactcctattgccatctccacagcatgaacatcatttggcacagtcccaggcaatgcactttctttttagaaacttgtctattagcggcgagtgggattacttaacttaaatccttagcgctggaaattaaaggcatgctccatcactctcagccttgaatttaaaaacaaaaaacaacaccaaaaatttactgttttaaggattgtggcttttgggaggcagaggcaggaggatctctgttagttcaaggccagtatggtatatatagccagttccagaactatcaagattacagacacatatatagtttcataactgacttttccccccagaaacaaaagcacctccgtgtcgttaaatactaaatgtgggctgttaggctgtgtattatggacatggccctgagtctgacacccaggatgggtgggaatgagatgatggctgacagacaacaaaagcaaaataacctttaaagaaaatctgatgggtttggggggtgggggggactaggaaaggggataacatttgaaatgtaaataaagaaaatatccaataagaaaaatctaaataaaaaaaagaaaagaaaatttgttcttggtgtgtgtatatgtgtgcatatacatgtgcaagacaaccctgggtatcatcaagaaagctagccacctcctttgaaattcggcctttcactggcctggagctcagcaatgagtctagactgtctggccagtgcccggagatctgcttggactctgccttcccagcagggggttacacatacatacctccttgcctagctttctgttgtgtttttttcctgaggcaaggcctggcctaaaactgaattttagatgtagcctaagctgtcctgagactcaactctcaagtgctaggattacaggtgtgagtcacagtagcctgactatgccacgatttttttggtgggaggggggaataaagatttattttatgaatatgggtgttatgtctgcatatagatctactcaccagaagagggcactggatcccatgggactacgacagttgtgagtggccatgtgggaattgaactcaggacctcaggaatagcagccagtattacttaacccttgagccatctttccatagcccttatgccaagcttttcaagtggatggatgttggggatcaaattcaagtctttatgcttctaagacatttgctttattccaaatgagctataaacacaacccttaaaacagtaattttttttcaaccgaggctgagagagctagaccatgcctttaattccagcgctcaggaagaagcaggggacctgtgagctggagtccagtctggtttacacagggagctccaggttacttagaggtacatagtgagaccaagtctcaagcctaacaaaggaaaacaaaacccgacaacatacattcaagttatggtggctcacccatgatcctggcaactagggaggctaaactaagagaatcaggaactcggcaggggtggtggcacacactggcagaagcaggggatctctgtgagtttaagtccattctggtctacatagagttccagaatagccagggctacatagagagaccccatttcaaaaataaagaaaaataaaacaagaaaacacaaaagcagttgtaaataaggaaggagagaatgacagcaagcggggcgtcttccaatgtgtctttttctgtaagtctgatttacaattatgcaaacattttatacttataaaattaaattatactaaaataacaaatccaaaaatcccttaacttaaacatgtacacattgataaactaactataataatcaaattaatagagttcaactatttcaaatgacagcaaacatcattagttttatctctactcactataacttaaagatgaaataaattacgcaataacttaaagtgtatttactttcatgtacatcataatattggtgctattgtttggctgtattttaaagtcttgaccattttggagaactgcatagtgctgaggatgcttgacaagagcccaggcaagaacacctgacgccctcaatagacaggacaatgtggatgggcattagtaaagagaactgcaacagatagaaaacacaagaccaagacctaggctgcggccactggagggcgccagcgaacactgggacaggcccatgagctggatgcctaacaataaggctgagctatttctctctctatccaagcacccaagacagtataattccagtgcagtagtttgttgcccttaggaattaccctaagtactgaacatcaatagctgctatcccgatacaagacagccttcaaaaagactaaatgtacatataaagaaatcttatatatttataacataggcgactcagaaatttttttacaaaatagaatccaaacattttctgtaaaggaccagctggtaacatcttagtcttaactgaacacggggtcctagtaactatcagctgtctcccatgcacacgtgtcaaagcagtagtatccaacaggtggcttcctggatccaaatatgtgctgggaaggaagatctggctcactgctaccgtctactggccctgaatctgaattacaagcggtcagtgatctctaatgctaagttctctccagaagagaggctaagacagtaatcaccatgaaattttccacacactcagaaggaaaattattttaaagctgactgttcttcaatttattttaatttgaaatgtgtaaaacacaagactgtgttttgacaatgtctaaaagttcctaatttcaagctgtaataaaacagacctctgtctgactagaatatgttagaaacaaagatctaaagagataattgtggtagacgggcatattaccttatctgaaaaccaaatgagcctggaatcttcataatatcgaaacatgccgtatttaggatccaacaattccctcatgataagcaagaaaaattctttgcgaacacctcctgcatcaacagcatcttctccaacaaatataacctaaaacagggtgatgtgaacactgaatagaccatgaagaaccaaaagattacatctcagagacctgtgaacgagctattcactgctaatgaatctcagcaacctataatttcaaaagttaaagatataatttatatgactcagtggccagaagcacttgttgctcttgcagatgacccaggtttggttcccagcgcccacttacaattacacaggatctaaccctctctctggcttgtacatactgtacatacacataagcaaaacagagaatgaagtaaatctgtaattaaaaaaaacaaacaaaccacaaagtgtttcaaatacacacgtacacacacacaccctagaacagcttttacagagaagtcccaatttatgtggagtgcttgcttaccttgagtggctttttataatctatattcttggttttcctgaggacttccatcgcatctcctacaatattctctctgcgaacaactagaattaagcaaggattcacagactcgatcactgggagaaaaagagaggagacattctgcctgtgggcctggtcaatggccatctagaaaacaaacaaacacaaatcagacttttattttacttttaggcagtcttatttaacctaactgtgctgtgaagctgagtgtggaggtctgaatgtgaataagccccataagctcatgtattgagtactgagttcccggtggtgggctactcaggaaggattatgaggtgtggtcttgttggaggacgcatgtcatggaacatgagctttgaggtctcaaaagcccacatcaggcccagccacttctgcctgcagattaggatacaaaactctggagcaattgctcccgtgccactgctgtctttctgccgtggtgactcaccctctacaactgtaaccaagtccccaattaaacgctttcccttggaagtttccgattgctagacgagggctgggatcacatgcaagcatcaccatacctagttaatttatttataactaacataaagtcatgagtttcactgtgatatcacacatatataaaataagtgtgcgtatatgtatatacatacatatatatatatatatatatgtatgtatccctccccataaaacatcccagccccaccaccaatatatatgacctatgaccaacctcaaggtaatttcctgtccctgcctgcctgcctgcctgcctgcctgcctgccttccttccttccttccttccttccttccttccttccttttctgagctagggcctctgtagtccgggctgttttagaccttgctata

SEQ ID NO: 80 - DNA, 44028 bp, Mus musculus
tatagcaaggtctaaaacagcccggactacagaggccctagctcagaaaaggaaggaaggaaggaaggaaggaaggaaggaaggaaggcaggcaggcaggcaggcaggcaggcaggcagggacaggaaattaccttgaggttggtcataggtcatatatattggtggtggggctgggatgttttatggggagggatacatacatatatatatatatatatatgtatgtatatacatatacgcacacttattttatatatgtgtgatatcacagtgaaactcatgactttatgttagttataaataaattaactaggtatggtgatgcttgcatgtgatcccagccctcgtctagcaatcggaaacttccaagggaaagcgtttaattggggacttggttacagttgtagagggtgagtcaccacggcagaaagacagcagtggcacgggagcaattgctccagagttttgtatcctaatctgcaggcagaagtggctgggcctgatgtgggcttttgagacctcaaagctcatgttccatgacatgcgtcctccaacaagaccacacctcataatccttcctgagtagcccaccaccgggaactcagtactcaatacatgagcttatggggcttattcacattcagacctccacactcagcttcacagcacagttaggttaaataagactgcctaaaagtaaaataaaagtctgatttgtgtttgtttgttttctagatggccattgaccaggcccacaggcagaatgtctcctctctttttctcccagtgatcgagtctgtgaatccttgcttaattctagttgttcgcagagagaatattgtaggagatgcgatggaagtcctcaggaaaaccaagaatatagattataaaaagccactcaaggtaagcaagcactccacataaattgggacttctctgtaaaagctgttctagggtgtgtgtgtgtacgtgtgtatttgaaacactttgtggtttgtttgttttttttaattacagatttacttcattctctgttttgcttatgtgtatgtacagtatgtacaagccagagagagggttagatcctgtgtaattgtaagtgggcgctgggaaccaaacctgggtcatctgcaagagcaacaagtgcttctggccactgagtcatataaattatatctttaacttttgaaattataggttgctgagattcattagcagtgaatagctcgttcacaggtctctgagatgtaatcttttggttcttcatggtctattcagtgttcacatcaccctgttttaggttatatttgttggagaagatgctgttgatgcaggaggtgttcgcaaagaatttttcttgcttatcatgagggaattgttggatcctaaatacggcatgtttcgatattatgaagattccaggctcatttggttttcagataaggtaatatgcccgtctaccacaattatctctttagatctttgtttctaacatattctagtcagacagaggtctgttttattacagcttgaaattaggaacttttagacattgtcaaaacacagtcttgtgttttacacatttcaaattaaaataaattgaagaacagtcagctttaaaataattttccttctgagtgtgtggaaaatttcatggtgattactgtcttagcctctcttctggagagaacttagcattagagatcactgaccgcttgtaattcagattcagggccagtagacggtagcagtgagccagatcttccttcccagcacatatttggatccaggaagccacctgttggatactactgctttgacacgtgtgcatgggagacagctgatagttactaggaccccgtgttcagttaagactaagatgttaccagctggtcctttacagaaaatgtttggattctattttgtaaaaaaatttctgagtcgcctatgttataaatatataagatttctttatatgtacatttagtctttttgaaggctgtcttgtatcgggatagcagctattgatgttcagtacttagggtaattcctaagggcaacaaactactgcactggaattatactgtcttgggtgcttggatagagagagaaatagctcagccttattgttaggcatccagctcatgggcctgtcccagtgttcgctggcgccctccagtggccgcagcctaggtcttggtcttgtgttttctatctgttgcagttctctttactaatgcccatccacattgtcctgtctattgagggcgtcaggtgttcttgcctgggctcttgtcaagcatcctcagcactatgcagttctccaaaatggtcaagactttaaaatacagccaaacaatagcaccaatattatgatgtacatgaaagtaaatacactttaagttattgcgtaatttatttcatctttaagttatagtgagtagagataaaactaatgatgtttgctgtcatttgaaatagttgaactctattaatttgattattatagttagtttatcaatgtgtacatgtttaagttaagggatttttggatttgttattttagtataatttaattttataagtataaaatgtttgcataattgtaaatcagacttacagaaaaagacacattggaagacgccccgcttgctgtcattctctccttccttatttacaactgcttttgtgttttcttgttttatttttctttatttttgaaatggggtctctctatgtagccctggctattctggaactctatgtagaccagaatggacttaaactcacagagatcccctgcttctgccagtgtgtgccaccacccctgccgagttcctgattctcttagtttagcctccctagttgccaggatcatgggtgagccaccataacttgaatgtatgttgtcgggttttgttttcctttgttaggcttgagacttggtctcactatgtacctctaagtaacctggagctccctgtgtaaaccagactggactccagctcacaggtcccctgcttcttcctgagcgctggaattaaaggcatggtctagctctctcagcctcggttgaaaaaaaattactgttttaagggttgtgtttatagctcatttggaataaagcaaatgtcttagaagcataaagacttgaatttgatccccaacatccatccacttgaaaagcttggcataagggctatggaaagatggctcaagggttaagtaatactggctgctattcctgaggtcctgagttcaattcccacatggccactcacaactgtcgtagtcccatgggatccagtgccctcttctggtgagtagatctatatgcagacataacacccatattcataaaataaatctttattcccccctcccaccaaaaaaatcgtggcatagtcaggctactgtgactcacacctgtaatcctagcacttgagagttgagtctcaggacagcttaggctacatctaaaattcagttttaggccaggccttgcctcaggaaaaaaacacaacagaaagctaggcaaggaggtatgtatgtgtaaccccctgctgggaaggcagagtccaagcagatctccgggcactggccagacagtctagactcattgctgagctccaggccagtgaaaggccgaatttcaaaggaggtggctagctttcttgatgatacccagggttgtcttgcacatgtatatgcacacatatacacacaccaagaacaaattttcttttcttttttttatttagatttttcttattggatattttctttatttacatttcaaatgttatcccctttcctagtcccccccaccccccaaacccatcagattttctttaaaggttattttgcttttgttgtctgtcagccatcatctcattcccacccatcctgggtgtcagactcagggccatgtccataatacacagcctaacagcccacatttagtatttaacgacacggaggtgcttttgtttctggggggaaaagtcagttatgaaactatatatgtgtctgtaatcttgatagttctggaactggctatatataccatactggccttgaactaacagagatcctcctgcctctgcctcccaaaagccacaatccttaaaacagtaaatttttggtgttgttttttgtttttaaattcaaggctgagagtgatggagcatgcctttaatttccagcgctaaggatttaagttaagtaatcccactcgccgctaatagacaagtttctaaaaagaaagtgcattgcctgggactgtgccaaatgatgttcatgctgtggagatggcaataggagtgagcttctttctcattggttgatttttctgtgtagtcgatttttttttctactgtagaaaataagtttttgtactaaaaaaatcaaggtttagcttgcaagacaagtctttcacttttttcttctctgtgttttagacatttgaagacagtgatttgttccacttgatcggtgttatctgtggattagcaatttataattttaccattgtggacctccatttccctttggctttatataagaaactgctgaaaaggaagccgtccctggatgatctgaaagagctgatgccagccgtcgggaggtcagtggttggaaagtgccgaggagggcttgaggctgagaggagaggactgcacacgaggcttgcctgctggagacagccgtggcttccttgtctgtgctaacgggttcaggacagcccagtgtgtgctgactcatgagcagagctgtcagtaagaacatacgttttactgtaaagacgcactcggtttggttttgttctgttctgtttgcagaagcatgcagcaattgctggactatccagaagatgacatagaggaaacattttgtctaaactttacggtaagatgagcaggagcttggcctcggttaggatttctcgttccatagagcaaatgctttttgttgtttaccaagacagggtttctttgtagccctgactggcctgtaaattgctctgtagaccaggttgccctctaactcaaggagatctgcctgcctctgccaccaatgcagttttttaaatgtatattaaaatgtatacatttaagccaggcgtggtggcgcacgcctttaatcccagcactcgggaggcagaggcaggtggatttctgagttcgaggccagcctggtctacaaagtgagttccaggacagccagggctatacagagaaaccctgtctcgaaaaatcaaaaataaataaataaataaataaataaaatgtatacatttaagatggatattatatggtgtcttagtcagggtttctattcctgcacaaacatcatgaccaagaagcaagttggggaggaaagggttttttattcagcttacacttccatacagctgttcatcaccaaaggaagtcaggactggaactcaagcaggtcagaaagcaggagctgatgcagaggccatggaggggtgttctttactggcttgcctcccctggcttgctcagcctgctctcttatagaaccaagactaccagcccagagatggtcccacccacaaggggcctttcccccttgatcactaattgagaaaatgccttacagttggatctcatggaggcatttcctcaactgaaggtcctttctctgtgataactccagctgtgtcaagttgacacaaaactagccagtacatatgggtattagtctgcatgattatgtgggcacaacacatcttgggactggagttacatagagatggttgttagctgttatgtggggactgagacttgaaatccaggttcactggaagagcagccagccacgatacatttattgagcttttactatgtcccagcattatttcattttatccacaccgatcctgtgagtttttatccttaatttacagataaggaaaactgaaatagttgcatgtcagccattgttcacctgctctatgccttcagtaattaggtactttgctaattaagaagagaacttaggagagtcagggattcgttctgagcctgtggctataggacgatcagagatggaaagatgatttagacacagcgtagcgttactaatgcacttagactgcctcgtagatggatttgtccagtttgtctctcctcctcactgacggccatgcttgcttaacttgtcacttctgtccttccaccatggatctgggaattgaactcacggtgtcaggcttgcacaagcaagcacctttatctactgagccatcttgccagacctcttagattgttgtaagattggaacgtccagcgtgtttgcaaggaaattcagtgcatgctttaagttgaagtaaaattagtgcattattttattttatttatcacaagaaaaatcttactgggagctgcaagagaagaacacttatttctcttacatggcaccatgcctctggcctccacaggcacctgcactttgatacacattcgcatattcagacctacacacctcagttgaaggcttccggtgaaggcagcaccagttttctttacatgtatggttcctggtgtgtttccaaagtgggtgaccccatccagccacagcagcactttatgtttgggtcttgtgtgacaaaacttttcctggagagagatggataccaccaaagcccagcttggtaaaccagtgagattggggttgcttacaggaatatggatagggaattacttacaggagcagaaatgacagttgcatcaccaagactcaccccaacgcaggtgacaggtcacaaaagttgggaacctagagctcactgcactgcacagcctgtaggcagctcagcagggtggagagtgtccttgccaagtgacttcctccaggcagctggtctgctctcagaatcacctttgcagcatagcttcctgccctctgagagagactcttgagtttatattgcttactctggcaggcaggggcccagtataacaggtaggaatgagtttaggagggagttaattttttaaaaattaactaactaggctgggtagtttagcagttaagagcactgactgctcttccagaggtcctgagttcaatttccagtaaccacatggtggctcacaaccatctgtaatggcatccaatgccctcttctggtgtgtctgaagacagctacagtgtacttataataaatgaatgaatgaatgaatgaatcttaaaaaaaagaaaaagccaggcagtggtggcacacacctttaatcccagcacttcggaggcagaggcaggcagatttctgagttcgaggccagtgtggtctacaaagtgagttccaggacaattagggctatacagagaaaccctgtctcaaaaaaaactcaaactccccccctcagtcccccaaaaattgtgagtaggctcttggtggcataattttgactatatttaatgagagatgctactttttttttttaatttctagatcacagttgagaacttcggtgcaacagaagtaaaagagctggttctgaacggggcagacactgctgttaatagacagaatcggtaagtggattgcactggactcagcgaagtgaccagggttagtaggcattttctaaattactgaaaacatcacaacttaaagaaaacactattgtatgttgtgtatggtagcgcacttcaggaggcaaaggcaggcagctgtctctgatccagctaggactatgtaatgatgccctgtctcatagtccaaacacaaacaaacaaacaaacaccataacatttgaacgtttaatgtgcctttgctcgtgaaatcgcctataagtaaaggaacaaaacaaacatgagaaatgagaagaaacaacagcaaacatggtttgaaaggaaatgatggccactgattagcaaatcagagaaagcagtgatggactggaatacccagaagacaccagtttattttgcagaacagcagttcagatgctgaactaaactcagtcttagaaagtgccaggcaatggtgcacgcctttaatcccaaaactcaggaagcaaaagcgcttggatttgagtttgaggacagcctagtagtctctgagagaccctgtgggcttgttttgttttgtttttaaagcctgtctataaggcacttgagattatttctaggctatttcttaagaaaaatactttcagaataaggtaactggctatcatataatttcaaagtattcctaaatcatcaaaaaatactcagttcaacagctggtctggcctaactactgggcaagagggagggagttagagccctgggtcagctccgtcctactgagaacaagtagatttttcagtccctttgtttttaaggaatctatacaatatatatttctaagaaatagctattaagcattctttcaagatcatctttaagatgtttttgtttgcttgtttggtttggtttatttttaatgaaggaattagctatggtttagtgtagcttgggattggtttctttttacccattgaactctatactcatttttctgagtttagttgaaagtagcaagaaatgaaggagcaaaaatgtaatgataagcattgggtattctccataaatggtgcgtgtgacttgtgcatctatgcctggcttttatttctaggcaggagtttgttgatgcctatgtggattacatattcaataaatcagtggcatctttatttgatgctttccatgcgggctttcataaggtctgtggaggaaaagttcttctgctcttccagcctaatgaattacaagctatggttattgggaatacaaattatgattggaaagaactggagaaggtaaggaaaaaccaatctctacttgtcagtggaaaagcaaaactatgcgttattggaaatctagcccttgtgtgcttttgcccttcctatagctccttgctgtgcttattgtagacacttgcctgcccctcctgccctacagtgcactgtgtggcggcactggtgaggtgattgggaggcgtgctataggaaccctagcccaagactgagtgactttctacccatgcttaattaaggcttttgtttcctgtttttctaccaaatcccagtgttaagcttgaccatggtgggagaggactacaaaaggaaaagccttggtagcatttgaaatgtaaatgaagaaaatatctaataagaaaattgtttaaaaaaaaggaaagggaaaagccttggtgctcttaacacttttgttttaaagcggggaaaggggctggtgagatggctcagtgggtaagagcacctgactgctcttccgaaggtctgaagttcaaatcccagcaaccacatggtgtctcacaaccacccataatgagatctgatgccctcttctggtgcatctgaagacagctacagtgtacttacatgtaataaaaagggggaaaaaattagtagaaacattctgatttgtcttcctgaaaatagtacaagaaacatttacccagtcccatgtttgtgtttaataaacctctcactattttagtaaactcttacttacaaaggtgacgggtctgttcttccttcctggggagtcagtatcttcacattgtaaaatgccagggttgtaatattcctactcttaacatgataggtttcatggaatactccttaatgctaaaaaaggttgtattacttttagaatacagaatacaaaggagagtattgggcagaccatcccacgataaaaattttttgggaagtgtttcatgaattaccactagagaagaagaaacaatttctatgtaagtatattctgagacaataatctaaagtattagctcagtttagtctttgttattaagatttttatttacatgtatgttgtatctgtgccgagtataatgtatacaggtatcccggaaggccagaagggtatgccatgcgtcagaccccctggagcttttatagttgtgggctttatctatagagctcaagtgatgtctgcagttgcctgagatcctgtgtcaaagaaacagcgttggagaactagagagagctgggagcgcagcttagcaagggaagcctgacttggagttcagtccctgggacccacatggaaaaggagagaacttagaaagcttaactaaccagttttctaaatggctcttccaaaaaggatttctaaaagcttttgccattgttcatcaagtattgagtacttcctttaaaataatgaatgcaaaactagactgtgttgtctaaattgttttccttggcagtatttttgacaggtagtgatcggattcccattcttggtatgaagagtctgaaactagtcatccagtcaacaggaggtggtgagagctatctcccggtttcccatacctgttttaatcttctagatctcccaaaatatacagagaaagaaaccctccgatgtaaactgatccaagctattgatcacaatgaaggcttcagtttaatatgaccttggacttttctgtttagtacaaaaaccactcgtgtttctcttgtgaattcagcacagtgagagttacttctgtaattcttacttataaattgttcactactgtactgatgaaagcccaaaattaaaaactgtgcattaatactaaactgtacagaaccatgaattgtccatcctcatacaagtattgtgaatacattaaagttttactcacaggaattttaagagtttgcatatttcggaaattacctgatgtgtgggtgcatggaaatgttgcttactgtttcttcaatcactggggggaaagactacgatggcctgcccacagtcatttgattatttttccattttgtaaataaaaattttgtaataaaatagtgacattcagataccagtagtttctatggttgtaattgaacagagttttaagggttaaaatttatgattcagtctcacttgcagattctatctgtaaaaatcatggtggaaatgatctctagacagggtttctctgtatagccctggatgtcctggagctcactttgtagaccaggctggcctcgaactcagaaatccgcctgcctctgcctccagagtgctgggattaaaggcatgggccaccacgcccggcggaaatgatctttttgctacaatatgcagacctaaattaagtgttacttaactttaagctttctgagtcctgagatagatataagccactgtgagaaacaatcacgagttacagctttaaaactactgatgctgcagtattcaatttttagtgcttagaaaatctgagattttaaatggtgctgttgcttattttcagtttattaatgtgggataactgaatatgaattgatgtggtacatctaacagaaatgccataaaaagcttaaaatacttaatatctttgatttaacttaggtggtttgtgttatgtgtaggccaggcatcccagtcacaagctgagaaccacacaaaagcagtaagcactcaactgctgaactcttgcagccaacactattttgaattgttttggtgaggctatttgggctattcactaaaacggactcctgtctaaaaatgcttagttgggacacacacctttttccttcaaagcgcactcctccctacaaaaaatgagatcttaagttagtaagttagtccctgtgtatgtacaagagtcacctactgtgggcatgcccaccacacccagcagtgttctgggtgaggctctggctatttgtactgtcatctcatttggcattctttccaaattggaggaggagggggaaccacagaccacattaaaccatttctccacttggtgtatttagctttctttgccaggtgtcttttacatggccagctttggattcactctggtctgacactagaaaaccaacaccctcagtcttactaaacacaggtaacaaatgtgttaagatagactttcttgaggcatttagtgatagcaacccttactgggctagtatgctatgaacaatggaagttaacgggaaaaaagtcaaatgacaattttaatataagactttaaaacaagatacaagtataaaacactgtttttgtatttcaaaagttggaggaagataatccagtcattaaacggtctacaaaacatatgccagattacataaaagtctatgtacaatataaaaagagctgaaaacagtcttcactgtaaaaataatttaaaacaaatttttcaatttaaaatattgtctatagcacaaacacatcatgcaaatggaaaactaaatatactgcattctttagtgtagccaaataaattcagttatcttttaggtagggaaatgagctacttaatacttttctcctctggcagtaatggtcctaactgggtattttatgcataaagaacagctatatttcaaatcatttttttgtaataaatactaaacccacatgaatatttaaatttgggggcaatgttccaaagaagtctgtaaaataaatactgactttctgaggtgtgaactgtttgaaaggctaaaagtttctgcagttgagaaaattgatccctagttttaaggcaagctaagcttttaaataactaagaactagtttcatttgactattggatctgtattcatctccataatacaaggctaacaccttgggatacattacaccaaatcctcaacaggcaacagtgtactttctggttgagctacaatttatcttatgactttgggactttaattaagaggcctattgctttcctcattaatggaaaaacagcagtccaaaatattacactctccccagtagaagtaccattattagattcagaaaggctttgcatattcacatcttggcagtatttgtggtgaagatctatgcaggctctaccacagtgataggtatttaattaaacaatggcaaatattcaaactaaggggacctatatagacaggcactattgtttctagaacaactgaaacacatttccaaatcatttatcagattagtctcaggggcctgtttggacattaccacgtctgcagcaagtacaaaaacgatgcagtaagtacgcttcacacactgagcaccaagttttgagtgctccagacacggtgctgactcctcacattacaagtcatctgtgattttaaaaagttagctgccacaagttttggaaaatgccagtgtttaaaaagttaactgtcctaaaaataaaagttcagcagaacagaaattgagggctttaaactattcaatgttacaaacaaaaaagtgtgaaataccattctttggtctagataagctgttccctttacattaacattccaatggcttttgaaaactttaaaaggttgaaactcattaggcaaaaaacaaaattatacatacatacgaatgtatcatacaaatgaaccttgaaaggaagatgaagtcaaccaacagtgttgaatgtacaagtacaaacagaaatgatggaactttagaaattatccaagaagacaatctattttccagtctataaataatacatctttcagatttccttgttcaagttcacaagtaaacattcattttttgacatgctaaagttcccaatgctggtggagcaattcctgaatccggacagcttcaatagtgttatgatttgtctgatggatagtttacatctgtcaattcctgtcttgtagctatagcttcattaacaacctcttgatcccctccatcagctccaaatccagatcctccagcacattcgggcctctccgtatcatcttccaagccattgtagaattcttcaatttcactttcatcttccaagggttcttctaaacttggactctggcatgtgccactgtcactgttactgccacaggaactagaggacaagacgtcatcttcagagtctgagtatacctcagcaccgtggaatatgtaacgatttggtggtacaaacaggtattgattacctgaaatacagaagaaaatagcacttagaattttatgtgtcccttagtacctaacttgttggcttactcttgaactcaactcttacttctgcctcctgaaggctgggattacatcttttcaagtctaacagctcccttgtttgcaccaatgaccagaaacatacttccaaagcttgttccaggggcaaatatgatacaggccaagtgcaattcccagagcacaagcctcccattgtgtatgaacagattgtgcctgtgttagaggggagggagcagtgtttgcaccaccctaacagttgacaggacaaaataggtgtccagtagataggaaccctgttttcgagatcttaaacaaggcagccttgtttgagcaagaaggtagaagagggtacagccttaaggcagacctaggcctaattaccttctggggtacatcttcaaccctgagttttcccacccagaacatggttcccaccctataagatcataaactgacccaagtcttaatcatttgctggggaggtgggagaacggagtaaaacccacttttgggatataactcagctgacagatctcgttccctagctgcttgaagccccaggtttaatcatacacactactgccagcaaagacaaactcatcgcccaaacttactttaacttaatacacacaaacacatagcactaccttcatcaactaatgtcaaaacagttatctgacattgggaatcaccctcctctgatcacagtactttgaaagtgattcaacaaaacgcattccataccctcaagccgcttactaatctgctcctttgcaagtctattaggccagcattttctcactgtttctgcaactgaagttctttcatttttgtctgcagtactggaaccaacagccttaaaatctggattttccacattaatgttctcaacattcctactagtctgtacttcttgtggtttttcttccacacaacttgattcagatacttctaaatcattaacattgttgtttgttgcttggtctacaagtgtagcaatcacagaagagtcttgtggtacagttctttcaggtgaacttgagtcttccgaaatatgaagaggtgttggtggcaactctgataaatgaaccaattccttttgtgggcgtggaggtttttcagtaatttctgaaagctttacagggttacaacaaagtttggcatattcaccacctagcctatgacacaactcattaattataacatcgcagtctccaaggagctctacatcaaaatgtagatgaggcaaaggttccctatttattaatatttgaggcacttcatggggtatagaacctaaaaatggggtgaaaaggggagttagaaaagagaagttaattttaacaactgtcaagaggtgggcatggtagcacacccccgctaatcccaacaacaaaaagaggggcaagcagaaatacaaatcacattttcaaaagcaacttcctctcaataacaaacagtagactttcctcccgctcaggccttaaactcatggcacttctgttcaagacttagctgagatcctaggtgttccagttcagaaagcttaaactaatcctttaaattagcttaaaaaaataaaagtctagctggttgtgaaggctcatggctttaacacttgggagggagaggcgggtggatctttgaggacatcaagaatgacagaaacttggacatggaggagtggtttcaattcaaaaaatttaccctttgggattatgttggcccataggctgaactcctagacataagtaaatattcttgtggaactacaactattatggaatagaactcatttttttcatctatcctaggctggcttcaaatctgctgagtagaactcctgactcttcctgccctataccacatggtttacaggcacccctgctaccaaatactaccactcctggctaccaaagattagctgggaacagctttgatcccatccatcactcaggagactggaatgtggggctagcctagtctacataggtatcccaggtgccaagtatagtgagatctgtttcaagaaatggagtgtgttgggggagagggggacgggttatgtgcctacatccatgtaagtgtacaatgtaagtacttggccaaacaaagcaccagatcccctataaactgacaaaatttgggtgtgagtcctgggtccactcaagaatagcgttcttcactactgatcagtccatctctggaacacacaccacacacacacacttctttcatacataagcacataaaatagcaatgaggggatactaatactgtacatattctagagcagtgggtcacacgacctgtggttacaactcctttgggagtgaatgaccctttcacagggcttgcctaagaccatcagaaaatagatatttacattgtgatttataactagcaaaaattataggttaagtaacaaattttttatcattggaggttataacatgaattgtacaaaagggactacatcattaggaaggttgagaactactgtttgggggagggggcgacactttttttttttaaagtgttattttggaagagcaatcagtgctcttaactgctaagccatctcaccagccccttggaaggacactcttaacattcttgtctggccaaagtaggcagacatgcaggcaaacacccccacacataaaataaaaagaagagactattcctggaattaattaaagctgacctctgcaactttaatatgcacactactaaaaagcatgcgtcaaacagttttgctttgattttatatgaactacaattaaaatctgatattctgtcttcacagtcccattcccataccaaaatgtcactttatgagtatcacctaaaaagtaaaacttagaccttcaactattttctaaatgaaaagagtaaaatcacatcttacacagatccacaactcacagcatgcacaactgtcccctaaacatcaacttacttggaattagtgctactggtctcactttcagagaagatccaataacaatgaggaggtcaacttcatctttgtcatacttcatggctctatgaaactgttctggtaagttttcaccaaagaagacaatctctggcttcatgatggcaagtggctcatcagctgggcacctagggcaccgaggaactacctgcacaaaacatgaaagtcaagtagcccaggttagcactcggcacattcccagcaaacaaagcgctgtgaatttgatagtgtctgctgtggagccagtgtggagcctgggggtgggtgacctaccaggcagggacacttttcaccaagccggacaaccaaatttaactcccaggtagaaattgagaactgactcccaggttgatcttctgacctccacagcctgatctctcttatccagtctccacacatgctatcatttccccatacgcactgtgcacccacaagatactataaatatgcaaagagcgtggtaaagaatgaaaacaagaccttttaaaaatatttatgaaaatgactccatttgagtatactgtctttttttttcctggttatacatgagttcaaagttaaaacatatatctggatgtgtgttgctatattttcctgtaataaatacttcattatcattttgaaaagtgttttaaatcttaccacaactaatgtaagactaattccagaggtgttccctgcaacttgtgacttaggcctagattatataaggaggtgcttaggtgtattaaggaggactttaggttggttggtttgagaaagagtttgtaggtgaccatgaccttcaacttcttattctccaacctccttaaatggtaggatttcaggcaggagagcaatcccaggactacaaatgctaagcagccatgatctaccaactgagcaacagaaaaactttttttttaaaaaatgagactcttgctatccagctcaggttagcctgactcttacagtgccctgcctcagccttcaagtgtgctctaacatgctcttgcaaaaaagacctgtttacatcaggatttctaacactcatgcttctcagaaggggggggggggggggatgaagatacaaccaaaagtgaagtttacacaattcctaaaatgagatgaattaaattacctgattaaaaatgtctccacgaacagcttcacaatcaactttgtatttacaaatcaggcaagatgctgttgcaaaggaacctaaaacaaccaaaatagaacatttatttttttttttaatatttatttattattatatctaagtacactgtagctgtcttcagatttcagatgtaccagaggagcgtcagatctcattacagatggttgtgagccaccatgtggttgctgggatttgaactcaggacctttggaagagcagttggtgctcttaaccactgagccatctctccagcaccaaatagaacatttattgaagggctatttgtggcttgctccatgaagactttttacagttttatgtatgaatgctgtatctgcctgcactgctacatgccagaagagggcattcattacagatagttgtgagccaccatgtggttgctggggattgaacacaggacctctggaagagcagtcagtgctcttaatgctcttaaatgcagagccatctctctagccccaccatgaagactaacctgaactctcctgtgacgtatttaaggaatataatacatgtgatatagtttatctactaatacatgtgtatatagaccttatcttctaaagctactatttgcaataacataactctgcaagtgccaaaactgcagctggaaggttccaactgagttaccttagcttggctgtgtcttgtttagtcaaggctagccttgaacttgttatcaaagtatacccaccacatctgaggccttcagctttgtttgtgtccttttcaattttgtccactcaaggttactaaataacgcttagtctcgtcactagacagcagcttctttccaagcccggttacctattgaacgccctacgagagccactgtgacgtcactaaccatgacactgaaggatcctttggattcctgcaacctgctccaaggtatctatattttgagtataatttcgaagtagttttccttccttatctgacaaagctatgaatttgtgacacagagacggctggaactgtccgggatatatttcctatgtaatgcaaaaggcagaaaagtttaattaatgaaagaagcataacagatatcctgcttatgtttagtcaaacaggtactaacaataaatattctgtaataaccaaaatacatgaacattttaaagcatctaaatggatggcccctagaaaaagcttgttactttatgaaaactcagcaattagtaaacttggtcccttgaagtgcaagataacacatcgtaatggactacttaatgtcagaagaaatacataccttagatacatctaaactttgttggctgcaaattcatagtttttctttaaggaaaaaggggggaaaactttacactgaaattacagatattaaaggtatggtgactttacaactaaaaaaaaggctgtcaatgaattatttaaaactttctgtttgattcatcattgataaatatcaacctgctgggagtttaaagctgaagttttaattccttaccaaaattgctttccttccactgcacaggcacatactggtatagaacagagctgctcatgaatgttgagttgctggattttgtgtgtgtgtttttccccccaaataatgcttcaatgctgtttcttctttaaaaacaaagaattcagatatacacatggcaaaaagatcagagaaaaagtatcaattttggtcctcccaactttttaaatatatacatttattaatttactcatttatatgtgcattgatattttgcctgcatgtatgtctgtgtgagggtgtcagatccacatgccatgtgggtgctgggaactgaacccaggccctttggaagagcagccagtgctcttaagtgctgagccatctcttcagcccctcatcctcacaactcctgatagtgttcttattcaatttcatttagtgagtgactgtggcaaggaagtttcttttttctttcaagtagcttacactatctgtttccttacattataggctttatctaacccattataatgttagcaaaaactaaacacaaccatatgtatgtccatcaatacggaaactagttgtgcaaggtacaaccatacagtggaatattcagccactgagagaatgagagggctctcatgtactgacctaaaaatagaccatgacacacatgaacaaagcaagttagtcaccagggtgtaatctttctggttgtattaagcaaaaactgaagttatgtgtatatacatatggatggtcctgtctttaattttgctctccattacagtgcattcagaaagcactcatgaagctggactgagtggcacatgcctggaatcccattaagaaacagctggaaatattctataaattctaaaaattctaaaaacttttaatgaaaattttgccttatatagactgaatctaaaaattctgctgtaactcaaatagcttggagtttttttatagggcatgggttaattattccaaatcaaaaagataggtcacccatctcaagtctaaacatcctaaaggcttttaagaaaccaactatgttgggtattctgctgagatcaaaagtttaaatttttttgttaaaagataatagcctgcgtagtgttggtggcatacacctttaatcccagcactcggaggtagaggcaaaattcacctaatcttagagttgtagaacctaggaaaacagttgagtttgtttggttataacctacattttcattctataaacactagaaggctggtggcatgggaggcacagagtttaatcccaacagcacataaaaatgtgaaggggtagagaaactagagcagtgggaagtatttacactgtcagtttgaggcccagtgctctaactctgaatgcaggaggcagaaacaagggactccagctgaacagtctagcaggatcccctgtcccaagagatggcgagagcctggcctacatcagactgcctcaaaacaagagatctacactgcacactgcatacacaccacacacatgcaatgtgaaacaaaattccactaagaaccctcctcctacttattcattaaactccactcaatttcttgacagctacctcttgaaggttatttaattttaacagaacatattttctgtacagggtcacaacagggaatattttaggctttatgggctatacatttgccatatggtctcatatagaaaaagaagtcaaagatgatctgtaaatagacgtggcggtcataaaactgactcaaggacagaatagtaaatgtaaaacagtggtcctgtgacagctcccagttattaacaattaattctcagctaatatggtagagtaagattgggaagaagctagtgagccgacacataatctctgagggagaacaatatttagactagagattacaattactaacattgtgtatctacaatgtcttgatgtaagagtagaaatacctatgtaaagtaatggatgttaacgatatagccatcctataaatacaatataatgtataccataaaaaatgcacttatctgtccacttaaagtaatccataggtcatcactcatggagaattatacaatatttcatcacatttcaggaaataattttgatagtatgtatgccaaaccgactaaccaaataaaagaatttcaactagggaagctatgaactaattcttactgaacttgaacatgaacatgcaaaactcacacacatatgataatgcagagcattacacatacttcatgttatacatagttcatatggataaaactgaattaaaggtagggtcttattatgtagccctagatggtccacctgcctctaactccaaaggactgagattaaagacctgcactaccatacctaacccttggttttttatattaagaagtaattttatataaatgagtgctttgcctgaaggtaatatatatgtaccacatgcttgcttggtgcccaaggatgacagaaaggggagttggagagaagtggagtaatggatggttatgagccaccatgtgagtggtaggaaccaaactctgatcctctgtgcaagaacaagtgctgctctcaacggcccccattttaacacttttaattatctgcatgtctggggtagaggatgtgggtgagtgcaggtgccatgaagtggaggcctgaaggccagcagcacgtgactcaactgggcctggggataactgcagctgtagagcctctggatacagatgctggaaactgacctctgaaaggtgcaagcagcagcatgcacacataaccactggctcgcctctccagcctctgttgtctgagatgactatgaagactttttccagatttcctccctgcccatgtttgttaggtggtacataaaaagggggagttctctggtgaggcttttagggtctacatatagaatatcatccacaaactaaggtcactttaattatcccatctatctttttttaatcaaactaattttttatgcctttaatctgccctaaaacacaattaaaatttaggaaaaacatactttagcatgtgtattctttgtgggtagcaaaatctggggccttgtgctaaaaatggtctaccactgtgtgctatttcactctgtaacccaggagagcctggaactcaagtgtttagcagagactgcccttaactcttgagacccttctgcctccacctcctaaaccctggattagggacataaaagggttagcttgttacgcattattggagagctaagtttactggaattctagtccttataatcccctaaagaggaacaaaatgatgcttgcccatacacctacataagcaataaataactaaatgtaattttaagaacatgtggaactttcaattttagatatgtatctgcacttgacaatcccggtaaaatactgggggggaaaaaaaaaaagactagttatgacaatgcagtttccccaactcacaacatagaatttataagaaaagttgtgggaatactaacatataatcactaaccagctatgcttgtataagatgaaagtaacttttacttgctggccttcctaaatctgtgtctacttatagtagacaccatgatacaccagggtcctgcatccattaaaacaatctttgactggtattctttaaacagtgtagcagcacagcttccaatagtacaccttagctgcaaagtctggccatcctctaatcccagcaccaggatacggagacaagaactaaagcacccttacagttctgagactgtactgaaggaagacagcctttctaatccaccttagggcttacaagatgggaggtggattgggagataagtctgttgcctaatctgctgacctgagttctaatccaggaactctcgtgtgatgtgggggaacccaaccccctaaactaaggtagtgctgtcacatccaccggtgcacttgggagtgcaacaccattcaccactccacccctccacagatgaaacttttaaagacgtctctaaaacatctctctaaatcagaaaagccttgcatatgtatttccaagttccctaacagtgaacataacagccaggcatagcagctcctgctctaatcccaacagatgggagttagacgcaggaggctcaggaaattcaaaagccatggctaagcaaaattcaagaccggcctggcctacatcagactgcctcaaaacaaaaaaccttaagattaaactggaaaaaaaaaacaaaaaaacaaagaaacaaaacaaataaaaccttgcaaagtttctagtgactaaaatcttgagacaatttatataaactttatattctacagcagagcagagctgcacagcagacataggagccaagtgttcaatttctttagttcacatgaaagtgaaattttcaaatgcctaataaaaaattgctactgctttgtttttgaagctgagtctcatgatgtagccctccctggcaggtcatgaagtatcctgtgcccctgaaatcccggagctgcaggacttgtattattatgcctggctcctgaacatagtcccaaacataaaaatgtttgcttgttagtatttaataagtacaattagtatatttcacttttctttagcaaagtatttaaaatccttaagtaagcatgccctcactgtgtcattacacacattcaatagccacatgcagtcacatggtggtgactgacttatcaactagaaagacgtcccttgtaatgtttcccaaaacatgtaatctcaaccttgagttattaaaaatcattttagacatatgcatatattaagacctgtccattataaaacataccacatagtagtcatagaacctttatgattcagaaaaaaaagagtaagtgaaaacaagtctttcttttttttttcagatctacaaacttccaaaggagagggcaagacacacaggcaaaagaccaaaattacattatttaaaatcagtcctaaacaacttaagttctaactaccacactggtagcctccaaatcactgggcaatgaatgtaaacttaaaaagcctacacgtgagaactctttatcataaagacaaaaacgtgtgatacctttgcaaacttgaagaatggtcttgggtcttttctaaaatactcaatatcaaacatggcttgagggtctgggaggtctgggaagtccaccgcaaggcgagcatagataccgtctcttgatctgaagtcaggaatcccacaggagacagaaacctgaaacagacaagacctaagtcaacccattaactgtctaccttcacagtaagtacctttactacatacaatttagtgggaagagatgaaaaatcaaagtttgaacagaaacaccacaagctttctaatttcaaatacaggtaaaatacgtaaataagtataattaaatctgccacatactgctttaatgggctaatcttaaccctttgagcatttaaacaaattaaaacaaatacaattggttggaataaatcttttttttttttttttttttggtttttcgagacagggtttctctttatagccctgcctgtcctagaactcactttctcactttgtagaccaggctggcctcgaactcagaaatccgcctgcccctgcctcccgagtgctgggattaaaggtgtgcgccaccacacccagctcaatttcattttttaaccaaaaagtaggtacaactttttaccaatcattccaaactgacctcacataggcagctttactacctcaagaatactcaagttttgaaactttattcaatactgtattatagactgagcacactggttcatgcttaaagtctcagatactcagggagactgaagggctgtttgggctctgatttccaagactacctggggacaatcacagcagcaaaatcattctcaaaaaagggtttgggatctttgttatgttgtccaggagttagaactaccttacacatatcacagcaaagtttgttgggtttgtttggtttttttttttttcagaagccattaggctttattattttatatgaacatagggaagcctacatgtatatgtgttctacacaggtgcctggtgtccacggaggtcagaatgcatcaatcatgcagttgtgaattgccatatgggtactgggaactgaatctgggcccctggccttatagtaagacctcttaaattctaagtcatctctctagcccaagaatgaatcatttacttacttattaatagcttaatttttgtcttttgtttgacatggtctcactacaaacacacaaacacaaacacaaacacacacacacacctacctgcctctagaactagtggcatgggccacctcgattctcattgagatagtgtctttagttaggctgggtagccattgggctccagggatctgcctgtgtctacatcctaatgctgaggttacagtcactaaggccctgaaaggcaaatgctgggataacagaaaatgcatcaccatagccagctaaggatatgcatttaattataaattataatgataaaacccaggacagtggcacaagtttatagtcagagctaagatagctgaggcaggatcttttaagttcaggtagccaccctaaggaacctaaaaagggctaaggataggtcaactgtagagtgtctgtccaggctcaagcagtgaaaataataaattacaacaaagggccagtgagatgtctcagcagctaaaggctaccgtactggatgaccacatgtaatacttgcaagttgtcctctgacacactcatgtgcgtgcatacccacatatacacaccacacaagaaaacaaaaaaattgggaggttttcaagacaggctttctctgtgagccctggctgtcctggaacttgctctgtagaccaggctggcctccaactcacagattcaccagtctctgcctcccaagtgctagaattaaaagcatgtgttactacacatggctacacaaaatttttttaataaccaggtatgatggcactggcctttaatctttgcatttgggagccagaataggactggatctctacaagtttgaggccagcctggtctacaaaggaagttctaggccagccagagctacatagtataatcctgtctccaaataaattaagacaatacccgtttctgtagataaatcttgacactcccgataggggaatggacaagctttcttccattccagttttacagatccattcaacttggaacaaaacaaacagattgtctcctgctatatactcctaatcccaatttttctgaaacagaaggactgctgcaagtttgaaaccatcctaaactatagagaccgtctcaaaaaaaataaagccaggcatggtagtacatacctgaaataatcccaatagttgggaggatctctgccaagttccaggccatccagggctgtgagtaagcccgtttcaagaataactaaaactgggggcctacagaatagctcagccagttaaggtgcttctgatgaagcctggagccaagactgacagtgaggaaggacaagcaactcacaactcagggtgtactgactcccacagtgctatagctcacaaaccaccacatgcacgcacccaaacacaaaacttaatgtttgtccctaaaaataaaaaaaataaataaataaaaataaaaataagaggcgaaccctagtctaaatcacacctgaagcaaccctagccctcgtctggggctgaggggccagcacacaccgacctgctttggcatgctcacctgcctctgcctcccacaactgagattctgattcattcatacttttcactctgttcaaactgctctggttgctaacataatgcctaacatacaacacaacacagtatgacttggttctagaccaagtctctacaatcttacaaaggtaaaatgaaggagggcagggggctcagcggttaagagtacaattacacttccaaaggtcctgagttcaaatcccagcaaccacatggagctcacaactacccataaagagattggacgtcctcttctggtgcgtctgaatatagctacagtgtacttagatataataataaatctttaggccagagccagcggggttgacctgagtgagcaactttcattcccagcaaccacatgaaggctcacaaccatcagtacagcaacagtgtactcattttaataaataaatctttaaaaaagaatgaaagaaaactttctccactagactcttgctaccatagacttcaaaaagctctaattcttctaaatcatctttaggagccagcatataatgtgtaaaaattccaggtttgaaagaggcttgaggctcttgcagaggacttgggaggctcacaaacatcatcactccagtttcaggggatctgatgcctctggactccttgggcacatcacacaatggtacaaaaacatacatatagataaaacatccatatacataaaattaaaaccaaacaagtccaggagctagagagtctagccactaaagagaacttgctgctccttgaaaagaatccaggtttgctagcatccacatggtggcctacatctgactaactcaaatccctgggaacccaacacccatttctggcctctgtgggtaccatgcacatttatgcatgtaggcaaaaatcaatgaatgaatgagtctgtttctctctctctctctctctctctctctctctctcacacacacacacacacacacacacacgatcttaaataaaaacaaaaaaataaaccataattccacttaccaattgttctataaatatacaaatctttaaagttgtcaaacttttcaaaacactgaactagtttaacaaatgaggctctcttcagtttttatgaacaaaggctacatcaagagcagaaaaagttagctggaaaaggaatatctactagctttctctttactgtttttctgcgtcttacataccccagctccagtcagaactattatctttttacactcctgcagtaacttcacagcatcttcaattgtattgatatcttttctttttttccgctttggtggttctgaaaggatattaataacaatctgccacagcgtcatatcatccagctcaggtggaggaattgtttctggtaataaatctttaagaattgttcgaggatcggtgccaatcatgagatgttgctgaacaaaagtatatggacctatattaagggaagaaagactcacatcaattccacttctaataaaaagctattttttcaagcaatgagttagcaatatatacatttttatgcaaagaatacaatttatatgtatttcatgtcatatccctaacaagatctgactaattcagtttggggagggtgtgcttaagtctaaggggtttttttggttggttggttggggacagggtttctgtgtagccctggctctcctggaacttgctctgtagatcaggctggcctagaactcaagattctcctgcctctgcctcctgagtgctaggattaaagatgcctgccactactgcctggactgtctaggtattctgactgccttagatgggaggacgtggtgagcgactcaaggattaccatgcaggaggccaagaaaaaaaaaatcttaccaatacctgagcaactaaatctaaatggtaaaggtgacagagaatttaaagttggtacaaaagcagctgttggggtggtaccaaataactataatccccagcatttagacacaagatcagaaattcaaggctaatatgtgctggctggctacccagccaatgagttcaagccagtctaggctatacgtgttcctgtctcaacaagcaagcagacgaacgacaacaaccacaacaaaacaagcaagcaaaacccccaaaggctgtacacagaaagcaaaaacaatgtacagaagaaaagaggtgaggacctaacctcaggcactgacaaacggacatggtacatacagcacacctataatcccagcactctggactgctggtaaagtcaggatatcaatgtcatccttacatcctagactccacaagtttaaagccatcataggatagatgaaaatgtcaaaaaaaaaaaaaaaaaaaatcaagaaaagagagaaggaagagtaagtcaaaaagagctttggttgtgatgtactccagaggctgggcagagactgcagagtagcttaactagcttgggctataaaatatcttgtctcaaaaaggaaggacggacagaaggacggaaggaatgaaggaagtttgcaattgtttcaaagatgcacatgcctgaagcatacctatccgcggccgcggagtccagtcactagagctggcgtgtgacgttctgtcatcgtcatcactttcacaggaatgaaagccattagtgaggagtccatcggtcaacaggaggttgtctgtcaaagagatcaaaaggctgcggctcagacaatccccagctgggccctgcggtccacacctgcaatcccaggtactttgaggcccgtttggcctgtatggtgagacacacacaggttcttgagacaaaaacaaaaaaccagaaaggcacagaagcacacacatctgtaactccagcacctggaaggcacagacattggaaaccagcctgacatatataaaatagtgagttccggaccagcctgggctaaacagggaccctacctcaaaaaatccaaaatgaagacacacacacacacacacaaataaaatctgtgtagccctacaaaagcagctcagggttccatgcccaggacaaagaaatacaacttcatgaaatgcatcaaatagaaattacttctaaatatcactgagataaaaatcaatccctggctgtgttctcactgccccaaccagagaaagtctctttccgtagccctttcaagtagcaatctacctgcttcagccactgggtgttagtaaatgtatgatttaaagaacacgaagcatactttatgcgacttgtttcccctttaatacctgacatcaagggtcatttcctatttcagtccctaacacgttttgttgttttttaattcatggcaccattatacgagccacaaacatctacaagggcactgacagactctgataaattctgtacaaagcttttcaggaagacgataagtggcattattacaaaaacaaaacaaaaaagtaacccaaacgtttggcgtcaatagggcaaaaccaagcaggtttgtttcaggtttgttaatctaaaaatgttgcgagcatgattttgaaaggaaaagaaaacttacgaaagtacagtacaactataactcctctatatcgaagtgataaatgcaatcgcagaaaagcaacatttttaggaatagccatttccttacattttttagactgtgtctcaagaaatagctttggtgtattaaaatttctaacttcaaaaaaagacataggtctatccaaaaaagaaaaaaaaaaaaaaaagcaacacaggtgtcagtttgcaaaacgaaatcgcatgtcgatccacgggacagccccaaagtcgcaaagcaaagtgtgcagtgaggaaaactataacttcactaaaggcgcatcgggagggaaaccaaaccgagggagggaaaacttcactctaacgccaaactgcgagaaccgcggtcccggcgactgcgcgcagcagcgcaaggcggcccaggcgagcggcgagtccgcgcgcggctccgcagcagggccggcgagctcggcggcgcgcggccgagccagggccgagctgcgccgctgccgccgccgccgccgcggagcccgcggagctctcggggccctgggcaacctgggaccgggtcacaggcggggacgcggagggacgcggctgcgcggcagcgcgcgcggactcacctcggtagccgatcgctgccgccgccgctgccgccgccgcctcgtcctcctcctcgccctcgtcgtcgtcgaagtcgtcagccgccctcggctcccgccgcaggccggacccattgtctccgtccccggccacggccgtcgccggggcctcccgctccgcgctcgccgccgcccctgccgcctcccgccacagcgccgccggggccgcggcgctcgccgcctcacaccccgcggccgccggcgccactgctgcgctcggctcgcccgggctgcgcccgaggccaggcccgtctcggcggggcctcttgcggagcggctcgtccgccggctgcgacgcggcctccatggcggccgccgcggaaggggagccggcggcctgaagggcgagcgccacctcgtccgccatcttccaactgcctctctggccctccgccctcgcctcctctgctccgctcgacgcgcggcactggcgcccccgcggctcggctgcgggagatttaaaccccgtcacgtgacccgcccctccccgcccccgcgcctctcccgccacccacgcgggccggaccacaacacgccgggtcacgtggccgggcgccgcccgcggcctgggcccttcccggccccacccagggcggctcggctcccctcagcggcctctggcgcctcccgcccgcccgacccgttcgctcgctcgctcgctcgctcgcttgctcgtccgggatcgccgcggtggttcaagtttgcgatggcgccgccacttcccacctgggcctcacgcgtgcaccttgcctgcctgcgcctcttcgcctcaagtcggcttttacctcaggggctctggagagcccaacctggccgacgccggccttcctgaggagaactcctccacctgccttgcccttgctctgtgacagctcttcctcaggttacccctgtggtctctcctcaggaagtttgcgctctctcccaatctcccttctcaagtgcaatggaatgcccaagccagccctcggggcctgttgccctcctggaaagatctggcgattgaggacccgccctatctgctctctggacccaccaggtcctctgtacctcgctttagtctttggtaaaattcatctcttggggcagcaagagagaggacagaagggagagtggttggttctccacaaacttctgtgttaagagtcagattgggcctgggctcttgtgacttgggcgattgactgaaccttttctaagcccagtttttaatcatctctaaaatgacagggccaggaccgaaagagactgtagctcagttgtaaagtcacgcttgccagacaaccccgaagccctagagagagggaggaaggagggtaagttgaaggtaatctccaactacttaggaagttcaaaaaaggcctggaatacataagacctcgtctcaaaaacgaaatttaaaacgatagaccatgagaaatcagctagtcaggtttaaagtaaatgacattagttttaaaatcctaggcagttgatggtggcacaggcctttaatcccagcaagctggaggagacaggaggaggttcactaggacagccaaggctacacaaagaaaccctgtctcgaaaaaataatcttacttctagaattgtagaaatggctctgtagttaacagcacttgttgctcctgcagaggccctaggtttgactcccatcatccacatgacagctcataccttcagatctgacacctgcttttggtaaacacagacatgtatggagccaaaagacccaaacacataaaaatcctctttgttgttgttttatgagttagggtttctctgtgtagccctggctgtccaggaactctgtagatcaggctgtccttgaactcagaggccacctgcctctgcttcttgaactgctgggattaaagatgtacaccagcaagcccagcataaaaatacatatttaaataattttttaaataatccttagttccttcacaactctaagccccttcactttctagttaccatgaaattctgagcacctgtatccatttggatcattagggctcaattgcacatggttcaattacagtggggtttccccagattttagagttagaggcagcaggatcagaaaattaaatccatttgcactaggtaataaatttgatcccaccctatctcaaaaacaaaacactagccacacgtggcagcacacaccttttacaacaggactcaggagcctggcatgatgggacagacctttactccctgcacttgaggcagatgcaggcaaatctaggcatcctggtgtacatatgaagttcaggcaagccagggccacgtaggctcaaagactaaaaaaaaaaaaataattaaaattaaaatattaaacctgggagtgttgctatagctcagtggttaagcacatgcaataatctttcagagaacttgaatttggttcccagcacctatttcaggtggctcacaaccacctgtaactccagttccagactattctgatttccaaaggtgttttgtgcactcgagcatacacacacacacacacacacacactcacactcacaaacaatgcaaacaatttttaaaaatccttaggcccaggatggatgtggctgaacacactttcaaccttagcactcaggaggcagaatggagatttgaggcccgcatagtttacatagcaagttccaaggcagacagaactgtagagtgagaccctgtctcaaaaacaataaatagtaatattctttaggtcccccgcagtggtacacgcctttaatcccagctctaggaaggcagcagcaggtggatctccatgagtttgaggccagcttgttttacttatgtctaggctaccaaggactacatcattaaagactgtaccaaacaaaagtaaaaaaaaaaaaaaaaaaaaatggggacagggacatggatctatggggaacagcctgatgataacttgatctctggggcccacgtggtagaaaaagaggatctccaagccacacagcacaggaggcaggaaacatgtatagcactgtgctgtttaagcatacgttgaaggggttttacaagctaaccatgaaagcaagtggcacttgctacttattgcatccagctttctagaagttagtggtgcacctatacacaaagaagactggcaggttgtattgttccagttggcagactagagaagttcatgaatcaggcaagaatcaggactgatatagtacctttggtaccacatagcaatgcacaaagctctgcattcaatcctagcccctcagaaatcaggcatggtggaacgtggtctgcagtcccagcacctgggaagtagaagcaggaagatagaaagtcacatgtcagtcctgttatgctggctaggtttatgtcaacttgacataggtagagacattttagaagagggaatctcggttgagaaaatgctcccactagattttcctgtcagcaagtctgattgatgtggaaagggcccggctcactgtggatggtgccaaccctgatcctgggtgctataagaaagcaggctgagtcaaacagtggtggtgcatgcctttaatcccagcaggattcctcaggaagcagagggaagtggatctctgtgagttcgaggccaacctggtctacaaagcaaattccaggacagccagggctacatagagaaagcttgtataaaaaaataaaaaattatatatatatataatcaggagaaagaaagaaagaaagaaagaaagaaagaaagaaagaaagaaagaaagaaagaaagagagagagaggctgagcaagctatagagtactccagtaagcagcatccctccatggcctctgcctcagttcctgcctccaggttcctgccttaagttcctgtcctaaagtccctcagtgactgagtatgacctgagagttggaagcagaaataaacccttctctcccaaagttatgtccatggtgttttagtacagcaactgaaaccttaaataagacacttgtctaagcaaattcatggccagacagagcaacataagattccgtcttgaagtgaaggtagtagagcaggaaggatggaagggaaagaggaggccaaaggagtaggaagaagagaagagacaatgattgggggggaggttgctggggattgtagctcagtggtagattatttagatagaatgccctgggttttagcctcaccacacaaaaggaaatgaaaaagatatcgtagctatgtgtattgtgcttgtgttggctgctggattacctataattgtggcagtggtggtggtggcagtaatgattgttattttccagcactgggaattaaactaagagtatcgtgaagtttaagaaaacacactgccgagctggagagatggctcagtggttaagagcacctactgctcctccgaaggtcctgagttcaaatcccagcaaccacatggtggctaacaaccatccgtaatgagatctgatgccctcttctggtgcatctgaagacagctacagtgtacttagatataataataaataaatctttaaaaaaaaaaaaagaaaagaaaagaaaagaaaagacactgctgaagccaggcagtggtggtacacacctttagtcccagcattcaggaggcagaggcaggcagatctttgagttcaagggcagcctggtttacagagtgagttccaggacagccagggctacagaagaaaactctgtcttgaaaacaaacaaacaaacaaacaaacaaaccaaaagctacagaaaaaaactgtcttgaaaaaccaaaaaaaagaaagaaaagaaaagaaaaaagaaacacaaaacacagtaccactgagaagcacccctagctccccattgtaagattacaaattattcccgtaacctactagatccactctttgcatgatatcagagacaggctttgtgattggttgaaagcccaatctgcaaagggccagcattaggaagtacatctttgggaactggttaggtcatgaaggtgtcaatctcaggaatggaattagagcacctatgaaagacattctagcatagtgatgcccttccttaatctaagcaggtaggaagcagtgacaggcagatctctgtgagttcaagagcagcctggtctgtgtcaggagttctaggacagccaggcaccatattctcagctaccccatctctagaatctgagaaatgagttaagtacccagctcatggataattagaacagccatgctgggacaaataatatatttgtttttgtctggttgatgtgcaggtgaccagggaggccagaactgggtgtcagaagacatgaagcaggagttgcaggagatggtgagcaccagagggtgctggggaccaaattctctggtcctctagaagagcagcaaacgctcttagctgctgaaccttctctctagttcctaccccaccctcacccccatttttaaagcaggattttctacttttgggctcaagaagttcttctgcctcagccttctgagtggacacaccacaccacacttcactgtgcagtctatgaagctcagcagcaaaatgcttacctagcatgtttcagcagtagggctactaaagaagaggaggagggaggaggaagaggagcagctagaagcatctttgtccaaacagtatgaatatgagttattgttgggatgagataattttcacatcagatatgcatatacatatacaaatagacatacatgtaagggattttgctatagtacaaaagtttttcaagttctgtttttgtttttgtggtctttttaaagctgaaaaatagcgcaactctgttttcaagagtatatatctgttttcccttgttggagtaggtgtggccttgttgtaggaagtgtgtcactgtgggggcaggcaatgacaccctctgtcctaaccatgtgggaaccagttttctcctagtagccttcagatgaagatgtagaactctcagctcttcctgcaccatgcctgcctggatgctaccatgctcccaccatgatgataatggactgaacctctgaacttgtaagccagccccaattaaatgttgtccttagaaaaggtgccttggtcacagtgtctgatcacaacaggaaaaccctaacttaaggcaaaagttggtatcaggagctgaggcattgctgtgagaggcctgaccttgcttttgtttggaagaatgtggatttgggactttggatttggaaagcagtggaatgctttaagtggggcttaatgggccatcctagtagacctgtgaaagactttgttgctgagacttctacatcttcatctgaaagacgctaaaagaaaattggctcccaagtggttgggacagagggtctcaaagcccacccgcacagtgacatacttacttcaacaaggtcacgcctactccaactaggccacacccactccaactaggccacacctcctaatagtgccactccctgggccaagcatattcaaaccaccacactttttcaagttctgggtttttgtttttgtttttgttttttttatgctgaaaatagcatagctctgttttcaagagttttcaacataatctctgtttcccctctctctcctcactgtcacacactcctttccatcttctctccctcccccctctcccttccctctcccttccttccctctctctctctttcccttcccttcctctctggatctcactacctagctgaagttggcatggaatttgttatgaagccaagactcaaacctgagaacctggcttttgggtttctacacctaagcccagcatgaacatcatttaatgacctactaaccaaaaaagagattagtttctcctttggtttgcagaaggcaaaaggctggaaactacctgactttcagaaatatttgctacttagtcatcaaagtcattcagggtctaattttgtgataagtttgggctagacttaccaactgctaattatactttattttcttcgattagaggcaccttgctaggaaagtttggggaatattaaatgattttaaggcaccataatgagtaccttgaatatgtttttctccagaattttggagtttcacatgtagtgcactcagtgtatacagcaatgaaatttaatacagttgattgctttgagttgaggtttccagaggcagcccaagctggtttatgattctcctgtctatctctctgctttctaagtgttgggattgtaggcatgtgcctccgtgcctagattcatgtaattttcaccacccctcctcttcctcctcctcctcttcctcctcttcctctacctcctcctcttcctcttcctcctctttctcagggcttcactatcaagctggcctggaactcacagagatctgaaactcaacagagatccacctgcctctgtctcttgtgtgctagacttaaaggtatgacccatgcctttaaggtggtggtgcatgcttttggtcccagacagagtcaggtagaaatgtgtgactttgaggtctgcagagtgcgttccaggacagccagggctacacaagagaaaaaccctgtttcaaaaaaccaaaaacaaagcaaaaaggtgtggcccaccatgtctggcccatctttctttctttctttctttctttctttctttctttctttctttctttctttctttctttctttctttctttcttccttccttccttccttcctttctttctttctttctttctttctttcttaaacagccacacaaaggagctagaacagcgttttcagccttgcctcccacggtactgtggggtataaaaaggctatgtaaaatcaactcagggcttcagtattaactggaagccctcctaatctatctctcatctcttctctctgtctttcctagaatcaccctcactgctcccacagaggctgttcgagtgctgccggtgggcctgacacacatgtatacacataaataaaaaagaaaaagaaaaagaaagaaatctctcaaaatattaaatgcatatactggaatggacccaaggtacacttccacggaaggcttgcttaacacgcagaagaccgctgggttcaatgcccagtgccacgctcagaaaagaaacaggacgaagcaaagttaattggaattcagttatacctgggaaagctctggcccctagtacacgtatcctgttattcctctatggctcaaaagtgatctatcctgtatatttgaacacctggccctcagctgaccttgctgctttgggaggttgtgggacctggcagtcaaaagtaggtcttctgagcagaactgatggaaacagggtatagaaactgccaggcagtgtgatggtttaaatgacacatcccacctagtgctgatatgtgaacacttggtcccctggtttgttgctgtctgggaaggcttaggtatgtggccctggaggtggcctttgaggtttctaaacactttgctgttccaggtttctctctgttgtctgcctgaggttttaggtgtgagttcttgccttttccctccaccatgcctggtgcttgctgccacacggcctttctgtgatagtgacagactcttatccctgtgaaactgtaagccccaaagtaagcccatctataaattgcacgagatgtggtggggaatttttgtttggttggtcagttggttttggtttttggttcgtggtgttgttgggatgtttttttgtttgttggttttggttttggttttggttttggtttgtttttgataaggtttctctgtgtagctttggctgtcctaaaacacactctgtagagcaggctggcctcaaactcagagatccaccctcttctgtctcctgagtgctgggatcaaaggtgtgcatcgccgtacctgcttggttatggtgttttattatagcaatagaaaagtcggtaatagaggcaaccctgtcctaaggattctccttggaactcagggcagggctagccagagggagcacatctgcccgcgggggaggactgaaactccagtttagatacaagttccttctggtgaacagctttagaactagatctttagcttttaatagtggaggtgggctttcatctctcctccaatttcagcccatctcctaaatgattttcaggttccctcttcacaggcagggagacattacagtggccttgatcagggcattgttgagtccctgttaagggataagttaaggtctggtcagttgctatgtattttaatgctaaattctgtagctgaaggtctagttgcctaggagtgaattctcaacagcttctgttgtgcaaaccttggttgaataaaaatggctacagcaaattactggagggattagaggtgggggagggtgctgagttagctggggttgggggttggagagagaaagagagagagagagaggcagacagggagggatggatggatggagggagggagggagggagggagggagggagggagggaggaaggagaaagccttcatgagaggagatggaccatgaacacatgaccaggagaaacagcaagtatttgggggccaccattgtggacatagccaggctagccattagaaaagtagattagtagattgctcccccccagtaattgtcaaagccaaataaaataacaatagtcagagtctcattcatttgtaagctagaggggggataaattcaaattggatcaaccccagggatagaactacctctggcctcaggtagagacttaacattccaggctacccaaaacaaaggcattcatccagtacggcctaccaactcactagctttgggggtatagttcaaggctgagtcacctttctttaatttgtatttatttgtatgtgtatgcgtctgtgctgcacgggtgtgtgtctgtgcctcctgtatgcatggtgaccagagcaggcttcagatcccctgaatgggaaattgcaggcctttgtgggctactagggaactgggctctcctctgaggagcactgagcacttaagcagctgagccttctcttccagtagctcctcctcctcctgctctgtccctttcagaccctgcccagagggtaagtgtgctttccccagtaatttgagattttgtctttttcattctttcctggaggctacctcccatttgtcatgcgtaaacccagaaagggacaatttggtcgtttgaatatgcttggcctatgggaagtggcactgttaggagtgttggtcctatgctcaagctctctccagtgcagaagagactctcctcctggtcgcctgggaaagagagactcctggctgctttaggatccagatgtagaactctcagcttctcctcctgcttcatgtctgcctgcctgcatgcggccatggttcttaccaagtcaaaaatggactgaacctctgaaactgtaagccggccccaattaaatgtttgcttttataagagttgccttggtcatcgtgtctcttcacagcaatagaaccctaagacaattggctctctctccttttccttatccttcaggcagctgagatgtacagctttccttccttgtgcttctgtctgtctgtctgtctttcttttcttctcttctcttttcttttttttttgttgttgtttgtttttgtttttttttcgagacagggtttctctgtgtagccctggctgtcctggaactactttgtagaccaggctggcctcgaactcagaaatccgcttgactcttgcctcccgagtgctgggattaaaggcgtgcaccacccaccacccgctctttctttctttctttcttccttcctttctttctttctttctttctttctttctttctttctttctttctttctttccttctttctttccttctttcttccttccttccttcctttcttcctttctttctttctttctttctttctttctttctttctttctttctttctttctttctttctttctttctttcttgtttgtttttcatttttcccagacacagtttctctgtgtcctggagcttagtctgtagtccagtctgacctcgaactggcagacatccactttcctcaggagtgcctggattaaaggcatgcaccactactgcccagcttttttctcttaaactggttaaattgttctctaagctccaaacctgtccttaaattcttttaataacgagacaaagagtggggtggtgatggcaagcactcagaagcagaggcaggcagatttctgagttcgaggccagccaggtatacagagtgagtaccaggacagccagggctgcacagagaaactctgcctcggaaaaccgagagagaacacctcactttccccagaaacagaacttttgaagcttgtaacccagccttgcttccggtctcatttgctgctccctgacctgaccactatgtaagaagcaacaggctgatgtccctctgctctgaagccattccactccaccctcccaacttgtaatgtcctgaaattcccagaaactgtaagtcaaaacgcatcctttctcctcaagctgcttctgacagatattctgtcagtgacaagaaaagtgactaacgcccctgctcgtaagtgctgctgtggcctgtgactaccaggagatagctccttccttattaggctattcaggcgagccactgcatgccctgcatctaaggttcatccagctgcaatccaaacgcaagagggtgaggtggaaagatggcctagcaggtaagagcatttaccacgcgatcgtgaagaccagagttcagatcccaatacccacagaataagccagccatcctgggcacccctgtaccttcagctctgggcaaggagggtgtggggataagaggatggctagagcctgctggctgctcaacctggaaaaaatgcgaggttcagggaaaggaacaggcagacagtggtaggcagctgagcatgcacaaacacacaaataaacaaatgctattccagtttagaccagaggcttgagcatgagaaaattttggtgtctccttgtcttggaacccatcccctgtggacatcaagggctgactggattctgtaggactgtgccagtaaaactggagagatgccccgagaaacttctgatgctttttcttgtttagggacagggtctcctttttcccaggttagcctcaaactcactgtgtaatcaaggatgactttgtacttccgatctccccggatagccttccggtctggggttatacaaatgagtcacctgagctttaagcattgaacccaggtcacggtgcgtatttaggtaagcatcatgccaactgagccacatccttagccagctaggctgagagacccacgaagcagagggggactctgtctgtggcagctcagagcttttggctatgatctcagatctgcagccacagcaggtggatc

SEQ ID NO: 81 - DNA, 32491 bp, Homo sapiens
actgctcacagcagcccagatcctgcccactgcctgtttccgtagagaatggtatttacacgtgtgagtcgttggaggggggagagaaaagcaaaataagaatcatccttcctgacacgtgaaaaatgatatgaaattcacatttctggctaggtgcggtggttcacgcctacaatctcagcactttgggaggccaaggtgggctgatcgcctgaagtcaggagttcaagaccagcctggccaacatggtgaaaccccgtctctactaacaatacaaaaattagctgggcacggtggtgcacgcctgtaatcccagctgctcgggagtctgaggcaggagaatcgcttgaaagtgggaggctgaggttgcagtaacctgagagcactccagcctgggtgacagagccagactccatctcggaacaaaacaaaacaaaacaattcacatttcagtgtccataaataaagttttttcggggccaagccctgcccattcatttgtagatcgttggatgccacatgcaggatatgaagaaaaaagtgtagacagtcaaaggctattctcaggctgcaatggcagagctgaggctggtctgcaccacaaaccaaaaatattaatcctctggccttttaagaaaaaatttgctaacccttctctgagcagccccactctgccagtgcctgacccctgacctcatggagtttttccttccttccttccttccttccttccttccttccttccttccttcctccctccctcccgacggagtctcgctctgtcgcccaggctggagtacagtggcatgatctctgctcactgcaaactccacctcccggcttcaagtgattctcatgcctcagtctcccgagtatctgggattacacgcacccgccaccatgcctggctaatttttgtatttttagtagagacggggtatcaccatgttgacaggctggtcttgaactcctgatctcaggtgatctgctcgcctcagcctcccaaagtgctgggattacaggcatgagccaccgcgcctgccatcatctccatttacatttccctcggtgtaatccatgctgccatagtagcctccttcttgtccttcaaacagctgggtcccacctccaagccttggccagtgcagctccttctgcctggagcacctgccccaccgtgcacatggctgctttctttactgctgtccactcttggagatgcctcttccaagagcccttctctgacagccctttctttagctatatttttccttcattgttgtcttttttttttttttttttgatggagtcgctctattgcccagactggagtgcagtggagggatctcggctcactgcaacccctgcctcccggattcaagcgattctcctgcctcagactcctgagtagctgggattacaggtgcccaccaccacgcctggctaatttttgtattttttagtagatacggggttttgctgtgttggccaggctggtctcgaattcctgacttcaagtgatccactcacctcggcctcccaaagtgctgggattacaggcgtgagtcactgcgccaggcctcttatcaccacctaagatactacatacctttttaaaaatattctgtttactctcattttttatttttatttatttatttattttgggacagggtcttgctctgtcacccaggctggagtgcagtggtacaatcatcattcactgtagcctcgacctcctgggctcaagtggtcctcccatctcagcctcctgagtaactggagaccacaggcacacaccaccatacccaactaatttttgaattttttttgaagagatggggtcttgctatgttgcccaggctggtctcaaactcctgggcttaagtgatcctcccatcttgatctcctaaagtgctgggattacaggcgtgagccactgcgcccagcttgtttcctcttgatctctcccttagaatgtcacctcctcaggggcagtgatttttgtctatcttagtcactgctgtattccatgcaggaccagctataggttttgcagggctcggtgaaaaatgaaaatacgaggcctggccgggcgcggtggctcacgcctgtaatcccagcactttgggaggctaaggcgggaggatcgcttgaggccaggagttcaagaccagcctgggcaacgtggtaagacctcacctctgaaaaaaaaaaaatgcatacttaagtaaaaaataaaaatataaaaagaaaaaagacagaaagagaaagaggactttccaggaagcattgatgtatggagtctgtgactctctagaaaccccaatcttcccacttgggagattttcctgaaacctaaagtaaaggcaggaggtcagtgaagccccaagtgaacagctccaggtaactcccattttatggatggaaacactgaggcccacggacagcccaagggggatcagagtaagcaatgccaactgttgggaccccaaagaaagaaacggtgttggttgggcacagtggctctcgcctgtaatcccagcactttgggaggctgaggcggatggctcattggaggtcagtagtttgagaccagcctggccaacatggcaaaacccatctctattaaaaataccaaaaaaaaaaaattagctagacgtggtgataggcacctgtaatctcagctactcgggaggctgaggcaggagaatcccttgaacccgggaggcggaggttgcagtgagccaagatcacaccactgcactccagcctgggcaacagagcaagactctgtctcaaaataaataaataaataggctggggacggtggttcacgtctgtaatcccagcactttgggaggctgaggcaggcggatcatctgaggtcaggagttcgagaccaacctggccaacatgatgaaaccccgtctctactaaaaacacaaaaattagccaggtgtggtggcgtgcacctgtaatcccagctacacgggaggctgagagaggataatctcttgaacccgggaggcggagcttgcagtgagccgagatcatgccattgcactccagcctggcaacacagcgagactctgtcccaaaaataaataaataaataaataaaaataaaagaaagaaaataaaataaaagtaaatacataaataagaaaaagccggtgttagggaccaggaaaggccggagagtgccctaaggagaggaggagaggggtagcagtggctagaagacacggaacacaaggtcccagtgacaggaggggggggcctggcccctgcagtcatgggtgtttgctttcttccctcggggctgctgaacaaaagctgaacttgactccggctgcctgctgcgaaactggagaagggcaggtggagggatggatggcaaggtgctctgggaggggaggatggaggccctgcagcttcccagcaacagccaggcctcccatctgctgcaacagttccagcccaggctatgggctaacctcaggcccctccagctccagacactctcagaggccctcacacccgtctgaggttttaacacctatcctgtccccatccaattttgactttgtcccgacccctcccattgcaaacatatcaaaacacacccacatcccgaatgaggtatctcttttttagccacccacacttcttgaaagatttacttaaatattaaatataactatgctttggaaattaagcaatcatatggcttggtttaccagtggctactacttctgaggaatgcttggggaaaaaaagcattcaggagttgacccctgaaaaatatgggtttgaatgcccaggtccacttacacatggatttttttgttcgttttttgagacggagtctcgctctgtcacccaggctgggcaatcgtgcaatggcgtgatctcggctcactgcaacttctgcctcctgggttcaagagattttccttcctcagcctcctgagtagctgggattacaggtgcccaccaccatgcccggctgcctggctaatttttgcatttttagtagagagggggtttcaccatgttggccaggctggtctcgaactcctgacctcaggtgatctgcccgcctctgcctctcaaagtgctgggattacagacgtgagccaccatgccgagccagatttttttttttttttcgagacggagtctcgctctgttgcccaggctggagtgcaatggctccatctcggctcactgcaagctccacctcccaggttcatgcctcagcctcccgagtagctgggactacaggcgcccgccaccacgcccggctgattttttgtatttttagtagagacggggtttcaccgtgttaatgaggatggcctcgatctcctgacctcgtgacccacccacctcggccttccaaagtgctgggattacagatgtgagccaccacgcccagcctatacatggatttttgactgtgcaggagggtgggctgtaattgttcaagggtcaactatcatcgaggaattgagtccacgtgggaagaaaaattttaggatcactccacagtgaatgaagctcacccaatgccacattttgtaggcagttaatggaccgtttttcacctctttctctcccgctgtctgtctccacccattctcttttcaatcaatgcactcccctcccacctccaggccaatcatgttcatagtaacgcagccctgggggaaggcttgtgtctcacttcctagctgtgtgaccttgagcaggtgtcttaacctctctgggcttccctccctcatctataaaatgaagataataaaagctcctgcctcataacacggtggtgaggattaaatgagctgacacctgcaaagcacatcttatattttttatagtgctcaaaaatcaacaaaaatgaaaataaataagccgggcacagtactgcacatctgtagtcccagctacttggctgaagcgggaggatctcttgagcccaggagtttgagaccagcctggacaacatagtgagaccccatctcttaaaaaaaaaaacttagggccgggcatggtggctcatgcctataatggcaaccctttggaaggccaaggtgggtggatcacttgaagtcaggagtttgagaccagcctggccaacatggtgaaacccatctctactaaaaatacaaaaaaaattgctgggcgtggtagtgcgtgcctgtagtcccacctacttgggaggctgcggcataagaaaagaatagcttgaatccaggaagtggagcttgcagtgagccaagatcacaacactgcactccagcctgagcaacagagtgagactccttcaaaaaaaaaaaaaaaaaaaaaagaagaaagaaaaattaaaaaaaataaagtgaatccaatgatattaaattaaaatgttttaaataaaataaaaatgaataatgaaatgaatgggtacatgataattaataaatagtttaaaaacaaaataaaatgggcggagtgcagtggctcacgcctgtaattccagcactttgggaggctgaggcgggcaaatcacctgaggtcggaagctcgagaccagcctgaccaacatagtgaaaccctgtctctactaaaaatacaaaatatttagccagccatagtggcaggcgcctgtagtcccagctatttggaaggctgaggcaggagaattgcttgaactcaggaggcagaggttgcagtgagcagagatcgtgccactgcattccagcctcagcaacagagtgagactctgtctcaaaaataaatgaaatcaaatcaaatcaaatgagcccaaacaactgaaggaagccacagagggggcatgacatccccagagtcacccaggacaccagggacagaggaaggatttgaactcagagccacctgattctatcccaggcttggctgggcgcagtggctcacgcctgtaatcccatcactctgggtgggagttaggaggatcgcttgaggccaggagtttaagaccagcctgggcaacacagctacaccccatctgtacaaaaaataaaaattagcccagtgtggtggtgcacgcctatagtctctgcactttgggaggctgaggcaggaggatcgtttgagcccaggagttggaggctgtagtcggttgagatagcaccactgcactccagcctgggtgacagaaagagactctgtctcaaaaaaaaaaaaaaaaaaaaaaatggaccaagcgtggtggctcatgcctgtaatcccagcattttgggaggccaaggcgggtggatgacctgaggtcaggagttcaagaccggcctggccaacatggtgaagtcctgcctctactaaaaatacaaaattagctgggcatggtggtgcgtgcctgtaatcccagctactcgggaggctgaggcaagaaaattacttgaacccgggaggtggaggttgcagtgagccgagatcaagccacggcactccagcctgggcgacaagagggaaactccatctcaaaaataaaataaaataaaataaaaaatgaaatccaggcttgttccacaggcctctctttttggcttttcaaaaatggctttcaaagatcctgagctcccactcactcgcactctctgctcctgccaagagaatctgcctgttatgcctgtgcatcaagcagacctggtccagcctccgaatctttacccacacaggtccgtgccccgctcctcacgtgcctgccttcacttctctaaatcctccctattcttccaggctctgctccggtgccacctcctccaggcagactccctgatttctccaggccacaccagatggggatgttgtatcccatgatacgaaaactaaaggctccaagtcaagcttgcccacccaggccaggcacaaagaggtgctcaggaaggctgattgcctgtccctggaggtgagccctccctttcatcctccccatctgtgccctgaattggccgccacagggacttgagggggctgagaagaatggggacaatggaggaagaagcatgtctttctaggagttcatagccaaagacacggatgcaagagaagacagctggatctacctcagggcctttgcactggctgttccagccacttggaatgcaattcctgcaaactctctcccccactccccttccctttttcttttttttttcttttttgagatggagtctcactctgttgcccaggctgcagtgcaatggcacaatctcagctcactgcaacctccacctcccaggttcaagcaattctcctgcctcagcctcccaagtagctgggattacaggtgcccgccaccgtgcccagctaatttttgtatttttagtagagacaacgtttcaccatgttggccaggctcgtcttgaactcctgacctcacgtgatctgcctgccttggcctcccaaaatgctgggattacaggtgtgagccaccacgcccagccctccccttccctttctaatctttgctttaataccacctcctctgggaagccttccctggccaccctctttaaaactgcagccacctcccctgccctgaatgcttcaattcccttttcctgctttgtctgtctttgcgacacaaaatacacattgtcacttatttatcttgtttcgtgttcatctcccgtactcagcggtcggctccacgagggcaaggatttttgcctgccctattccctggctgattcccctgtgcctggaacagcgcctgctatataaatatgtgctgagtacacacacaccaaagcaaaagatcaggatcctcgggaaagtgggtccttggaaaagcaaggggttactgtggccggggagagcggagattggacggggaggtggtactggggccaaattgtgaggaattaggagggtctgattggtggcaatgcggcgagaaggaattccatggagagcggactagggcctgggtaaaggcctgggctggaaagcttgtacggggagcagtggggaggtcatgacgctagggggcagcagagaggaaaggagaagaggtgggtactggaatgaaagggtggatcttcagccaagccccaggagacagaaggctgaagttgcaggggtgtatcgggcatctagggcctcacactcacctctgtcttcttaaatcgcgccctgagagtcttcatagttggtgccctgtgtttctcctctccacaggccacctgaggagggcaagggtgggggtaaggtgagggacaccagtcctggtgggcggcagggtccgttgcctcgccctcctcaaaaggaccgcttcctccttcctgaccagtcctggcccctagagcaagacacagacctgctctatctcctacctgctgtgtgtcctttggcagtttacttgccctctctgttttacttccctcatctatacagtgacagaaatgatcctttcttgaccaactcatggtcagttttcagcatggtccctacacagagcctggccaaacatgaggggcttcataaatgcatctcactggtatttcctgcggtccaaacagatcaagccttttctggtctcctaacttttacctgtgcagttatttctgcctagaatggtttcttttttcttctctgaactcctactcatccttcaaagcccagttccaaaatcccttgctcttatcagctttgcctcttgttcccaagcagagatctaactccccaaattgggttcccgcctaccctggctgggtctctgcctctgcctcacccctggctccatgggctggaagggtctgggctgattctgtccttttcaacagtcaggggctccctggggactgaagccagggctgacggctctcagcacagaggcatgtttgctacatagtcagagggaacctccatgtgacagcaattcacccatagtgggtggaggtctggggcaatggctgcatgcatgtgtgtgacgttgagtgtggggcgtgtgcacacgtgcacttctgtccacctgggcctgttctacgttccgcatgggcaggcacggaggtcaggcaggcctatcttgagggggtgtgttttttgaggggtgtgactgtgaggccctatgtgtgaaagggatttctgtgatggagaatctgtatttgcctcttaccaaggagtaggggttggcatggcctctacctgtccacctatctactcgtgaattctccaagccacccttccacgcatttaccacctatgcactcacctggacatccatcctcccacctaagcactgtataaccacccactggccaccacccacaaacccacccacccaattcatgttctcatggttcttcatcaccctttaatcagatttcacccacacatccatccacccacccaaacacctaccaactcccaccattcatccatccactcatccacccatccatccacttatccatcccttcatccatccacccaaccacccatccatccatctgcccaagcatccatccatccacccatctgcccacccaatcacacacccatccacccatccacccacccacccatccactcatccatccacttatccatccctccatccacccacccaaccaccaatccatccatccacccacccacccaccagtgcatccatccacccacccaccagtccatccatggatccttccatccatccatccatccacttatccatccctccatccatttgcccaatcacccacccattcatccatccacccatccatccatacatctacccattcacccatctaccaaaccaccaatccacctattcgccccccatccatccacccacccatccattcatctacccctccaccggtgcccattcactcactacctacccttttttcttctacctctgactggaggattcaatcacacccaaagcagggggtaataagacacccaacagaggagttcacaggctgcttgggagaagacaatccgtgggcttgggggagggagaaacgcctgctaaatttaggaagctgcttgctggaagaggtgatggtaaataagaagggcctgatggccgggtgggatgttgagcacctgccttggaggaagctaggcagggcacaggccggcaagtgggaagtgcgtgggtgaacgagtgcatgtgtgtgtcagggtacctgggtagctccgcagcctggctaggactcagcacggcttctttctcccacatacaagggctcaggggcctggggccataaggggatcctccgtcctgggcctctcccacctccttcctcccctacctcctgcagctccagtgccccgagctcccggccacagtgcccactgccggctccggttacccactcccagctgggccacgagcagctccagccgctccactctgacacctgatcggctctgagcaggcggccgccccagggggccggggatgagccgagggaggagacaggctggcagcggactgcctgttggccaactggctctggcgggaagacacccacgatcttccctatcatcactggactgatttcagtttctggaaggagccatgctcttcctctttctcagcctttgcacttgctgttccccccaccaggaacattctttctgtacttcatgtcaccccaaccggctctacctgactcatgcactctttatttatttatttatttatttttgagacggagtttcatgcttgttgcccaggctggagtgcaatggcgcgatctccggctcaccgcaatctccgcctcctgggttcaagcaattctcctgcctcagcctcccgagcagctgcgattacaggccaccacacccagctaattttgtatttttagtagagacggggtttctccatgttggtcagggtggtctcgaactcccaatctcaggtgatccacctgccttggcctcccaaagtgctgggattacaggtgtgagccactgcgcccggctcactcactttttagatctttgctgcaacatcccctcctccaggaagccctcccggatgcccccagcctgggtcaggtgcctcctgtgagccccctcactgccctgtgccctctgcatcacccattgcaccccaaccacaccatgtcaccattacctggtcacatgtttgtgtccacccgcagccaccagggcatagatggtaccacctttgctctccagtgtgcccagtacaaagtaggtactcaacacatgattcttaaatgagtcctccaggccaccagccccattgaccttgagcaggacctgtcctgcagaatgcagaacctccagttggatgatactcagataacttggccggacgcagtggctcacgcctgtaatcccagcactttgggaggccgaggcggtcagatcacctgaggtcaggagttcgggaccagcctgaccaacatggagaaaccccgtctctactaaaaaatacaaaaatttgctgggtgtggtggcgggcgcctgtaatcccagctactagggaggctgaggcaggagaatcgcttgaacccaagaggcggaggttgcagtgaaccgagattgcgccactgcactccagcctgggcaacagagcgaggctccgtcacacacacacacacacacacacacacacacacaaatgagatattcaggtaactctgcgtggcattcaaaacccttaggctggggtccctgctgtccggctctgtccttacggaatttactaatccgtaaaaggggttgtggggacatggatagcctgtgtcccgcattttagaggtgactggagaactctcacgtaggcggccgccccaatttcccgcccgggtcatcggggagccccttcccaagccccgcaaacacctgcatgcaaagaggcaggcttccttctgacagcagataacatgtcgcctgcggcgtcagcaagaggcgcatgcgccttgccgtgggaggccgggtgcgcaggactggaacgcggttcctccttcttccccgccccgccccgcttccggcggaagcggcctcaacaagggaaactttattgttcccgtggggcagtcgaggatgtcggtgaattacgcggcggggctgtcgccgtacgcggacaagggcaagtgcggcctcccggaggtgagcgcgtctgagggtcccgagcatcgcgccccagggccgcgggctgggagcggccggatggcaggggggcattgtgggaatatcagggggcactgaggctagacaatgggagggacttcccagtgaggaaggggcgggaagtgacgcccctgcgcgccgggggacgccaacacgcccaactctgtggtcaccctgtcggggctgatcggggagagaggggatgtagttccaggaagaggggacgacaggcgcaaagggaggtgggaataaacacacctggagaacgattaggcctgggaggtttccagagccgggccaggacggggctcaaatgccaggctggggagttggcactttatcctgagggtgatggggaagggttttgccctggcgaggggactggacagaatgtgccagaaagatccctccagccactcagaggggaagtggagggatcggctgccccctccacgcactgtgggactttggggaagtcacttcccttttgggtctccatctccaaactttctgcaaacgaggtgaagatggccccattccataaggctggcccatgcattctgactcatgcatttaatgagcgctgatggtgtgcgcccgtccagaagccccactcttcactgctgctgttagtcactttattattattattattatatttttgagatggagtttctctgtcgcccaggctggagtgcagtggcgcgatctcggctcactgcaacctccgcctcctaggttcaagcgattctcctgcctcagcctcctgagtagagtagatgagactacaggcacctgccaccacgcctggctaatttttgtatttttagtagaggcggggtttcaccatgttggccagtctgctcttgaactcttgatctcaagtgatccacccaccttggcttcccaaagtgctgggattataggcgtgagccaccatacccggcctgttagtcactttattccaccaacatttatagagcacttactgtagctcaggcactttctaggtactaaggccacagccaggagcaacacagattaaaaacccctccttctagtaagggagactgactaggggttgcatggaaaccagttggccaagggaggcatcactgtcactgaagtgacatctaagccacaagttacaggaggtgagggagggagccatgtgggtatctgggggaagagcattaaagggtgtggccctgaggcgggactgtgcctggtgtgatagaggaacaaggaggagacctgtgtggctggagcagagtgaggcagggagagggaggagaagagggcagggagggggcaagggaggtagtgcagggcctggtgggccgtgggaagggctagggctttgacaaggcaggtgggaggcatggaaggttgtaggaagaggaggggcatgaggacaagctgccttttccaatccattttcctccctcaggcaagacagggacagctcagtctgtggctcgtgcgtggccttgccacttgggggaactgttttgacccctccgtctgctctctccccccacagatcttcgaccccccggaggagctggagcggaaggtgtgggaactggcgaggctggtctggcagtcttccagtgtggtgttccacacgggtgccggcatcagcactgcctctggcatccccgacttcaggtctgtgattgtgcaggggaagtcgaggcaaggcctaccaggctgccagaggcttccctgcgagccacacacatctgggaatgagaacacatccatctgctttcctcctggatgtgtcctgggtactccctttaagatgtgtcccttggctgggcatggtggatcacaaggtcaagaattccagaccagcctggccaatatggtgaatccctgtctctactaaaaatacaaaaattagccagttgtggtggcacacatctgtagtcccagctactcgggaggctgaggcaggagaattgcttgaacctgggaggtggaggcagtgagccgagattgcaccactgcactccagcctgggcgacagagtgaggctccgtctaaaaacaaaacaaaaagatgtgtcccttgtcacaaccagcattccactcacctcattggccagaacacggtcacctgatcacacctggctgcaagggttgctgggaaatgtagtctttcatatttgcaagcgtagccaggtgtggtggcaggcacctgtaatcgcagctacttggaaggccgaggtgggagaatcgcttgaacccgggaggcagaggttgcagtcagccaggatcatgccattgtactccagcctgggcaacagagccagactccatctcaaaaaaaaaaaaaaaaaaaaaaaaaaaaagccaaggcgtgaatttctcctccttctcctcttccataacctgctgtggctccccattgccaggcagtgtagagttctgaataccttgtgctggaagctgaagcccttcctgccccagccctgaatcacctctccaacttcagcccctcctgctcctgctgcagcccccaaaacacttgcattttctcctaaactcatgggctcttcccagcacccaggcctttgtttaccccttctgtctgatcttccctctcacccttcaagaaactgcttagcctcctccaggaagcccttccacgtgccccagggcccccacctccacggggcttccccaggcccaggtacctcctctgatccaggcttgactcttggggccagaggatctgtgtccacctgtctcccccaagatcaagggcttctggagggcagggcttgggcccatgtgagcatcgtcgggctcattgcagcagcagtgttggttgaatagaataagtcatttttgccttcgtgtgaattcatctctctctctctgcctctccctctctctgtctctctccaattctgtctctgacttgctttgtctttaactctttatctctctgtctgtgtcttgttctatccccctctccctgttcttgcaactcaccctctatttctgtttctgattccctctctctgtctccctgtctctctctgtctcctgattttctctctctccaactttctctctatacctctctgattctccctctgtctctttttctgttcccctctccccgtccatctctcccggcctgccaccttcaggggtccccacggagtctggaccatggaggagcgaggtctggcccccaagttcgacaccacctttgagagcgcgcggcccacgcagacccacatggcgctggtgcagctggagcgcgtgggcctcctccgcttcctggtcagccagaacgtggacgggctccatgtgcgctcaggcttccccaggtaacaccctggccccgcccccacaaaagagcttggggccccacaaaccgtgtttgcatttttagggggagagtccccttttcctggttctataagattctagccctgagttcttggcccagtgtgtggagatctctgagtcccatggctcagagctgtcccggctgaggccagaggcagaatttccctcgagatggggctaaggggaggagagctgtcagggtctagaagttgcagtttgttttttgttgttgttgttgtttttgagaccgagtttcgttcttgttgcccaggctggagtgcaatggcgtgatctccgctcagcctcccaggttcaagcgattctcctgcctcagcctccctagtaactgggattacaggcatgcgccatcacacccagctaattttgtatttttagtagagacggggtttctccatgttggccaggctggtcttgaactcctgacctcaggtgatctgcccgcctcagcctcccaaagtgctggggttacaggtgtgagccaccacgcttggcctgttgtgtttttaatatccatctttattaatctgacactaaacgtgtctgacactgaagtgaacctgtgctctggggcaggctgatttcccaataaaagtgtggccctcccctgcccctctttgccaggtctcacccctggggcaaccaatgacagccaggtcagttgttgagacgaggagctcggcagccaggggtgaggggtgaggaagagatttttctctgcttataaaagcaaacgaggggccgggcatggtggctcacatctgtaatcccagcactttgggaggccgaggcaggcggatcacgaggtcaagagttcgagaccagcctggccaacatgttgaaaccccatctctactaagagtacaaaaattagctgggcgtggtggcgcatgcctgtaatcccagctactcgggaggctgagtcaggagaatcgcttgaacccgggaggcagaggttgcagtgagccgagatggcgccactgcactccagcttgggtgacagagcaagactctgtcttgaaaaaaaaaaaagcaaaggagggtcaggtgtggtgacttatgcctggaatctcagcactttgggaggccaaggcgggcggatcatgaggtcaggagatcgagaccatcccggccacatggtaaaaccccgtctctactaaaaacagaaaaattaggctgggtacagtggctcacgcctgtaatcccggcactttgggaggccgaggcgggtggatcacaagctcaggagatcgagaccatcctggctaacacggtgaaaccctgtctctactaaaaatacaaaaaattagcccggcgtggtggcgggcgcctgtagtcccagctactcaggaggctgaggcaggagaatcacttgaaccccggaggcagaggttgtggtgagctgagattgtgccattgaggttgtggtgagctgagattgcaccattgcactccaacctgggcaacaagagcaaaactctgtctcaaaataaataaataaataaaataaagctgggattggatctcatgcttcagggccattcaatgtctcggtttcttccattataaactgggaatttgaattcctgtgcttctgacctggtgacatcaagaggttcccatatgctctcggagggggacgggcattttgtgagtggaaagggcttcccgttatctaaggtgggttcagccttgggggttaatgattccttgggctcagagaggttggtccacttgcccagagatgcacagcagatgaatggtggagccaggagctagaagagccagaaagaaggagttgatcaatgttgtgggagaggagtccgggaagccttcctggaggagaggggcttagcaccagctccaaagcctgggcatccagggatcctttcccaccatcaagcctcttcctgctcttcccacagggacaaactggcagagctccacgggaacatgtttgtggaagaatgtgccaagtgtaagacgtgagtgccacctgggtgcaggggtgggggctctgccagagggggttgggggtcgaatccgatgtcccagagacccagagggtatggggggactggggtgtggccctcctggggggatctgggggcgtgtctccctcttggggggatataaggagtatgtctccctcctggagggatttggggggcatgtcttcctcctggagggatttgggggggccgtgcctccctcctgtggggggtacatccgtgtcctggcactgctgtagcaacctgccacagatgagcagcgtagaacaatagaaatttgtgatctcacagttctggggaccagaagtccaaaatccaggtgtctgcagggccatgcccctctgcaacctgtaggggaggatttttcctgccttttcctggctgctggtggcagccagccacccttggtggtcctggacctacagccacaggggccttcttatctctgtgtttctccttttttttgagacagtcccgctctgtcatccaggctggagtacagtggggcaatctcggctcactgcaacctccgcctcccgggttcaggcaattattctgcctcagccatccaagtagctgcaactgcaggcgcccgccaccacacctggctaatatttgtatttttagtagagacggggtttcaccatattggccaggctggtgtcgaactcctgaccttgtgatctgcccgcctcagcctcccaaagtgctgggatgacaggcgtgagccaccacgcccggcccagtataacgattaaagtcaggaaaagtaaagtggacatcgccttctctaatcccgaatccagactcggcctgtcgcccccatgctccaattgttcctgtttctcctggtccgggatcccatgctgggtcttgtctctcgagccccttcgtctgtctgggacagtttcctgctttgttttctgtgctccgggcaccgagcagcatcccagcccgttattcatggaaggctactcgttccgtgtcgctgggtgctagttctggtcacctgtccaccccccacctccctgggagaacgtcaccctagaaacagtgcgagagtcacccatgggagctcacctggtcccatcctcccccttcctccctgacacaggcagtacgtccgagacacagtcgtgggcaccatgggcctgaaggccacgggccggctctgcaccgtggctaaggcaagggggctgcgagcctgcaggtgagccacccccacccatgccctgggctccaggggaggctgcgaggcccctgaggactctcctcagcttcctcattgcaggggagagctgagggacaccatcctagactgggaggactccctgcccgaccgggacctggcactcgccgatgaggccagcaggtctgaccccccacccccagggagcccatggtggggcggggcgggacgacagcagaaacacagccagctccagcatgggacagtggctgaggctcacaggcagtgaggggaggcttcctggagcaggtgggccaggccaggggctgcacacacgcactcacacacactcgtcacctcatggctctgggtgggtgctacacaaggaaaccaaggcttccgccaggtgtctcctctatccagtgctgcccagccgggaggtgaccgagccagggtcccaccctaggtgtccaagctcttaccacactgtgatactccccggaagtgtctaagggcccgcccagatcaatgaccccgccaacggaccgcagaggagggcagggcgggatcccaaaggctgactcgggagtggggctggccttgaccgccccggtgagcacagatggcctaggtgtgaaccggcccccagggctggctcgggatgttggcaggagcagggcatcaggctcagcccacgctccccggccccaggaacgccgacctgtccatcacgctgggtacatcgctgcagatccggcccagcgggaacctgccgctggctaccaagcgccggggaggccgcctggtcatcgtcaacctgcagcccaccaagcacgtaggtgtctgagcctacccctgcccagggccaccatgcaccctctgtcccccacgcctgacccgtcccgcccctcggcaggaccgccatgctgacctccgcatccatggctacgttgacgaggtcatgacccggctcatgaagcacctggggctggagatccccgcctgggacggcccccgtgtgctggagagggcgctgccacccctgccccgcccgcccacccccaagctggagcccaaggaggaatctcccacccggatcaacggctctatccccgccggccccaagcaggagccctgcgcccagcacaacggctcagagcccgccagccccaaacgggagcggcccaccagccctgccccccacagaccccccaaaagggtgaaggccaaggcggtccccagctgaccagggtgcttggggagggtggggctttttgtagaaactgtggattctttttctctcgtggtctcactttgttacttgtttctgtccccgggagcctcagggctctgagagctgtgctccaggccaggggttacacctgccctccgtggtccctccctgggctccaggggcctctggtgcggttccgggaagaagccacaccccagaggtgacaggtgagcccctgccacaccccagcctctgacttgctgtgttgtccagaggtgaggctgggccctccctggtctccagcttaaacaggagtgaactccctctgtccccagggcctcccttctgggccccctacagcccaccctacccctcctccatgggccctgcaggaggggagacccaccttgaagtgggggatcagtagaggcttgcactgcctttggggctggagggagacgtgggtccaccaggcttctggaaaagtcctcaatgcaataaaaacaatttctttcttgcatctcagtgtgtttactttattttattgagccagagtctcactctgtcaccaaggctggaatgcagtggcgtgatctcagctcactgcagcctctgcctcctaggttcaagcaattctcctgcctcagcctccagagtagctgggattataggtgtgtgccaccacacccagctaattgtttgcattttttgtagagatgggggtctcactatgtgactcaggctggtctcaaactcctgggctcaagcagtcaggccaccttggcctcccaaagtgctggacttaacgggcgtgagccactgtgcccagtgagtgtttaaattccctatttgtggcaggtcctcgcccccctgggtcaggagttcgtggtcccctcctccctggaccagctgcttgggctccgttgcaatccctgcccctcaagcctgggggccgaggaacaagggctcacctctccccccaccccgcctctggagggatcaggccagttttctgatgatgaagccaataaggcagctggcattttctgagcactcagtttgtagttatacacttatgcacatgctttttgttgttgtttaacatttacccccaggctatgagtccccacctgtgctttgggcgcgattttgcgatggcgcccgggcaggcgcgcacagcccgcagtgggggcgaccccacagacgagcgcaggagcagccgggttccactctccccagctgtgaccttaggcagtccctccacttccgacgcctcggtgtcctcgcccgcaaaatgagcagggtgggccgcccagatccccgggaaggcagctgccttccccgcaactccggaggggacaccttggaagcgccacgcctgcctccccgcactccgcccgccgccgctctccaaggtgctgaagtcgtgcccggcgcctctccctccgctgctccagcgcgggcatctggcgggggtgtggagcccacacctcactcacccatcccaggctggcccagcccctccttctggggagtcgaggagccccagactccgcctccacaccaaaacaaggttctgtcaaaatactttatttcggatcaggcagtcttagaaaaggggggtgattgtgggccgtggctgctccaaagaccagggcgcacccggggctccggggccaggctccctgcagtctcggcggcttcctcctcccagtgtgcgagggaggccgggaggggtccctgggcggggagttgctgcgcatctgttgtgtgtgtgcgtctgtctgtctgttcaggtctgtttcagactacgtctgcctgtctgtccaggtctgttttaggctgtgtctgcctgtctctctgtctgggtctctttcaggctgcgtcggtctgtctgtctgggtctgtttcaggctgtgtctgtctgtctgtctgggtctgtttcaggctgtgtctgtctgtctgtccgggtctgtttcaggctgtgtctgggtctgtttcaggctgtgtctgtctgtttgtctgggtctgtttcaatctgtgtctgtctgtctaggtctgtttcaggctgtgtctgtctgtctgtccgggtctgtttcaggctgtgtctgtctgtctgtccgggtctgtttcaggctgtgtctgtctgtctgtccgggtctgtttcaggctgtgtctgtctgtctgtctgggtctgtttcaggctgtttctgtctgtctgtccggatctgtttcaggctgtgtctgggtctgtttcaggctgtctgtctgtctgtctgggtctgtttcaggctgtgtctgtctgtctgtttgtctgggtctgtttcaggctgtgtctgtctgtccgggtctgtttcaggctgtgtctgtctgtccaggtctgtttcaggctgtatgtgtgtctgctctttgcttctgctcctggctctgtgtgtatttcccgggtcctgtggccctctttgccttgtgtctgagtgtcggttcctgcgtgggcctcagtcaggccctgggtgtgtggctatgagctgtgcctcccccattctggcatctctgctggggtcttggcctcacgtcccatccccaggtgggtagctgcccagtgcagcatccccaaggcacccctgggcagaggggcctgggagcatagtcctggcggggctcacagctcgtctcccgccgcctccagccctgcacgtcctgagccagtgctcggcccaggcgccacccagtccagcagggcgacctggcccagcccctctgttgcattcctcaggaccagggtggcgttgtccagctcctccgtcgaattggtcaggttcgcggtgtcctggaagccccagtctgccccggggcttcctggagactcttctcgggttgtgtcagcctcgggtcggggtcctggggcctcggagcctggcacagcatcagcagccacgcgggaggcagcatcgttgtgcaaagttctggagaacactgattggggaaggggggcatcacaggggacaaggtggaggtggggtcctatgctcccttccctggcccccagcctcagggaacaagggcacaggggtcttctccccctcccccagaggcccaggacggggacttggggagaccagacaagggtttcaaaggtggggatcccctacctcgtacaggcgcaaagtccccagggctctcggttttgttggggccaaaagggctgatggaggggaggatgatgagggcaaaggacagcaacaggacctggtggagacagcggcagagtcaccccctccctcccctcccctgcaagcatctccatcccacaggcagggaaactgaggccccaaagaccagactggatcatacttgagctggggcacaaggagagcttggactcattgtcacctccctatgggcccctctacagaagcctaggtccccggcttgcctgggggcaccaggactcactgcgacacaggtgcctgtctgggctgacttgctggtggactgcaccacaatggcctggagtttcttcagttgctccaagagggaccttagagagacaggcaggcctccgctgagccctaaagggcctcggttctgcttctcgtccatttccggggtcccccagccccgctaaagtccaaattccatccattcttcaagggcctctggctctttattatttattttatttatttatttatttgtttatttatttatttatttattttgagacagagtcttgctccatcgcccaggctggagtgagtggtgggatggcagctcactgcaagctccgcctcccaggttcacaccattctcctgcctcagcctcccgagtagctgggactacaggcgcccaccaccacacccagctaattttttttgtatttttagtagagacggggtttcaccgtgttagccaggatggtcttgatctcccgaccttgtgatccgcccacctcagcctcccaaagtgctgggattacaggcgtgagccaccacaccaggccttatttatttatttttgagacagagccttgctctgtcacccaggctggagtgcagtggtgcgatctcggctcacggcaacctccgcctcccgagttcaagcaattctcctgcctcagcctctcgagtagctgggactgcaggtgcccgccaccacgcctggctaatttttttgtatttttagtagagacggggtttcaccatgttggccaggctggttttgaactcctgacctcaggtgatccacccgcctcggcctcccaaagtgctgagattacaggcgtgagccactgcacgcggcccataggtaaaactcttattccctatgtcattctgccatcacatgggctctctgctcttcctgcaaagggactctggggctgcttcccctgtcctctgccccagctggacccagactcacaggttttgcttctcgagatgcaagactttcctctgtaactcctgattctgagcagtgcaagctgacatcctgaaaggaggaagacgcatcgacattcagcatatgccagtcaccagctggccccactgacatctcccccagaggcctcacgttacaagccaagagaacccaaggccagagaggggaagtcattcatccaaggttactcggcaggtcagacagggctgggatttgaacccacatctgcctggttcctaggtcccatttctgcattaatatggagggggcttcattcaaagctgagccccctggatgggtgtggtggttcacacctgtaatcccagcactttgggaggccgtggtgggcggatcacctgaggtcaggagttcaagaccagcctggccaacatggtgaaaccctgcctgtactaaaaatgcaaaattagccaggtgtggtggtgggcgcctataattccagctacttgggaacttgggaggctaaggcaggagaatcgattgaacccgggaagtggaggttgcagtgagtcaagatcgcaccattgcactccagcctgggcaacaagaatgaaactctgtgtcaaaaaaaaaaaaaaaaaaaaaaaagctgagcctcctagattcaggcagtgatgtttccagaagatgaaatatcaggacaaccaggcatcctgggagactcaagtttctttttttgtttgtttgttttttgagatggagtctcgctctgtcgcccaggctggaatgcagtggcacaatctcgactcactgcaagctctgccttctgggttcacgccattctcctgcctcagcctcccgagtagctgggactacaggcacccgccaccaagcccagttaatttttttggattttttgtaaagacagagtttcaccgtggtctcgatctcctgaactcgtgatccgcctgcctcagcctcccaaagtgctgggattacaagtgtgagccacggcgcccggccgagattcaagtttcatctctccctctccccatgaccttgggccactccactctctgatctcagcttttgtgtctgtaaaatgggatacaattacccaggacatagggtggtggggggaatgaccctggataaagatgatcaggagcttagcagattgcatttaagaaaggggagagaccaggcgcagtggctcacgcctgtaatcccagcactttgggaggctgaggcggccagatcacctgaggtcaggagtttgagactagcctgggcaacacagtgaaaccccatctctaccaaaaatacaaagaaattagctgggcgtggtggccatgcacctgtaatcccagcttctggagaggctgaggcaggagaatcgcttgaacccgggaggtggaggttgcagtgagccaagatcgcaccactgcactccagcctgggtgatagaaggagacccttccacacacacaaaaaggaagtgtctatcttcaggcagagggtcagaataggatgggtcacactttgtcctttttccgcacaccttctagggggcaaagggtcccccaaacccttgtcctacaccatcactaggcatctttccatccctgcaatcagtaagaagcatgatctctcccagagaggagaatcacctccaattttgtcagactctaagctgtgtggccttagccacatctccttctctctgggcctcagtttcctccacgagtgtagagtctgggtccagcactacccaccgagtctccaggccatcgatatattccttcttcttcttcctgctttcttgcgccgactgcttgttccggattttccggcggatttttttcagcactcgctcctcgtactgccaagtgaaatggggaggagggtttcaggccagaaagtccccacttggagtccgggggcagtagctctcgcctgtaatcccagcactttgggaggccgaggcaggcgtatcacctgaggtcaggagttcgagaccagcctggccaacatggtgaaacaccgtctctactaaaaatacaaaaattagccaggcatggtggcgggtgcctgtaatcccagctactcgggaggctgaggcaggagaatggcatgaacccgggaggcggaggttgcagtgagccaagatcgtgccattgcaatccagcctgggcaacaagagcgaaactccatctcaataaataaatagataaataaataaataaataaataaataaaataattaaaattaaaaaattaaagtcttcactttggggatggtgcgacagtccccactgtcctgaccccacttcacctaacctcgaccccacaacttcaccccatcctctttgcatacaagacatcccggagccaaggacccagaggcagattcctaatgacttgaagctaccctttgcccaaaccctcacagagtctctgggaggtgcctgggttctgagggtcttttcccagctcccaatactgtaaaatgggcaactgcccaccagactttgggcatgggtaccactccaccaccttgtggccatccctggaaacatcacctttccctggcgacagcaagtgttttaagactaattaataatttttttcttctttcttacgtttctttcttttctttcctttcttttcccctccctccctccctccctcccttccttcctttctccctttctctctttctctctttctctttctctttctctctttctttccttttcttcctttctttccttcttttcttcctttctttctttcctttctttctttcttttctttcttttcctttctttctttctttcttttctttccttccttttctctctctctctctctctctctttctttctttctttcttgtttcgctcttgtcacccaggctggagtgcagtggcaagatctcagctcactgcaacctccacccccagggttcaagtgattctcccaccccagcttcccaagtagctgggattacaggtgcacaacaccatgcctggctaatttttgtatttttagtagagacagggtttcaccatgttggccaggctggtctcaaactcctgacctcaggtgatccgcccatctttgcctcccaaagagctgggattacaggcatgagacaccacacccggccaataagtgtcttcaaatgggaatgtcaggctgggcgcggtggttcacagtgctgtaatcccagcactttgggaggccaaggcaagaggatcgcataagtccaggagttcaagactagactgggcaacatttagtaaagaccctgtctctactaaaacaaaacaacaaccacaaaatcagctgggtgtggtggtgcatgcctatagtcccagctacttgggaggctgaggcaggaggatcccttgagaccaggagttcaaggttgcagttagctgctacctgcagattgtaccactgcactccagcctgagcgacaaagtgagatcctatctcaaaacaaacaacaacaacaatagaaacagatggggccaggcacggtggctcacacctgtaatcttaacactttgggaggccaaggtcagaggactgcttgaggccaggagtttgagaccagcctgggcaacatagcaagaccctgtctctaaggaaaaaaaaaaatgctgggcgcagtggctcacacctgtaatcccaacactttgggaggctgagctgggcagatcacaaggtcaagagatcgagaccatcctggccaacatggtgaaactctgtctctactcaaaaaaaaaaaaaaaaaaaaaaattagccaggcgtggtggcgcgtgcctgtaatcccagctacttaggaggctgaggcaggagaatcacttgaacctgggaagcggaggttgcagtgagccgagatcgcgccactgcactccagcctgggcaacaaaagcgaaactccgtctcaggaaaaaaaaaaaaattagctaggcataatggcatacacctgtagtcccagctgctagggaggctgatgtgggagaatcacttgtactccagagggggaagttggagtgagccaagatcacctcactccactccagcctgggcaacagagtcagaacctgtctcaatagaaaaaaaaaaaaaacagatgagaatatcaaactcaggcattgatactgagtgcagcaggctgggtggggactgtggttagctagagaacccaaacagctacccagccattgactggtgcatatggaggtttgagaatatgaaacagaggacattcaagtaattgagttggttttttggattttgttttgtttatgtttttagtttttttgtttttgtttttgttttgacagagtttcgctcttgtcacccaggctggagtgcagtggtaccatctcggctcactgcaacctccacctcccgggttcaagggagatcctcctgcctcagcctcctgagaagctgggaggctgagaagcaccttacagttgcccaccaccaggcacagctaatttttgtaattttagtagagacggggtttcaccatgttggccaggctagtctcgaactcctgacctcaagtgatcctctgcctcagcctcccacagtgctgggattacaggtgtgagccaccgtgcccagcctcaagtcactgagttctcttgtaaaatctaccggtcagaaaaacattatcaagcaattcaaaaatgtataaaatgcagtacagtccaatcaaaacatgtctgcagggccaggcatgatggctcatgcctgtaatcccaacactttgggaggccaaggtgggagaatcacttgaacccaggagtcccagcccagcctgggcaacataacaagaccccatttctacaaaaaaaaaaaaaaaattaaattagccaagtgtagtggcgtgcacctgtcatcctagctacttgagaggctgaggcgggaggatctcttgagcccaggaggtcaaggctgaagtgagctatgatggcaccactgcactccagcgggacacagcaagaccctatctccaaaaaaaaaaaaaagtttgctgcacccaaattgctgccacctggagtccgccattcattcctggatgttgataattaccctctgagttgaatttacaatggggcttctgactgattgttttggctctggtgacagacacagcatagcattctagtacgggtgttctaaaggtgagacacatagccagtgcggtggctcacgcctggaatcccagcactttgggagaccgaggcaggaggatcacatgaggtcaggagctcgagaccagcctggccaacatggtgaaaccctgtctctactaaagatacaaaaattagctgggcgtggtggcgcatggctgtaatcccagctactcaggaggctgaggcgggagaatcgctggaatctgagaggcagaggttgcagcaagctgagatcgtgccactgcatcccagcctcagtgacagagaaagactctactctaaataaataaataaaggtgggacacacatgcaggtaagtgcacgaaggggagatggatccagggctggaagtccccccagactcaccttagtgaggggcagctgagtgggcagggtgatgccttctttagccagcagcttcttctcatcctcggtgagcaccagctcctgacagtgcccagccccaggtcgcaggaggtaggaggcccccaggtgatgctgttgctacggaaaaaatcagaggaatgacggcgggtgcagggacgccaactgccttcaggaaatgaaagaggtatcagatcgaaaacactatcaccccaggctgggtgtggtggctcacgcctgtcatcccagcacttagagaggctgaggcatgtggatcacttgagctcaggagatcgagaccagcctgggtaacatgatgaaacctcgtctctactaaaaatacaaaaattgcccaggtgcggtggctcatgcctgtaatcccagcactttgggaggccgaggtgggcaaatcactaggtcaggagtttgagaccatcctggtcaacatggtgaaaccccgtctctactaaaaatacaaaaagttagctgggcgtagtggcgggtgcctgtaataccagctacttgcgaggctgaggcaggagaatcgcttgaacccagaagtcagaggttgcagtgagccgagattgtgccactgcactccagccctagtgacagtatgagactccgtctcaaaaaaaaaaaaaaaaaaaaattacccgaccatggtggcggcgcctgtaatcccagctactcaggaggctgaggcaggagaactgcttgaacccgggaagcagaggttccagtgagcccagatcacaccactgcactccagcctgagagacagagtaagactctgtctcaaaaaaaaaaaaaaagaaaaggtggctcacgtctgtagtcccagcactttgggaggccgaggcaggtggatcacttgaggtcaggagttcgagactagcctggccaacatggtgaaaccctgtctccattaaaaatacaaaaatcagcctggtgtggtggcacgtgcctgcaatcccagctactcgggaggctgaggcagaagaaccgcttgaacccgggaggcaggggttgcagtgatctgagatccagcctgggcgacagaaattctgtctcaaaacagcaacaacaaaaactatcactcctgccaccacagaatctcccttggcagcagggctcgaaataaccaacacacggtcctttgaccgggtcattctaccttcagaaatcagtcctacagatatcctcacacacgcgcaaaatggcatatggacagggttctttctttctttccttccttccttccttccttctttctttctttctttctttcttttctttcttctttctttctttcttagacgagtctcgctctgtcgcccaggctggagtgcagtggcgcgatctcggctcactgcaagctctgcttcccgggttcacgccattctcctgcctcagcctcctgagtagctgggactacaggtgcccgccaccacgcccggctaattttttgttatttttagtagagacggggtttcaccgtgttagccaggaaggtctcgatctcctgacctcgtgatctgcccgcctcggcctcccaaagtgctgggatcacaggcgtgagccaccgcgcccggcccttttgacagctttcttcttttcattgtattattactattattatttttgaaatagggtcttgctacttcacccgggttggagtgccgtggtgctctcttggctcactgcaacctccgcctcccgggctcaagcgattctccagcttcagcttcccgagtagctggaaccacagagcgtaccgccatgcttggctaattttgaattttttgtagagatggggtttcactctgttgcccaggctggtctcaaactcctgggctcaagcaatctgtccacttcagcctcccaaattcctgggattacaggcatgagccaccacacccatcttttcttcttttaagatgcaagatgtcactgtgtcacccaggctggagtgcagtcgtgtgatcatagctaactgcagccttgacctcctgagctcaagtgatcctcctgcctctgcctcctgagtagctgggactacaggtgtgcgccaccacactcagctaattttttttttttttttttgtagagacgaggtcttgctatgttgcccaggctggtcttcaactgctgataactagcatttataaatgcatcatttttttttgtatcgttgttctgtatgtcagctatacaaaaaaaatgggaggtcgaggcaggaggatcacttgagcttaggaatttgaggcagttgtggtgacagagggaaaccttgactttaaataaaataaaataaggccaggcacagtggctcatgcctgtaatcccagcactttgggaggctgaggcgggtggatcacctgatgtcaggagatcgagaccagcctgaccaacatggtgaaaccccgtctctactaaaaatacaaaaattagtcgggcatggtggcaggcacctgtagtcctagctacctgggggctgaggtatgagaatca

SEQ ID NO: 82 - DNA, 32491 bp, Homo sapiens
tgattctcatacctcagcccccaggtagctaggactacaggtgcctgccaccatgcccgactaatttttgtatttttagtagagacggggtttcaccatgttggtcaggctggtctcgatctcctgacatcaggtgatccacccgcctcagcctcccaaagtgctgggattacaggcatgagccactgtgcctggccttattttattttatttaaagtcaaggtttccctctgtcaccacaactgcctcaaattcctaagctcaagtgatcctcctgcctcgacctcccattttttttgtatagctgacatacagaacaacgatacaaaaaaaaatgatgcatttataaatgctagttatcagcagttgaagaccagcctgggcaacatagcaagacctcgtctctacaaaaaaaaaaaaaaaaaattagctgagtgtggtggcgcacacctgtagtcccagctactcaggaggcagaggcaggaggatcacttgagctcaggaggtcaaggctgcagttagctatgatcacacgactgcactccagcctgggtgacacagtgacatcttgcatcttaaaagaagaaaagatgggtgtggtggctcatgcctgtaatcccaggaatttgggaggctgaagtggacagattgcttgagcccaggagtttgagaccagcctgggcaacagagtgaaaccccatctctacaaaaaattcaaaattagccaagcatggcggtacgctctgtggttccagctactcgggaagctgaagctggagaatcgcttgagcccgggaggcggaggttgcagtgagccaagagagcaccacggcactccaacccgggtgaagtagcaagaccctatttcaaaaataataatagtaataatacaatgaaaagaagaaagctgtcaaaagggccgggcgcggtggctcacgcctgtgatcccagcactttgggaggccgaggcgggcagatcacgaggtcaggagatcgagaccttcctggctaacacggtgaaaccccgtctctactaaaaataacaaaaaattagccgggcgtggtggcgggcacctgtagtcccagctactcaggaggctgaggcaggagaatggcgtgaacccgggaagcagagcttgcagtgagccgagatcgcgccactgcactccagcctgggcgacagagcgagactcgtctaagaaagaaagaaagaagaaagaaaagaaagaaagaaagaaagaaagaaggaaggaaggaaggaaggaaagaaagaaagaaccctgtccatatgccattttgcgcgtgtgtgaggatatctgtaggactgatttctgaaggtagaatgacccggtcaaaggaccgtgtgttggttatttcgagccctgctgccaagggagattctgtggtggcaggagtgatagtttttgttgttgctgttttgagacagaatttctgtcgcccaggctggatctcagatcactgcaacccctgcctcccgggttcaagcggttcttctgcctcagcctcccgagtagctgggattgcaggcacgtgccaccacaccaggctgatttttgtatttttaatggagacagggtttcaccatgttggccaggctagtctcgaactcctgacctcaagtgatccacctgcctcggcctcccaaagtgctgggactacagacgtgagccaccttttctttttttttttttttgagacagagtcttactctgtctctcaggctggagtgcagtggtgtgatctgggctcactggaacctctgcttcccgggttcaagcagttctcctgcctcagcctcctgagtagctgggattacaggcgccgccaccatggtcgggtaatttttttttttttttttttttgagacggagtctcatactgtcactagggctggagtgcagtggcacaatctcggctcactgcaacctctgacttctgggttcaagcgattctcctgcctcagcctcgcaagtagctggtattacaggcacccgccactacgcccagctaactttttgtatttttagtagagacggggtttcaccatgttgaccaggatggtctcaaactcctgacctagtgatttgcccacctcggcctcccaaagtgctgggattacaggcatgagccaccgcacctgggcaatttttgtatttttagtagagacgaggtttcatcatgttacccaggctggtctcgatctcctgagctcaagtgatccacatgcctcagcctctctaagtgctgggatgacaggcgtgagccaccacacccagcctggggtgatagtgttttcgatctgatacctctttcatttcctgaaggcagttggcgtccctgcacccgccgtcattcctctgattttttccgtagcaacagcatcacctgggggcctcctacctcctgcgacctggggctgggcactgtcaggagctggtgctcaccgaggatgagaagaagctgctggctaaagaaggcatcaccctgcccactcagctgcccctcactaaggtgagtctggggggacttccagccctggatccatctccccttcgtgcacttacctgcatgtgtgtcccacctttatttatttatttagagtagagtctttctctgtcactgaggctgggatgcagtggcacgatctcagcttgctgcaacctctgcctctcagattccagcgattctcccgcctcagcctcctgagtagctgggattacagccatgcgccaccacgcccagctaatttttgtatctttagtagagacagggtttcaccatgttggccaggctggtctcgagctcctgacctcatgtgatcctcctgcctcggtctcccaaagtgctgggattccaggcgtgagccaccgcactggctatgtgtctcacctttagaacacccgtactagaatgctatgctgtgtctgtcaccagagccaaaacaatcagtcagaagccccattgtaaattcaactcagagggtaattatcaacatccaggaatgaatggcggactccaggtggcagcaatttgggtgcagcaaacttttttttttttttggagatagggtcttgctgtgtcccgctggagtgcagtggtgccatcatagctcacttcagccttgacctcctgggctcaagagatcctcccgcctcagcctctcaagtagctaggatgacaggtgcacgccactacacttggctaatttaattttttttttttttttgtagaaatggggtcttgttatgttgcccaggctgggctgggactcctgggttcaagtgattctcccaccttggcctcccaaagtgttgggattacaggcatgagccatcatgcctggccctgcagacatgttttgattggactgtactgcattttatacatttttgaattgcttgataatgtttttctgaccggtagattttacaagagaactcagtgacttgaggctgggcacggtggctcacacctgtaatcccagcactgtgggaggctgaggcagaggatcacttgaggtcaggagttcgagactagcctggccaacatggtgaaaccccgtctctactaaaattacaaaaattagctgtgcctggtggtgggcaactgtaaggtgcttctcagcctcccagcttctcaggaggctgaggcaggaggatctcccttgaacccgggaggtggaggttgcagtgagccgagatggtaccactgcactccagcctgggtgacaagagcgaaactctgtcaaaacaaaaacaaaaacaaaaaaactaaaaacataaacaaaacaaaatccaaaaaaccaactcaattacttgaatgtcctctgtttcatattctcaaacctccatatgcaccagtcaatggctgggtagctgtttgggttctctagctaaccacagtccccacccagcctgctgcactcagtatcaatgcctgagtttgatattctcatctgttttttttttttttctattgagacaggttctgactctgttgcccaggctggagtggagtgaggtgatcttggctcactccaacttccccctctggagtacaagtgattctcccacatcagcctccctagcagctgggactacaggtgtatgccattatgcctagctaatttttttttttttcctgagacggagtttcgcttttgttgcccaggctggagtgcagtggcgcgatctcggctcactgcaacctccgcttcccaggttcaagtgattctcctgcctcagcctcctaagtagctgggattacaggcacgcgccaccacgcctggctaatttttttttttttttttttttttgagtagagacagagtttcaccatgttggccaggatggtctcgatctcttgaccttgtgatctgcccagctcagcctcccaaagtgttgggattacaggtgtgagccactgcgcccagcatttttttttttccttagagacagggtcttgctatgttgcccaggctggtctcaaactcctggcctcaagcagtcctctgaccttggcctcccaaagtgttaagattacaggtgtgagccaccgtgcctggccccatctgtttctattgttgttgttgtttgttttgagataggatctcactttgtcgctcaggctggagtgcagtggtacaatctgcaggtagcagctaactgcaaccttgaactcctggtctcaagggatcctcctgcctcagcctcccaagtagctgggactataggcatgcaccaccacacccagctgattttgtggttgttgttttgttttagtagagacagggtctttactaaatgttgcccagtctagtcttgaactcctggacttatgcgatcctcttgccttggcctcccaaagtgctgggattacagcactgtgaaccaccgcgcccagcctgacattcccatttgaagacacttattggccgggtgtggtgtctcatgcctgtaatcccagctctttgggaggcaaagatgggcggatcacctgaggtcaggagtttgagaccagcctggccaacatggtgaaaccctgtctctactaaaaatacaaaaattagccaggcatggtgttgtgcacctgtaatcccagctacttgggaagctggggtgggagaatcacttgaaccctgggggtggaggttgcagtgagctgagatcttgccactgcactccagcctgggtgacaagagcgaaacaagaaagaaagaaagaaagagagagagagagagagagagaaaaggaaggaaagaaaagaaagaaagaaagaaaggaaaagaaagaaaagaaagaaagaaaggaaagaaagaaaggaagaaaagaaggaaagaaaggaagaaaaggaaagaaagagagaaagagaaagagaaagagagaaagagagaaagggagaaaggaaggaagggagggagggagggagggaggggaaaagaaaggaaagaaaagaaagaaacgtaagaaagaagaaaaaaattattaattagtcttaaaacacttgctgtcgccagggaaaggtgatgtttccagggatggccacaaggtggtggagtggtacccatgcccaaagtctggtgggcagttgcccattttacagtattgggagctgggaaaagaccctcagaacccaggcacctcccagagactctgtgagggtttgggcaaagggtagcttcaagtcattaggaatctgcctctgggtccttggctccgggatgtcttgtatgcaaagaggatggggtgaagttgtggggtcgaggttaggtgaagtggggtcaggacagtggggactgtcgcaccatccccaaagtgaagactttaattttttaattttaattattttatttatttatttatttatttatttatctatttatttattgagatggagtttcgctcttgttgcccaggctggattgcaatggcacgatcttggctcactgcaacctccgcctcccgggttcatgccattctcctgcctcagcctcccgagtagctgggattacaggcacccgccaccatgcctggctaatttttgtatttttagtagagacggtgtttcaccatgttggccaggctggtctcgaactcctgacctcaggtgatacgcctgcctcggcctcccaaagtgctgggattacaggcgagagctactgcccccggactccaagtggggactttctggcctgaaaccctcctccccatttcacttggcagtacgaggagcgagtgctgaaaaaaatccgccggaaaatccggaacaagcagtcggcgcaagaaagcaggaagaagaagaaggaatatatcgatggcctggagactcggtgggtagtgctggacccagactctacactcgtggaggaaactgaggcccagagagaaggagatgtggctaaggccacacagcttagagtctgacaaaattggaggtgattctcctctctgggagagatcatgcttcttactgattgcagggatggaaagatgcctagtgatggtgtaggacaagggtttgggggaccctttgccccctagaaggtgtgcggaaaaaggacaaagtgtgacccatcctattctgaccctctgcctgaagatagacacttcctttttgtgtgtgtggaagggtctccttctatcacccaggctggagtgcagtggtgcgatcttggctcactgcaacctccacctcccgggttcaagcgattctcctgcctcagcctctccagaagctgggattacaggtgcatggccaccacgcccagctaatttctttgtatttttggtagagatggggtttcactgtgttgcccaggctagtctcaaactcctgacctcaggtgatctggccgcctcagcctcccaaagtgctgggattacaggcgtgagccactgcgcctggtctctcccctttcttaaatgcaatctgctaagctcctgatcatctttatccagggtcattccccccaccaccctatgtcctgggtaattgtatcccattttacagacacaaaagctgagatcagagagtggagtggcccaaggtcatggggagagggagagatgaaacttgaatctcggccgggcgccgtggctcacacttgtaatcccagcactttgggaggctgaggcaggcggatcacgagttcaggagatcgagaccacggtgaaactctgtctttacaaaaaatccaaaaaaattaactgggcttggtggcgggtgcctgtagtcccagctactcgggaggctgaggcaggagaatggcgtgaacccagaaggcagagcttgcagtgagtcgagattgtgccactgcattccagcctgggcgacagagcgagactccatctcaaaaaacaaacaaacaaaaaaagaaacttgagtctcccaggatgcctggttgtcctgatatttcatcttctggaaacatcactgcctgaatctaggaggctcagcttttttttttttttttttttttttgacacagagtttcattcttgttgcccaggctggagtgcaatggtgcgatcttgactcactgcaacctccacttcccgggttcaatcgattctcctgccttagcctcccaagttcccaagtagctggaattataggcgcccaccaccacacctggctaattttgcatttttagtacaggcagggtttcaccatgttggccaggctggtcttgaactcctgacctcaggtgatccgcccaccacggcctcccaaagtgctgggattacaggtgtgaaccaccacacccatccagggggctcagctttgaatgaagccccctccatattaatgcagaaatgggacctaggaaccaggcagatgtgggttcaaatcccagccctgtctgacctgccgagtaaccttggatgaatgacttcccctctctggccttgggttctcttggcttgtaacgtgaggcctctgggggagatgtcagtggggccagctggtgactggcatatgctgaatgtcgatgcgtcttcctcctttcaggatgtcagcttgcactgctcagaatcaggagttacagaggaaagtcttgcatctcgagaagcaaaacctgtgagtctgggtccagctggggcagaggacaggggaagcagccccagagtccctttgcaggaagagcagagagcccatgtgatggcagaatgacatagggaataagagttttacctatgggccgcgtgcagtggctcacgcctgtaatctcagcactttgggaggccgaggcgggtggatcacctgaggtcaggagttcaaaaccagcctggccaacatggtgaaaccccgtctctactaaaaatacaaaaaaattagccaggcgtggtggcgggcacctgcagtcccagctactcgagaggctgaggcaggagaattgcttgaactcgggaggcggaggttgccgtgagccgagatcgcaccactgcactccagcctgggtgacagagcaaggctctgtctcaaaaataaataaataaggcctggtgtggtggctcacgcctgtaatcccagcactttgggaggctgaggtgggcggatcacaaggtcgggagatcaagaccatcctggctaacacggtgaaaccccgtctctactaaaaatacaaaaaaaattagctgggtgtggtggtgggcgcctgtagtcccagctactcgggaggctgaggcaggagaatggtgtgaacctgggaggcggagcttgcagtgagctgccatcccaccactcactccagcctgggcgatggagcaagactctgtctcaaaataaataaataaataaataaacaaataaataaataaataaaataaataataaagagccagaggcccttgaagaatggatggaatttggactttagcggggctgggggaccccggaaatggacgagaagcagaaccgaggccctttagggctcagcggaggcctgcctgtctctctaaggtccctcttggagcaactgaagaaactccaggccattgtggtgcagtccaccagcaagtcagcccagacaggcacctgtgtcgcagtgagtcctggtgcccccaggcaagccggggacctaggcttctgtagaggggcccatagggaggtgacaatgagtccaagctctccttgtgccccagctcaagtatgatccagtctggtctttggggcctcagtttccctgcctgtgggatggagatgcttgcaggggaggggagggagggggtgactctgccgctgtctccaccaggtcctgttgctgtcctttgccctcatcatcctcccctccatcagcccttttggccccaacaaaaccgagagccctggggactttgcgcctgtacgaggtaggggatccccacctttgaaacccttgtctggtctccccaagtccccgtcctgggcctctgggggagggggagaagacccctgtgcccttgttccctgaggctgggggccagggaagggagcataggaccccacctccaccttgtcccctgtgatgccccccttccccaatcagtgttctccagaactttgcacaacgatgctgcctcccgcgtggctgctgatgctgtgccaggctccgaggccccaggaccccgacccgaggctgacacaacccgagaagagtctccaggaagccccggggcagactggggcttccaggacaccgcgaacctgaccaattcgacggaggagctggacaacgccaccctggtcctgaggaatgcaacagaggggctgggccaggtcgccctgctggactgggtggcgcctgggccgagcactggctcaggacgtgcagggctggaggcggcgggagacgagctgtgagccccgccaggactatgctcccaggcccctctgcccaggggtgccttggggatgctgcactgggcagctacccacctggggatgggacgtgaggccaagaccccagcagagatgccagaatgggggaggcacagctcatagccacacacccagggcctgactgaggcccacgcaggaaccgacactcagacacaaggcaaagagggccacaggacccgggaaatacacacagagccaggagcagaagcaaagagcagacacacatacagcctgaaacagacctggacagacagacacagcctgaaacagacccggacagacagacacagcctgaaacagacccagacaaacagacagacagacacagcctgaaacagacccagacagacagacagacagcctgaaacagacccagacacagcctgaaacagatccggacagacagacagaaacagcctgaaacagacccagacagacagacagacacagcctgaaacagacccggacagacagacagacacagcctgaaacagacccggacagacagacagacacagcctgaaacagacccggacagacagacagacacagcctgaaacagacctagacagacagacacagattgaaacagacccagacaaacagacagacacagcctgaaacagacccagacacagcctgaaacagacccggacagacagacagacacagcctgaaacagacccagacagacagacagacacagcctgaaacagacccagacagacagaccgacgcagcctgaaagagacccagacagagagacaggcagacacagcctaaaacagacctggacagacaggcagacgtagtctgaaacagacctgaacagacagacagacgcacacacacaacagatgcgcagcaactccccgcccagggacccctcccggcctccctcgcacactgggaggaggaagccgccgagactgcagggagcctggccccggagccccgggtgcgccctggtctttggagcagccacggcccacaatcaccccccttttctaagactgcctgatccgaaataaagtattttgacagaaccttgttttggtgtggaggcggagtctggggctcctcgactccccagaaggaggggctgggccagcctgggatgggtgagtgaggtgtgggctccacacccccgccagatgcccgcgctggagcagcggagggagaggcgccgggcacgacttcagcaccttggagagcggcggcgggcggagtgcggggaggcaggcgtggcgcttccaaggtgtcccctccggagttgcggggaaggcagctgccttcccggggatctgggcggcccaccctgctcattttgcgggcgaggacaccgaggcgtcggaagtggagggactgcctaaggtcacagctggggagagtggaacccggctgctcctgcgctcgtctgtggggtcgcccccactgcgggctgtgcgcgcctgcccgggcgccatcgcaaaatcgcgcccaaagcacaggtggggactcatagcctgggggtaaatgttaaacaacaacaaaaagcatgtgcataagtgtataactacaaactgagtgctcagaaaatgccagctgccttattggcttcatcatcagaaaactggcctgatccctccagaggcggggtggggggagaggtgagcccttgttcctcggcccccaggcttgaggggcagggattgcaacggagcccaagcagctggtccagggaggaggggaccacgaactcctgacccaggggggcgaggacctgccacaaatagggaatttaaacactcactgggcacagtggctcacgcccgttaagtccagcactttgggaggccaaggtggcctgactgcttgagcccaggagtttgagaccagcctgagtcacatagtgagacccccatctctacaaaaaatgcaaacaattagctgggtgtggtggcacacacctataatcccagctactctggaggctgaggcaggagaattgcttgaacctaggaggcagaggctgcagtgagctgagatcacgccactgcattccagccttggtgacagagtgagactctggctcaataaaataaagtaaacacactgagatgcaagaaagaaattgtttttattgcattgaggacttttccagaagcctggtggacccacgtctccctccagccccaaaggcagtgcaagcctctactgatcccccacttcaaggtgggtctcccctcctgcagggcccatggaggaggggtagggtgggctgtagggggcccagaagggaggccctggggacagagggagttcactcctgtttaagctggagaccagggagggcccagcctcacctctggacaacacagcaagtcagaggctggggtgtggcaggggctcacctgtcacctctggggtgtggcttcttcccggaaccgcaccagaggcccctggagcccagggagggaccacggagggcaggtgtaacccctggcctggagcacagctctcagagccctgaggctcccggggacagaaacaagtaacaaagtgagaccacgagagaaaaagaatccacagtttctacaaaaagccccaccctccccaagcaccctggtcagctggggaccgccttggccttcacccttttggggggtctgtggggggcagggctggtgggccgctcccgtttggggctggcgggctctgagccgttgtgctgggcgcagggctcctgcttggggccggcggggatagagccgttgatccgggtgggagattcctccttgggctccagcttgggggtgggcgggcggggcaggggtggcagcgccctctccagcacacgggggccgtcccaggcggggatctccagccccaggtgcttcatgagccgggtcatgacctcgtcaacgtagccatggatgcggaggtcagcatggcggtcctgccgaggggcgggacgggtcaggcgtgggggacagagggtgcatggtggccctgggcaggggtaggctcagacacctacgtgcttggtgggctgcaggttgacgatgaccaggcggcctccccggcgcttggtagccagcggcaggttcccgctgggccggatctgcagcgatgtacccagcgtgatggacaggtcggcgttcctggggccggggagcgtgggctgagcctgatgccctgctcctgccaacatcccgagccagccctgggggccggttcacacctaggccatctgtgctcaccggggcggtcaaggccagccccactcccgagtcagcctttgggatcccgccctgccctcctctgcggtccgttggcggggtcattgatctgggcgggcccttagacacttccggggagtatcacagtgtggtaagagcttggacacctagggtgggaccctggctcggtcacctcccggctgggcagcactggatagaggagacacctggcggaagccttggtttccttgtgtagcacccacccagagccatgaggtgacgagtgtgtgtgagtgcgtgtgtgcagcccctggcctggcccacctgctccaggaagcctcccctcactgcctgtgagcctcagccactgtcccatgctggagctggctgtgtttctgctgtcgtcccgccccgccccaccatgggctccctgggggtggggggtcagacctgctggcctcatcggcgagtgccaggtcccggtcgggcagggagtcctcccagtctaggatggtgtccctcagctctcccctgcaatgaggaagctgaggagagtcctcaggggcctcgcagcctcccctggagcccagggcatgggtgggggtggctcacctgcaggctcgcagcccccttgccttagccacggtgcagagccggcccgtggccttcaggcccatggtgcccacgactgtgtctcggacgtactgcctgtgtcagggaggaagggggaggatgggaccaggtgagctcccatgggtgactctcgcactgtttctagggtgacgttctcccagggaggtggggggtggacaggtgaccagaactagcacccagcgacacggaacgagtagccttccatgaataacgggctgggatgctgctcggtgcccggagcacagaaaacaaagcaggaaactgtcccagacagacgaaggggctcgagagacaagacccagcatgggatcccggaccaggagaaacaggaacaattggagcatgggggcgacaggccgagtctggattcgggattagagaaggcgatgtccactttacttttcctgactttaatcgttatactgggccgggcgtggtggctcacgcctgtcatcccagcactttgggaggctgaggcgggcagatcacaaggtcaggagttcgacaccagcctggccaatatggtgaaaccccgtctctactaaaaatacaaatattagccaggtgtggtggcgggcgcctgcagttgcagctacttggatggctgaggcagaataattgcctgaacccgggaggcggaggttgcagtgagccgagattgccccactgtactccagcctggatgacagagcgggactgtctcaaaaaaaaggagaaacacagagataagaaggcccctgtggctgtaggtccaggaccaccaagggtggctggctgccaccagcagccaggaaaaggcaggaaaaatcctcccctacaggttgcagaggggcatggccctgcagacacctggattttggacttctggtccccagaactgtgagatcacaaatttctattgttctacgctgctcatctgtggcaggttgctacagcagtgccaggacacggatgtaccccccacaggagggaggcacggcccccccaaatccctccaggaggaagacatgccccccaaatccctccaggagggagacatactccttatatccccccaagagggagacacgcccccagatccccccaggagggccacaccccagtccccccataccctctgggtctctgggacatcggattcgacccccaaccccctctggcagagcccccacccctgcacccaggtggcactcacgtcttacacttggcacattcttccacaaacatgttcccgtggagctctgccagtttgtccctgtgggaagagcaggaagaggcttgatggtgggaaaggatccctggatgcccaggctttggagctggtgctaagcccctctcctccaggaaggcttcccggactcctctcccacaacattgatcaactccttctttctggctcttctagctcctggctccaccattcatctgctgtgcatctctgggcaagtggaccaacctctctgagcccaaggaatcattaacccccaaggctgaacccaccttagataacgggaagccctttccactcacaaaatgcccgtccccctccgagagcatatgggaacctcttgatgtcaccaggtcagaagcacaggaattcaaattcccagtttataatggaagaaaccgagacattgaatggccctgaagcatgagatccaatcccagctttattttatttatttatttattttgagacagagttttgctcttgttgcccaggttggagtgcaatggtgcaatctcagctcaccacaacctcaatggcacaatctcagctcaccacaacctctgcctccggggttcaagtgattctcctgcctcagcctcctgagtagctgggactacaggcgcccgccaccacgccgggctaattttttgtatttttagtagagacagggtttcaccgtgttagccaggatggtctcgatctcctgagcttgtgatccacccgcctcggcctcccaaagtgccgggattacaggcgtgagccactgtacccagcctaatttttctgtttttagtagagacggggttttaccatgtggccgggatggtctcgatctcctgacctcatgatccgcccgccttggcctcccaaagtgctgagattccaggcataagtcaccacacctgaccctcctttgcttttttttttttcaagacagagtcttgctctgtcacccaagctggagtgcagtggcgccatctcggctcactgcaacctctgcctcccgggttcaagcgattctcctgactcagcctcccgagtagctgggattacaggcatgcgccaccacgcccagctaatttttgtactcttagtagagatggggtttcaacatgttggccaggctggtctcgaactcttgacctcgtgatccgcctgcctcggcctcccaaagtgctgggattacagatgtgagccaccatgcccggcccctcgtttgcttttataagcagagaaaaatctcttcctcacccctcacccctggctgccgagctcctcgtctcaacaactgacctggctgtcattggttgccccaggggtgagacctggcaaagaggggcaggggagggccacacttttattgggaaatcagcctgccccagagcacaggttcacttcagtgtcagacacgtttagtgtcagattaataaagatggatattaaaaacacaacaggccaagcgtggtggctcacacctgtaaccccagcactttgggaggctgaggcgggcagatcacctgaggtcaggagttcaagaccagcctggccaacatggagaaaccccgtctctactaaaaatacaaaattagctgggtgtgatggcgcatgcctgtaatcccagttactagggaggctgaggcaggagaatcgcttgaacctgggaggctgagcggagatcacgccattgcactccagcctgggcaacaagaacgaaactcggtctcaaaaacaacaacaacaacaaaaaacaaactgcaacttctagaccctgacagctctcctccccttagccccatctcgagggaaattctgcctctggcctcagccgggacagctctgagccatgggactcagagatctccacacactgggccaagaactcagggctagaatcttatagaaccaggaaaaggggactctccccctaaaaatgcaaacacggtttgtggggccccaagctcttttgtgggggcggggccagggtgttacctggggaagcctgagcgcacatggagcccgtccacgttctggctgaccaggaagcggaggaggcccacgcgctccagctgcaccagcgccatgtgggtctgcgtgggccgcgcgctctcaaaggtggtgtcgaacttgggggccagacctcgctcctccatggtccagactccgtggggacccctgaaggtggcaggccgggagagatggacggggagaggggaacagaaaaagagacagagggagaatcagagaggtatagagagaaagttggagagagagaaaatcaggagacagagagagacagggagacagagagagggaatcagaaacagaaatagagggtgagttgcaagaacagggagagggggatagaacaagacacagacagagagataaagagttaaagacaaagcaagtcagagacagaattggagagagacagagagagggagaggcagagagagagagatgaattcacacgaaggcaaaaatgacttattctattcaaccaacactgctgctgcaatgagcccgacgatgctcacatgggcccaagccctgccctccagaagcccttgatcttgggggagacaggtggacacagatcctctggccccaagagtcaagcctggatcagaggaggtacctgggcctggggaagccccgtggaggtgggggccctggggcacgtggaagggcttcctggaggaggctaagcagtttcttgaagggtgagagggaagatcagacagaaggggtaaacaaaggcctgggtgctgggaagagcccatgagtttaggagaaaatgcaagtgttttgggggctgcagcaggagcaggaggggctgaagttggagaggtgattcagggctggggcaggaagggcttcagcttccagcacaaggtattcagaactctacactgcctggcaatggggagccacagcaggttatggaagaggagaaggaggagaaattcacgccttggctttttttttttttttttttttttttttttgagatggagtctggctctgttgcccaggctggagtacaatggcatgatcctggctgactgcaacctctgcctcccgggttcaagcgattctcccacctcggccttccaagtagctgcgattacaggtgcctgccaccacacctggctacgcttgcaaatatgaaagactacatttcccagcaacccttgcagccaggtgtgatcaggtgaccgtgttctggccaatgaggtgagtggaatgctggttgtgacaagggacacatctttttgttttgtttttagacggagcctcactctgtcgcccaggctggagtgcagtggtgcaatctcggctcactgcctccacctcccaggttcaagcaattctcctgcctcagcctcccgagtagctgggactacagatgtgtgccaccacaactggctaatttttgtatttttagtagagacagggattcaccatattggccaggctggtctggaattcttgaccttgtgatccaccatgcccagccaagggacacatcttaaagggagtacccaggacacatccaggaggaaagcagatggatgtgttctcattcccagatgtgtgtggctcgcagggaagcctctggcagcctggtaggccttgcctcgacttcccctgcacaatcacagacctgaagtcggggatgccagaggcagtgctgatgccggcacccgtgtggaacaccacactggaagactgccagaccagcctcgccagttcccacaccttccgctccagctcctccggggggtcgaagatctgtggggggagagagcagacggaggggtcaaaacagttcccccaagtggcaaggccacgcacgagccacagactgagctgtccctgtcttgcctgagggaggaaaatggattggaaaaggcagcttgtcctcatgcccctcctcttcctacaaccttccatgcctcccacctgccttgtcaaagccctagcccttcccacggcccaccaggccctgcactacctcccttgccccctccctgccctcttctcctccctctccctgcctcactctgctccagccacacaggtctcctccttgttcctctatcacaccaggcacagtcccgcctcagggccacaccctttaatgctcttcccccagatacccacatggctccctccctcacctcctgtaacttgtggcttagatgtcacttcagtgacagtgatgcctcccttggccaactggtttccatgcaacccctagtcagtctcccttactagaaggaggggtttttaatctgtgttgctcctggctgtggccttagtacctagaaagtgcctgagctacagtaagtgctctataaatgttggtggaataaagtgactaacaggccgggtatggtggctcacgcctataatcccagcactttgggaagccaaggtgggtggatcacttgagatcaagagttcaagagcagactggccaacatggtgaaaccccgcctctactaaaaatacaaaaattagccaggcgtggtggcaggtgcctgtagtctcatctactctactcaggaggctgaggcaggagaatcgcttgaacctaggaggcggaggttgcagtgagccgagatcgcgccactgcactccagcctgggcgacagagaaactccatctcaaaaatataataataataataataaagtgactaacagcagcagtgaagagtggggcttctggacgggcgcacaccatcagcgctcattaaatgcatgagtcagaatgcatgggccagccttatggaatggggccatcttcacctcgtttgcagaaagtttggagatggagacccaaaagggaagtgacttccccaaagtcccacagtgcgtggagggggcagccgatccctccacttcccctctgagtggctggagggatctttctggcacattctgtccagtcccctcgccagggcaaaacccttccccatcaccctcaggataaagtgccaactccccagcctggcatttgagccccgtcctggcccggctctggaaacctcccaggcctaatcgttctccaggtgtgtttattcccacctccctttgcgcctgtcgtcccctcttcctggaactacatcccctctctccccgatcagccccgacagggtgaccacagagttgggcgtgttggcgtcccccggcgcgcaggggcgtcacttcccgccccttcctcactgggaagtccctcccattgtctagcctcagtgccccctgatattcccacaatgcccccctgccatccggccgctcccagcccgcggccctggggcgcgatgctcgggaccctcagacgcgctcacctccgggaggccgcacttgcccttgtccgcgtacggcgacagccccgccgcgtaattcaccgacatcctcgactgccccacgggaacaataaagtttcccttgttgaggccgcttccgccggaagcggggcggggcggggaagaaggaggaaccgcgttccagtcctgcgcacccggcctcccacggcaaggcgcatgcgcctcttgctgacgccgcaggcgacatgttatctgctgtcagaaggaagcctgcctctttgcatgcaggtgtttgcggggcttgggaaggggctccccgatgacccgggcgggaaattggggcggccgcctacgtgagagttctccagtcacctctaaaatgcgggacacaggctatccatgtccccacaaccccttttacggattagtaaattccgtaaggacagagccggacagcagggaccccagcctaagggttttgaatgccacgcagagttacctgaatatctcatttgtgtgtgtgtgtgtgtgtgtgtgtgtgtgtgtgacggagcctcgctctgttgcccaggctggagtgcagtggcgcaatctcggttcactgcaacctccgcctcttgggttcaagcgattctcctgcctcagcctccctagtagctgggattacaggcgcccgccaccacacccagcaaatttttgtattttttagtagagacggggtttctccatgttggtcaggctggtcccgaactcctgacctcaggtgatctgaccgcctcggcctcccaaagtgctgggattacaggcgtgagccactgcgtccggccaagttatctgagtatcatccaactggaggttctgcattctgcaggacaggtcctgctcaaggtcaatggggctggtggcctggaggactcatttaagaatcatgtgttgagtacctactttgtactgggcacactggagagcaaaggtggtaccatctatgccctggtggctgcgggtggacacaaacatgtgaccaggtaatggtgacatggtgtggttggggtgcaatgggtgatgcagagggcacagggcagtgagggggctcacaggaggcacctgacccaggctgggggcatccgggagggcttcctggaggaggggatgttgcagcaaagatctaaaaagtgagtgagccgggcgcagtggctcacacctgtaatcccagcactttgggaggccaaggcaggtggatcacctgagattgggagttcgagaccaccctgaccaacatggagaaaccccgtctctactaaaaatacaaaattagctgggtgtggtggcctgtaatcgcagctgctcgggaggctgaggcaggagaattgcttgaacccaggaggcggagattgcggtgagccggagatcgcgccattgcactccagcctgggcaacaagcatgaaactccgtctcaaaaataaataaataaataaataaagagtgcatgagtcaggtagagccggttggggtgacatgaagtacagaaagaatgttcctggtggggggaacagcaagtgcaaaggctgagaaagaggaagagcatggctccttccagaaactgaaatcagtccagtgatgatagggaagatcgtgggtgtcttcccgccagagccagttggccaacaggcagtccgctgccagcctgtctcctccctcggctcatccccggccccctggggcggccgcctgctcagagccgatcaggtgtcagagtggagcggctggagctgctcgtggcccagctgggagtgggtaaccggagccggcagtgggcactgtggccgggagctcggggcactggagctgcaggaggtaggggaggaaggaggtgggagaggcccaggacggaggatccccttatggccccaggcccctgagcccttgtatgtgggagaaagaagccgtgctgagtcctagccaggctgcggagctacccaggtaccctgacacacacatgcactcgttcacccacgcacttcccacttgccggcctgtgccctgcctagcttcctccaaggcaggtgctcaacatcccacccggccatcaggcccttcttatttaccatcacctcttccagcaagcagcttcctaaatttagcaggcgtttctccctcccccaagcccacggattgtcttctcccaagcagcctgtgaactcctctgttgggtgtcttattaccccctgctttgggtgtgattgaatcctccagtcagaggtagaagaaaaaagggtaggtagtgagtgaatgggcaccggtggaggggtagatgaatggatgggtgggtggatggatggggggcgaataggtggattggtggtttggtagatgggtgaatgggtagatgtatggatggatgggtggatggatgaatgggtgggtgattgggcaaatggatggagggatggataagtggatggatggatggatggaaggatccatggatggactggtgggtgggtggatggatgcactggtgggtgggtgggtggatggatggattggtggttgggtgggtggatggagggatggataagtggatggatgagtggatgggtgggtgggtggatgggtggatgggtgtgtgattgggtgggcagatgggtggatggatggatgcttgggcagatggatggatgggtggttgggtggatggatgaagggatggataagtggatggatgggtggatgagtggatggatgaatggtgggagttggtaggtgtttgggtgggtggatggatgtgtgggtgaaatctgattaaagggtgatgaagaaccatgagaacatgaattgggtgggtgggtttgtgggtggtggccagtgggtggttatacagtgcttaggtgggaggatggatgtccaggtgagtgcataggtggtaaatgcgtggaagggtggcttggagaattcacgagtagataggtggacaggtagaggccatgccaacccctactccttggtaagaggcaaatacagattctccatcacagaaatccctttcacacatagggcctcacagtcacacccctcaaaaaacacaccccctcaagataggcctgcctgacctccgtgcctgcccatgcggaacgtagaacaggcccaggtggacagaagtgcacgtgtgcacacgccccacactcaacgtcacacacatgcatgcagccattgccccagacctccacccactatgggtgaattgctgtcacatggaggttccctctgactatgtagcaaacatgcctctgtgctgagagccgtcagccctggcttcagtccccagggagcccctgactgttgaaaaggacagaatcagcccagacccttccagcccatggagccaggggtgaggcagaggcagagacccagccagggtaggcgggaacccaatttggggagttagatctctgcttgggaacaagaggcaaagctgataagagcaagggattttggaactgggctttgaaggatgagtaggagttcagagaagaaaaaagaaaccattctaggcagaaataactgcacaggtaaaagttaggagaccagaaaaggcttgatctgtttggaccgcaggaaataccagtgagatgcatttatgaagcccctcatgtttggccaggctctgtgtagggaccatgctgaaaactgaccatgagttggtcaagaaaggatcatttctgtcactgtatagatgagggaagtaaaacagagagggcaagtaaactgccaaaggacacacagcaggtaggagatagagcaggtctgtgtcttgctctaggggccaggactggtcaggaaggaggaagcggtccttttgaggagggcgaggcaacggaccctgccgcccaccaggactggtgtccctcaccttacccccacccttgccctcctcaggtggcctgtggagaggagaaacacagggcaccaactatgaagactctcagggcgcgatttaagaagacagaggtgagtgtgaggccctagatgcccgatacacccctgcaacttcagccttctgtctcctggggcttggctgaagatccaccctttcattccagtacccacctcttctcctttcctctctgctgccccctagcgtcatgacctccccactgctccccgtacaagctttccagcccaggcctttacccaggccctagtccgctctccatggaattccttctcgccgcattgccaccaatcagaccctcctaattcctcacaatttggccccagtaccacctccccgtccaatctccgctctccccggccacagtaaccccttgcttttccaaggacccactttcccgaggatcctgatcttttgctttggtgtgtgtgtactcagcacatatttatatagcaggcgctgttccaggcacaggggaatcagccagggaatagggcaggcaaaaatccttgccctcgtggagccgaccgctgagtacgggagatgaacacgaaacaagataaataagtgacaatgtgtattttgtgtcgcaaagacagacaaagcaggaaaagggaattgaagcattcagggcaggggaggtggctgcagttttaaagagggtggccagggaaggcttcccagaggaggtggtattaaagcaaagattagaaagggaaggggagggctgggcgtggtggctcacacctgtaatcccagcattttgggaggccaaggcaggcagatcacgtgaggtcaggagttcaagacgagcctggccaacatggtgaaacgttgtctctactaaaaatacaaaaattagctgggcacggtggcgggcacctgtaatcccagctacttgggaggctgaggcaggagaattgcttgaacctgggaggtggaggttgcagtgagctgagattgtgccattgcactgcagcctgggcaacagagtgagactccatctcaaaaaagaaaaaaaaaagaaaaagggaaggggagtgggggagagagtttgcaggaattgcattccaagtggctggaacagccagtgcaaaggccctgaggtagatccagctgtcttctcttgcatccgtgtctttggctatgaactcctagaaagacatgcttcttcctccattgtccccattcttctcagccccctcaagtccctgtggcggccaattcagggcacagatggggaggatgaaagggagggctcacctccagggacaggcaatcagccttcctgagcacctctttgtgcctggcctgggtgggcaagcttgacttggagcctttagttttcgtatcatgggatacaacatccccatctggtgtggcctggagaaatcagggagtctgcctggaggaggtggcaccggagcagagcctggaagaatagggaggatttagagaagtgaaggcaggcacgtgaggagcggggcacggacctgtgtgggtaaagattcggaggctggaccaggtctgcttgatgcacaggcataacaggcagattctcttggcaggagcagagagtgcgagtgagtgggagctcaggatctttgaaagccatttttgaaaagccaaaaagagaggcctgtggaacaagcctggatttcattttttattttattttattttatttttgagatggagtttccctcttgtcgcccaggctggagtgccgtggcttgatctcggctcactgcaacctccacctcccgggttcaagtaattttcttgcctcagcctcccgagtagctgggattacaggcacgcaccaccatgcccagctaattttgtatttttagtagaggcaggacttcaccatgttggccaggccggtcttgaactcctgacctcaggtcatccacccgccttggcctcccaaaatgctgggattacaggcatgagccaccacgcttggtccatttttttttttttttttttttttgagacagagtctctttctgtcacccaggctggagtgcagtggtgctatctcaaccgactacagcctccaactcctgggctcaaacgatcctcctgcctcagcctcccaaagtgcagagactataggcgtgcaccaccacactgggctaatttttattttttgtacagatggggtgtagctgtgttgcccaggctggtcttaaactcctggcctcaagcgatcctcctaactcccacccagagtgatgggattacaggcgtgagccactgcgcccagccaagcctgggatagaatcaggtggctctgagttcaaatccttcctctgtccctggtgtcctgggtgactctggggatgtcatgccccctctgtggcttccttcagttgtttgggctcatttgatttgatttgatttcatttatttttgagacagagtctcactctgttgctgaggctggaatgcagtggcacgatctctgctcactgcaacctctgcctcctgagttcaagcaattctcctgcctcagccttccaaatagctgggactacaggcgcctgccactatggctggctaaatattttgtatttttagtagagacagggtttcactatgttggtcaggctggtctcgagcttccgacctcaggtgatttgcccgcctcagcctcccaaagtgctggaattacaggcgtgagccactgcactccgcccattttattttgtttttaaactatttattaattatcatgtacccattcatttcattattcatttttattttatttaaaacattttaatttaatatcattggattcactttattttttttaatttttctttcttcttttttttttttttttttttttgaaggagtctcactctgttgctcaggctggagtgcagtgttgtgatcttggctcactgcaagctccacttcctggattcaagctattcttttcttatgccgcagcctcccaagtaggtgggactacaggcacgcactaccacgcccagcaattttttttgtatttttagtagagatgggtttcaccatgttggccaggctggtctcaaactcctgacttcaagtgatccacccaccttggccttccaaagggttgccattataggcatgagccaccatgcccggccctaagtttttttttttaagagatggggtctcactatgttgtccaggctggtctcaaactcctgggctcaagagatcctcccgcttcagccaagtagctgggactacagatgtgcagtactgtgcccggcttatttattttcatttttgttgatttttgagcactataaaaaatataagatgtgctttgcaggtgtcagctcatttaatcctcaccaccgtgttatgaggcaggagcttttattatcttcattttatagatgagggagggaagcccagagaggttaagacacctgctcaaggtcacacagctaggaagtgagacacaagccttcccccagggctgcgttactatgaacatgattggcctggaggtgggaggggagtgcattgattgaaaagagaatgggtggagacagacagcgggagagaaagaggtgaaaaacggtccattaactgcctacaaaatgtggcattgggtgagcttcattcactgtggagtgatcctaaaatttttcttcccacgtggactcaattcctcgatgatagttgacccttgaacaattacagcccaccctcctgcacagtcaaaaatccatgtataggctgggcgtggtggctcacatctgtaatcccagcactttggaaggccgaggtgggtgggtcacgaggtcaggagatcgaggccatcctcattaacacggtgaaaccccgtctctactaaaaatacaaaaaatcagccgggcgtggtggcgggcgcctgtagtcccagctactcgggaggctgaggcatgaacctgggaggtggagcttgcagtgagccgagatggagccattgcactccagcctgggcaacagagcgagactccgtctcgaaaaaaaaaaaaaaatctggctcggcatggtggctcacgtctgtaatcccagcactttgagaggcagaggcgggcagatcacctgaggtcaggagttcgagaccagcctggccaacatggtgaaaccccctctctactaaaaatgcaaaaattagccaggcagccgggcatggtggtgggcacctgtaatcccagctactcaggaggctgaggaaggaaaatctcttgaacccaggaggcagaagttgcagtgagccgagatcacgccattgcacgattgcccagcctgggtgacagagcgagactccgtctcaaaaaacgaacaaaaaaatccatgtgtaagtggacctgggcattcaaacccatatttttcaggggtcaactcctgaatgctttttttccccaagcattcctcagaagtagtagccactggtaaaccaagccatatgattgcttaatttccaaagcatagttatatttaatatttaagtaaatctttcaagaagtgtgggtggctaaaaaagagatacctcattcgggatgtgggtgtgttttgatatgtttgcaatgggaggggtcgggacaaagtcaaaattggatggggacaggataggtgttaaaacctcagacgggtgtgagggcctctgagagtgtctggagctggaggggcctgaggttagcccatagcctgggctggaactgttgcagcagatgggaggcctggctgttgctgggaagctgcagggcctccatcctcccctcccagagcaccttgccatccatccctccacctgcccttctccagtttcgcagcaggcagccggagtcaagttcagcttttgttcagcagccccgagggaagaaagcaaacacccatgactgcaggggccaggcccccccctcctgtcactgggaccttgtgttccgtgtcttctagccactgctacccctctcctcctctccttagggcactctccggcctttcctggtccctaacaccggctttttcttatttatgtatttacttttattttattttctttcttttatttttatttatttatttatttatttttgggacagagtctcgctgtgttgccaggctggagtgcaatggcatgatctcggctcactgcaagctccgcctcccgggttcaagagattatcctctctcagcctcccgtgtagctgggattacaggtgcacgccaccacacctggctaatttttgtgtttttagtagagacggggtttcatcatgttggccaggttggtctcgaactcctgacctcagatgatccgcctgcctcagcctcccaaagtgctgggattacagacgtgaaccaccgtccccagcctatttatttatttattttgagacagagtcttgctctgttgcccaggctggagtgcagtggtgtgatcttggctcactgcaacctccgcctcccgggttcaagggattctcctgcctcagcctcccgagtagctgagattacaggtgcctatcaccacgtctagctaattttttttttttggtatttttaatagagatgggttttgccatgttggccaggctggtctcaaactactgacctccaatgagccatccgcctcagcctcccaaagtgctgggattacaggcgagagccactgtgcccaaccaacaccgtttctttctttggggtcccaacagttggcattgcttactctgatcccccttgggctgtccgtgggcctcagtgtttccatccataaaatgggagttacctggagctgttcacttggggcttcactgacctcctgcctttactttaggtttcaggaaaatctcccaagtgggaagattggggtttctagagagtcacagactccatacatcaatgcttcctggaaagtcctctttctctttctgtcttttttctttttatatttttattttttacttaagtatgcattttttttttttcagaggtgaggtcttaccacgttgcccaggctggtcttgaactcctggcctcaagcgatcctcccgccttagcctcccaaagtgctgggattacaggcgtgagccaccgcgcccggccaggcctcgtattttcatttttcaccgagccctgcaaaacctatagctggtcctgcatggaatacagcagtgactaagatagacaaaaatcactgcccctgaggaggtgacattctaagggagagatcaagaggaaacaagctgggcgcagtggctcacgcctgtaatcccagcactttaggagatcaagatgggaggatcacttaagcccaggagtttgagaccagcctgggcaacatagcaagaccccatctcttcaaaaaaaattcaaaaattagttgggtatggtggtgtgtgcctgtggtctccagttactcaggaggctgagatgggaggaccacttgagcccaggaggtcgaggctacagtgaatgatgattgtaccactgcactccagcctgggtgacagagcaagaccctgtcccaaaataaataaataaataaaaataaaaaatgagagtaaacagaatatttttaaaaaggtatgtagtatcttaggtggtgataagaggcctggcgcagtgactcacgcctgtaatcccagcactttgggaggccgaggtgagtggatcacttgaagtcaggaattcgagaccagcctggccaacacagcaaaaccccgtatctactaaaaaatacaaaaattagccaggcgtggtggtgggcacctgtaatcccagctactcaggagtctgaggcaggagaatcgcttgaatccgggaggcaggggttgcagtgagccgagatccctccactgcactccagtctgggcaatagagcgactccatcaaaaaaaaaaaaaaaaaagacaacaatgaaggaaaaatatagctaaagaaagggctgtcagagaagggctcttggaagaggcatctccaagagtggacagcagtaaagaaagcagccatgtgcacggtggggcaggtgctccaggcagaaggagctgcactggccaaggcttggaggtgggacccagctgtttgaaggacaagaaggaggctactatggcagcatggattacaccgagggaaatgtaaatggagatgatggcaggcgcggtggctcatgcctgtaatcccagcactttgggaggctgaggcgagcagatcacctgagatcaggagttcaagaccagcctgtcaacatggtgataccccgtctctactaaaaatacaaaaattagccaggcatggtggcgggtgcgtgtaatcccagatactcgggagactgaggcatgagaatcacttgaagccgggaggtggagtttgcagtgagcagagatcatgccactgtactccagcctgggcgacagagcgagactccgtcgggagggagggaggaaggaaggaaggaaggaaggaaggaaggaaggaaggaaggaaggaaaaactccatgaggtcaggggtcaggcactggcagagtggggctgctcagagaagggttagcaaattttttcttaaaaggccagaggattaatatttttggtttgtggtgcagaccagcctcagctctgccattgcagcctgagaatagcctttgactgtctacacttttttcttcatatcctgcatgtggcatccaacgatctacaaatgaatgggcagggcttggccccgaaaaaactttatttatggacactgaaatgtgaattgttttgttttgttttgttccgagatggagtctggctctgtcacccaggctggagtgctctcaggttactgcaacctcagcctcccactttcaagcgattctcctgcctcagactcccgagcagctgggattacaggcgtgcaccaccgtgcccagctaatttttgtattgttagtagagacggggtttcaccatgttggccaggctggtcttgaactcctgacttcaggcgatcagcccaccttggcctcccaaagtgctgagattgtaggcgtgaaccaccgcacctagccagaaatgtgaatttcatatcatttttcacgtgtcaggaaggatgattcttattttgcttttctctcccccctccaacgactcacacgtgtaaataccattctctacggaaacaggcagtgggcaggatctgggctgctgtgagcagt

SEQ ID NO: 83 - DNA, 29823 bp, Mus musculus
ggcaggaatgtggaaagtggccaggcccgctcttgctctgcctgaagcagcccttagcaaccccagtcctcagtcacctgtcccagatccactgtccctagtgtgcaggactgctggtgttcgtgtcactgccactgagcagggacagatcctggataggggccatgacagaactctgtacatagaggtctgtctcttcctgtaggtcaggggacagtgagtggtgcatagcactggggacgttcacggattccggattcctacctgggatgaggcctctccggagtcctcctctagagaggctggggagagaggggaaacagtcgggcacacagttcccagttctcagcacacagttctcagttctcagaaaggtcactggccaacccaaggtattccacaggctctcaaagcttccaaagcattagtgcttcttttgttcatactgtgagtctcgctctgtacctcaggctaaccacaaactcagatctaactgctctggtctcctagtcaggcaccacaaagtccagcctctgaataagggacagtaaggtagagagacctatgggtagagtcctgggtggggagaacctttaatctctcagagactcagggcactggagctccaggttggagtgggtgggtggggtgccacctcttaggaaaggcagagtctctatactaaggatgacccagaaaatcacagtggatcctcagaccactgaggcttcttgaaactgccctgagttaagaagcatgaaaatgttcatgacagcagactggagtacctcgaaactatcagtaacatataaggagatggccagaaactgcctaggagagcaagggtagggcttgcataccactgggaggtgaagagcgccgtgcagactcgtgtagaagctgcaagatgagtttgtctccagtcagggctccgtagtgagtggcatcctggcccagtgcatcagtgatgctcaactgggctccaccctgcaggagtacttcaacagtctcagggctgcccccctcacatgccagcatcaaggctgtcctgtgggataaaggagctgctgaggggacagaggcttgtccccaacaccatacaactgtctttgtacccaggccaggaagagaagggaggaagaggtgactaggtcaccagcttaaagaggtcaagatatttgccccaaatcatgcagcatatgatggaaaggtctagaggggaagtgctcacctgccttgcaggtcctggtcatttgtggcagccccctgctgtaggaggaggcggcacagatctgtgtgacacatctgagccgctatgatgaggggtgtggcacccgactggtagagaggatgaaatggcatgagtctcacccgtgctttgcagatgatgcctggggtgttgcccatggtgagcatctatcataaggataacactgtacctcccacccaatgagaccccagcagctcacccggtcccgggggttcatgtgtgccttaaaggaacagagcagctttgagcaggacagacaaccaccagccgctgggacagacaagaaaaaagaagagtaggtgggagagacagctgcctgccaagaacactataattttattgctgagacagtgtcttagtctgtaacctaggctggcctagaactcactatacattatagcagttaacatttgtcatcccagcagctggaaggcccaggatggaagatggctgcaagttaggggccagcctgggctacagattgagaccatacctcaactaaaacctcagagctggaatgatggctcaacagagcactggctactcccacagaggactcagtttcaattcccaacacccacatggcagctcatgtatgtaaaagttccagggatctgacacccctttttggcctctgatggtaccaggcacttatatggaacacagccatgcatgcaaccaaaccacactcatacacatttttaaaatattttttcacaaaaatgtaaaatcaaataaaaacaacttattaaaaaatgggtctcaaagatggctcagttggtaaaagtgcttgctgccaagtgacctgagttcaacatccaggagccagccggtggagagacaaacaactcctaaaagtcaccttctgactgtcacacaagcaccatgacaaggatgtccctaacctcacaataaatgaataaatgcaacttaattgttaagatatcccctattggcatcgacaccacctggtggtgccactctgactggggaattagtggctaattaccttacccctaaagtaaattcaagtgtgccgtccctggggacaggtggctctaacctggaccctgtgctcactggctccagtaagtccttaattgctctgaggatggagtctgggtttgaggggtgtgctggaggacctatctgcaatcaaggcacccaggagaccctggagggaattagggttctaggcaccccactttgtacacccagggactaggctttggggtccaaggaatagggttcccccactagtacatgtgcctaacttctttgtgcaatgggcaaaagggcctggttctgttggggactgcattcaggtcaaaagaagcaaagcagatagggacagtggcccacatctgtcacccaaaaacccagaggcggaggcagtagaaccctgacttcaaggttaagcctaggctacagagagagactctatgtcaacatactgagagggctaggaagtctgaggacctgcgccttattcccaaaactcacataagtcaggtatgggagtgcatgtctgtgaccccagcaccaggaaggcagaggcagggggatccaaggttcactggtcagccaacctagctttaatcgtgaagaccagtttcagagagagaccctgtctcagagggtgtggagggtacctgatgatgacaccttaagattgtctttgacttccacaggccacacgcagggacacatgaacacagattctttaaaaactaagggcgtggtcagggtagagtccctgttagaatcccagtgaggggctggggggcgtggtctgaggggctgggggcgtggtcagggaggagccccacctagagttccctagtgagggctgtggatgtagctcgttggtagagggccttccttgaattcgggagaatctagctgcacctacctgcatggtgaagggctgtccacccactgctgtcctcgatgtccaccacgcaggaagcctgggaaggagtgacaggtgatgtcatctctgtttccggagtgactgatttctcctgccctcccctgctccctgctttatctcagggtctttcctgtaactctctatggccttctttctgtgtgtgcatgctcacatatggcagggcacactgctgagagtggaggataacctgtgggaggttgctctttccttccatgtgcgtcccagggaacaaagatcaagcttgaggcaaatgagacccacagattcattatgttttgttttgttttgtttttgtttttcgagacagggtttctctgtatagccctggctgtcctgggctttgtagaccaggctggcctcgaactcaaaaatccgcctgcctctacctcccaattgctgggattaaaggcgtgtgccaccgtgcctggcagattcattatatctctccagcccctcaggctctttttctcccctctaccatcttcctctgctgagaacccatgttccagccctccggatagccctactttgatggctgtaacaaaggggcaaggcagggctggggaccaggagcagctggggtttggagaaatagctggaattcagtatagacagggaatggacatcaggacctccaagagttgcttcagacactctgggtgcccgtacttggctgccaggtgaagggcattgtaacctgaggggagaagagaagaggcgtgtcctccaggtattctcagctgcctcccaagcctgaatgtccaaactcagctacttcttaaaactgtgctgttcccagagggctttttattgctatattcatttgctatctttgtttttgaaataatttaaaaatcctaaaactcacaggatctctctgccatctggtgcggcgatcaaaggggtcttttacttttatttttaacaggttctcatatagcccaggttggtctccagttcatatgtagctgaggatcgccttgaactcccgatcctcgtacttccacacaagtgctgggatggcaggtgtgcgccagcagttcagaggacagaccttaggatttccctcatgtttggtgaatgtcctacctactgagctacagccccactgtggacagtgagctcccactgtggacagtgagcttccacagttggacctgtggtccctgctctgcacagctgatgcagccctgccatccacccagggacggtccttccataagtacctgctccatccgtgctcatgacatcggcaccttgagccagcatcacttccagacaccccgccgcacccctcatggctgctaagtggaacctagaggcacgagtcaggggtcaaccccagaagaatgtccaaagccaccccagccccagggcttggacactcacgcagacttgccctcggggtccagttttgtaggcaccagccccttgtgggcgatcaacgaggccactctggccacatcgttgttctccactgcctggagcagtcgctggtcacttttgccccagtcttggccctgcggtggcacacccagaggtgcgagggactgagtgggtcgatgtcctttccccaccaaggaacaggggcagttgctccgggctctccccacccacccctgagcacttgcctggcgcctgcctctggctgcgggttttgggatagggcaccggccacagggtgggcaggagctgaggtcggtggggctgagccggagctgtgggataggtggtcctgggctgggggcctcagacagtgtctctgaaacctgcaccccccagcgtgtgatccaggcccaccaccagggcagcttccagatatcaatcctcctcaaaccacctgtgtgtgccttaatccaaagccagttttgaaagacagggtacaactttttttttttttttttttttttttaaatagcatgtctcttatgtagaccagggtagcctgaaagtcacagaaatctcccaaagtgcgaggatttcaatgatccagctttgtttttgttttttgagtcagggcctcaagtagcctaggctgctgtcaaactccctgggagtcaggatgaccttgaattcctgaacttcctgcctcccagtcctcgaggctggggtgacaggtgtggaacatcacacctggtttatgtagtgctgggcatggaagccagggcttggtggtgccaagctcctcgttcacaattattttactgtcttagtttttttgagactgggtgtaactaaaattaaagatcccctgccttagcctccgaatgctgggatgactggccttttccaaactatcctccagcgcccagaacctcgctccgtccttcacagctgctcagccaagaccatcgcccccaggtagcatcaaggcctggccagcagaactgcagccgctaatgtttttaaactcactgcccaggaacatggacagttcctgagtcactcactgtccacagtgtcctccaagacctgcatcccgcaacggcctgctgaccccacgcctgcacagacacgcctgccctcaacaccgccctccacttcccgcccaggctctacaggcgccccgccctctgccgaacttctttctaggaaagaggggaaggcgcagagggacccaaacgcctaccgcgaaggaggcagcagcacacaggcacagctgcttcatggcgaaccgcaggagggcggggccagatcagaccacgcctacctcctcagacacggggctctgccctcctcctgtggcacacctcttctccagactcagcacccttcctcaccaggctcaggcacagagcccgcccagcttccccctagatttcaggcccctcccacctcttccacgaaagctcagggcccgctcacatccgttctaagttccaggttactcccattttccccaggcccgctcgcccgctgctatatagtgctctcttccccaccaccccactcctgcaccgacacgctccatcccgctgaaaaggctccgccccgcaactccatgatggtccctatcgggtgtcagcccgctaactcctcacctccagctcaccttacttacaatgatggacatcattcattcagccatcaccttccagtcttcattcattcatacatttatgcctatcttttcattcattcattcgttcatccatcgtttcacacattcactctctccaacagtcattattcgcactttgctaatgttttcattcacccattcgctcattaatttcctcaccacccatttactaacgtcttttcatgggcaaatgcattggcttactcatcccttcattcacgcacacatcctctcacccattcactcctccaacctacctgtccacccatctactctttcattatttacttcgctccagtagctctcaagtctcactccaaacttgaatcccaggtctgcctcgccattatccacctatgggactgacctagacctcacctgttggagcctccgccctcctcatatgtgcaatggggtttcacatagactttccagacacagctccggagggccgtgcagaggctgagcagaacgcaccgccctgcacaacaggcctggtacaccatgagtacacaataagaactgcatttcattcttcaggcacatgcatctggacctgtgcacagcttccaggctgggtcagaggaatctttagatcaactggaagtgggggttgcaacccccgtttctggctctaaggtgtgtgggcacttgtctgccttgcctgaaattagagccctctatgcaggacccacaaaatatccctgggccacagcctgagactcttctgttctacatttatcaagtgactgcggaatgactttctagctctctggcttctgtgcatgtaagttggcactgtagaagctgtcttggagacggagcagcaggcagggacacacgacaggagctgtgggatgagaatcccagagaggcagaacttggggagaagtgagtcgttcatgaaattgccttgcacaggtggagatatggtctccctaataaacaataagcaactcctgcctctgtgtcccataacactctagatactggtgtgtccctctctgcagagagtcctagaatatgtgtacatatatacacatgtatatataaatatatacacatatagatacatatatatacatatgcatatatgcacatgtatataggcacatatatagagacacacatatacatacacacatacatatctacatacatgtacacacacccgcgcacacacacacatgtgccacctttaaagagagagagagagaatactgagccagacacagtggctctcacctttaatccaggacttgagaggcagaggcagacagatctctgtgactttgagggcagcctggtctacagagcaagttctatgagagccagggctacacagaacaaacaaacaaaaaagggagaaagaatgctttgagcccgatgtgactgtacaacccatgatcgcaatactaggagactgaagaggaaagactgtgattcaaggccagccagggttcccacttccaaaactgtataagcctccatcactgcctggagggattttcctccaataaggtcagaatgtcagcaagggtgccccagataaagtagtccccattccacacaagagaatctggggcccagagcccactgagcccctgctggaaccttgaggacaccttgggaatgagctcagcctgagctaacatctgcagggctgcagcctggcacttggccacagcaggagaggacccagaggcccagggcaccaaggggcctccaggcagccatgagtgttcactttcttccctaggggctgcagagacaaaagccaagcttcaccctggctgctatggggaaaccagagaagggtgagggtggcagacaggttcccggcggggaggggccgaccaggcctcccatctgctgcccaggctggtccagcaccagggacccacccctccctactctgttgctgccccttcttcgaagccccaccaaaatacacccacattccaagctaagtgtctcttgccaagggtgggtaggctgcaagattttgaaataattcagctttttaagtaggtgagtgttttttccacagagggtttccctgtatagtagccctggctatcctgaaactcactctgtagaccaggctggcctagaactcggagatccagctgcctctgctaggattaaaggctttagctatcacagctggcctgattaagctttcaaaaactatttttccttaacttaaaaattgcatttatagggactgcagagacggctcagcagttaagtgcactggttgctcttccagaatcctgagttcaactcccagcagccacagggtggctcacaaccatctgtaatgggacccgataaccttttctggtgtgtctgaagacagctaccgtgtaaataaatcttttttttttaaagagtttttttaaagttgcatttaggtgtgtacatgcacacatgcatggaggcagaggtcagaggacaaccttgtggggtcatttttctccctccaccatgtgggctctgagaatcaaactcaggagagatggcttagcagttagatcaatggctgctatcacagaggaccagagttcagctgcaagtacccttccctgctgagccatcttgatttttttttgtttgtttgttttgtttttcgagacagggtttctctgtgtagccttggctgtcctggaactcactctgtaggccaggctggccttaaactcagaaatttgcctgcctctgcctctcaagtgctgggattaaaagcgtgcgccaccacacctggccccgctgagccattttgccagcccattcttcagcatgtgcaatgacttggtttccaactagtctagctttactgtctaggaaagcaacagttctctctctctctctctctctctctctctctctctctctctctctcatgctctcccttgctctctctggctctctggatctcttgcttcctcccccccctcccagcccttccctccccattccccctgcaggtcacacccattgatacctatctccatcttctaatggagacaggcatatcgcttccctgctgtgtggctttgaggagcttctaccacctctctgagccatccttcctctctcaaatgcacataagttcattccttgaagaatcatagtgagcaaaagaccagggctcacagagcagagcacttgggaatccctcaggaatcactaaattcggacgacgatgaaaatgaaaacgggggcaggaagagtttgggggtatctcggtgacaccttgccagcatgtgcaaaggaggaagggttgccccagtaaccactgagaccctgagtggggggtgggtgagcagaactgaaccatgagtgggactcagtgaacctacgtgggcaatcagcatttgatccagaaaactgaaccagggacctgctggagcagctgacctgctggagtagctgacctgctgcagcagctgggggaacagcggataggggatcaggtggagcctaaaggactggtgggttctgagccacagcagggaggactgagcagtcctccaagcctgaagactcacctctgttttcttgaatcgtgcccggagggtcttcatcacacctgctaggggctctcgtcttgtttctggacaaggcgtgggtcgggtgagggacaggatgctggggtggtcagccacactgtcctcacaacacagcctgggcaaatctgctgtgtgtccaagttcaggctacttgcaccctctgaaggaactgtcctcaactgtaaacagagataattcctccttgtccaggcagtcccctgaagtggggctgagcgtgcatcacaaccagcagcactagttcagcagctcacacaggctgcaacctggagtttgtgcaatcattgatgccataaactccccaccacacaaacactcttctctgtgaaatttctattcacaaaatcgcctctctcccacacagaactatctacctccccaaacggagcttccaagttctcccaagctgggtctcctcctgtacctctaacctgggttcatatgtaatggagctacagggggagacacactggaaagtcagtgttttgcaagaaagtctggtcaaaactgtcactatttagggcagttccacccacccatccatctacccatccacccacccatccatccatccatccacccacccatctacccacccacccatccacccacccatctacccactcacccatccacccacccacctacccactcacccatccacccacccatccacccacccatctacccactcacccatccacccacccatctacccatccatccatccattcactgatcccacctcctctactaatcaggttcactttcaccccacacctaccaccaagggtgggtgacaaaacacccaaaagagttgtccacatgctaccagtctgaaggaaatcgccacggcaaggtggcagggaaggcctgtggatttaagggtttgccttctgaagaggtgacacagcacaggtgacgctgcgcactgggcctgggccttggctcccgcgtgggatgtgtgcacctgtcacaagtgtgcagatgcgtgtgttcatactgttgcaggtagcacccctcaccagcacccagacttccctggcctccctcacccacatccccctacctcaggcgactccagaccggaacccagcgtccaagcagcctctctggttacccgctccagctgcgagccaccagcagcagagtagaggtgacacccgatcaggttggggtgggggagcgggggacggatgagccaagggaggagacaagctgctgttagccagcttgctcagatgggcagccccaaggacggcctctcccacctccttgtgtgctcctgcctcctcgaagcctttcttggggtctccacggggatcaggaggcttcggttgttatatgctgccattgacccatcacatggctcctgtgtctgttgattaccaacaggcagaatggtcagatagtgcctcccatctctagatggccacggaagcagggctcttcacctctctccttgcatctctgggcacctctgggtaacacgtggaactcgcccagttctgtggacctaaccctatgctctgtgatattccgggaggtgcactccagaaactaacccaggaaatgttggcagggggcccagaggtctttcctctgcccaagaaccccagttttccattcattctctcctgtagccagagtcaggcagaccctggatgacagtcacaaaggttagggtatcatgtagcctagcgtggcttcgaactttctgtcccctcctgccagtgctataagcactccgggcagggctctacacactgagaactgtggatttttgttttgctttgtttggtttcatttctgggttttgctgatgttgtctcttttgaaacagggagttggtctgggactcgcaatccccctgcctcgactcctgtgagtggcctcatcacttttctggctctggtcgcggatcccaggactggggaatccactaagtcagagaggtagtctcggccagcactgaagactaagcttgctgcatcaggagggcgcatgcgctctggaaagaatgctgtttttcacctccacgtacccaccccaccctcaggcacgtatctagggaaggcggctactctttcccgaccgtcccttcaccacttccggcggaagcggcctcaacaagggaaactttattgttcccgtgcggcagcgccggcgacgatgtcggtgaattatgcagcagggttgtcgccttacgcggataagggcaagtgcgggctgcccgaggtgagagctgcagtgttcgagtcaccgaatgaccccagacggggagcggccgggcgaagcggggcattgtgggaacagcatgaaacatagagtctagacaatgggagggacttccctggaaggagggggcgggaagtgacacccactgctcaggctgggtgacacggaggaacctgggtcagggaaggagtgaggggctaatgggaacgagaccaaatcgtcaggtcagggagtggacgtcttaattgtcagggaaaacctggagctgtgggaagatctgcagggccggaagctggcaccctttcctgggggcatccctgtaccccactctgtactcctccctgaatctgggccagatggatcctgagtgtggggctgtcagtctttgttgtttctgaaggggtgtagtagggtggagggttctctctttgtagcccaggctggccccgaactcacaggaatcttcctgcctctgcctcccgagtactggtgttaaaggcctgcgacaccatgccctgcctgcctcatgttaacggagcccctagacaagtagagctgcatcttgatttaggggagagaggtgggttatctaaagtccaggatgggggatgacgtcagtggggaggtcacgtgggccacaaccagaccaggacaaaggagtggctgcctgcaggaacagcactctgggaagagggctcggcatgtgcaaaggccctggggtaggacacagcgatgtgttaagagtgtggctggaactgagggatgttgagaaggggcagacagagcattgacccacaggaggcctgccacttgggaggtcacgtgttgcctcctcctgccctctgaccctacagatcttcgacccaccagaggagctggaacgcaaggtgtgggagctggcccggctaatgtggcagtcctccagcgtggttttccacacgggcgccggcatcagcaccgcctctggcatccccgacttcaggtcggtgaacaatgaggggaaactgaggcagggctcttgctgatacacctctagggactaaggtgaggtggcagaaggacctttcagttttcctatgtctctgaaaggcccagcaaaaactccacttgcccaaggatcagagcatgcccacataatgtagtagctgcaaggcatgctgggaaatgtattcatgcagctcggccagccactgggttttctagggtcagaatgactcaatgttgtggagtgactagctcacccataaccttcggtggcagcctatgaccactgtaaagcattctgggaacccgcagccggtcttaaccagtactcagccccagctccactagctcccctgcctttgtttacccccagaccctcagcccctccgcctctttcatgaagacgtcccatgctctttagaattcttgcctacccggcagtcattgtctccaccacaggatacagaaccaccctaagaacggggctggggccagcatgggctgacttcagcattaacaggaagagcccacagcctggaaaatgaatgtttgacctctgtgcctgtcctcctctgcttgctatcctcagaggcccccatggcgtgtggaccatggaggaacgcggcctggcccccaagtttgacaccaccttcgagaatgctcggccctcgaagacccacatggccctggttcagctagaacgcatgggcttcctcagcttcctggtcagccagaacgtagacgggctgcacgtgcgctcgggcttccccaggtccgatgagtcggccggggggctggggctcaattgcatctcttcctccttattggaccagggtgccctagctcaggggcatttattagggatgcaaagagggggaaggctcggagcccaaagccgggcagtacttggtcaaattggggggatgtaggcagggttccacccctcactggggtggggtggggaggttggcaggggctttagggccaactgactgttgcggcagagggcgagtacatgacagaatttctccatgtcttggctaccctgggacttgccctgtagatcaggctcacagagatccacttgcctctgcctcccaatggagggattaaaggggtgtgccgcggctagccaacaggttttttgtagtggggaggaggtatttgtgagtttgtgaagacaccgtcagacagctatgcatgcaacagttcctcagaatgggacaggctgggacatcctccaggaaagagaagtggacgccccttgtgagtgagccccctaggaaggctttctggaggaggaggcagactgagcagctggtccaagccccaggatctgggaagggtccttactggcatcttcttctgcagggacaagctggcagagctgcacggaaacatgtttgtagaggaatgtcccaagtgtaagacgtgagtgttgcccgtgtaacacaagaccctgctcctcccctaagccagctcagggtcctagcatggcctagagaaggccagagacagtcagatgaaaacagaccaacaaaggctcgtagacaaatggggcaaaccctttcttcacagccccccaagggagaagctggtcatgcccttggcaatgaggggttctccctgccctgcctttgctatggctctgggctgggtgtcaacatggcttgcacaccagagcctcggggtgttgagcaggactgtgcctcctgagctttggcccctgactccctcttaggggttctttattcagacaggacttcattaaagttgcccaggttatcctgaaatttggcatcctcctgcctcagcttcctgcgtgctgagctcacaggtgcgagccatcatgtttcccttagcctcctccctcccgcaccctcccttgtgtggatgccagcggctgacactggctcagccccctctgcttgtgttttgaggcagacttgctctcagaacctgtacctctttggtttagctgagtggccagtgaactcctggggtccccagctcagcctcccaagctctggggcgacaatcctgctccaccatgctcttcgttttccatggatgactcaaacacagagcccggagtctgcttgccaggcactttcagactgagtagtctgtctgtctatccctcggttgtttgtcctgctcagtagcccatgggttgagcctggctacaccaccccccagctgagagaacattagaaaatgtgtgtgcacccttccccctttacaggcagtacgtcagagacacggttgtgggcaccatgggcctcaaggccacaggccggctctgcaccgtggccaagaccaggggacttcgggcctgtaggtaggtgactttcctcacaccctccacctgtgaggaggtgggcgccccctgactccattccctgactgccacagaggggagctgagagacaccattctggactgggaggactcgttgcctgaccgggacctgatgctcgctgatgaggccagcaggtgggaccccacactccccaggtggaaatgggtggggatggctacgcagacctccacagaaggtcgaaactcgggtgggacagcagggttgtccccatcacccccagcccagggccctgggcaccataggtgcagaggagaagctgagacacagagtgagtggaaggtttcttcgcgttcctgctttcaggtttttgtggtagtggggagaatcctgggcctgtgtgcactaaacaagccctctgcagaatcagccccttcgctggaggattctaggcaagagccccaccctgaccacgcccccatacctaactgggaactttaggtgggggcttcgtcctgaccacgcccccagtacctaactggggcattctaggtggggctccgcccagaccacgccccccagtacctaactggggcattctaggtggggctccaccctgacctccagctttgagtcatttcaccatacaggaatatttgctttccttttttgagagaaggtctgctgtgtagaccagactggccttagactcaagaggtctgtctaccttctgaatgctggaattcaatgcgaatgcagttcgctcaaagcttgaaccttttgatcctcctgcctcagcctgtggaatagctaggacaacaggcctgtgccacccagcctggttgtcgttaatttttaaaaaactggccgggtggtggtggcgcatgcctttaatcccagcacttgggaggcagaggcaagcagagttctgagttctaaattcgaggccagcctggtctacagagtgagttctaggacagccaggactatacagagaaaccctgtcttttgtttgttttgttttttgttttttgtttttgtttttcgagacagggttaccctggctgtcctggaactcactttgtagaccaggctggcctcgaactcagaaatccgcctgtctcggagaaaccctgtcttgaaaaaacaaaacccaaaactggacagtggtttacagtgagacaccaagactgaatctcagctcccaagtgtttctccagtgcctggtgggtgggcgtgagggctggaacctgaggtgggcctgggccccacccacttcctgctccctgttccaggaccgcagacctgtctgtcaccctgggtacctcgctgcagatccgccccagtgggaacctgccccttgccactaagcgccgaggaggccgtctggtcattgtcaacctgcaacccacaaaacatgtatgtaccagtgccctgcccggtgccccggtgccccctagcccacgctgactgtccctcccttggcaggaccgccaggctgacctgcgcatccacggctacgtggatgaggtgatgtgcagactcatgaagcatctggggctggagattccagcctgggatggaccctgcgtgctagacaaagccctgccacctctgcctcgcccagtagcactcaaggctgagccccccgtgcatctcaatggtgcagtgcatgtttcgtataagtccaagcccaacagccctatactccacaggccccccaaaagagtgaagaccgaggctgcccccagctgacccgggtatgtggggcgggaggggaacttgaaggaaccacacatgttgaggtttttgtttgtttgtttgtttgtttgttttttatattctggggactgagcccaggtttgcatatctcaccctggtgtcttttcagatttttttttttttttttttttttttgagaccaggactccctagatcgctcaggctggtctggaactcactgctatagcccaggctggcctggaactagcctgcctgcctcagcctctactgtagtagggacagcgggcaggtacaccatgtccaacacagctcctttcttcaaagtctcactgtgtcccttgtccaggtccttccagggaatctcagggcatggggaatcccacacatgtggaagaggccgtgtcccagggatccacgtgcctctctaccaatcacacccgctcgtgactcaggatgtgcccggagcagcagtctcacacactccacacaccattgctgccccctgcacgcatctcccccccatcccctggccctgacacagagccaccaagggcccaccaggcacccatctgtgctaagggccccaggctcccagaagctcccaatgcaataaatacaaaatcccttccattcttttacattttgttacatttatgtattccgtttgtgtgtgtgtggtgtgtggaggttcatgtgtggaggtcagctgacaacttgaaggagtcaggacatggaactctgggcatcaggcttggctcaagcacctttacctgctgagccctctcaccagtcctgttcccccaacccaccccacctcctttatttacctaagtgtgttagaatccccacccagccaaaaaacggaagtttgaaggacctgttttgttattttgttttgaagtcattccaccccaacatggccaaatccatggatgaaaccattcctgtgacaccatcacctctggagctggcctcctgaccactccaggcctggagacagatctcccacaactctcttgctcatgcaggcgcagtgagatctaacatttttctgtgggttctgaggtttcaaactcaggtcctccgtgcttgcactgagccacatcccaggagttcctaggtgtctggttagtcaaggtcaacccactcacccaagatccatgtgtcacaggctgcgcccaacttggtagaagtgaagatactcaattgctcgggtctctatgtctctgttgtctctgtcttcccactgcctggtctggggcttggtcccactacagggcctggttccccacaccagcattctagaggacctggtcactcagatgttaggggtggaacctggagaacctcgacaatcatagatgctaagtacaggtagtgaatcagaggcggggctgggcacctgcccaatcagaagcaccgacttcagctttgtccaatcagagtccgaggcgggatcatgactgacatcctgcaaacggcagtggtctccattctatcaactgaatggtggagaaatgccacagaaatcccgctcagtttggaggcatcttcatatgcgttccaaatcgtcacccagaccagaaagtctcccaccccaaaccctgagtaacagggtcatgacccagcaaagtctccactcgacgttcttctttcacagctcaccatccagtgcagcagtgggatcaggatcacaggggtctctcactcctaagagcattgatatcacgcacagtgtaagggctgtggaggaacatccaccagccatccctcagaaagaaaccgcgtctgtccttgagtgtcagtagtgtggggaagcctgcatttatctacaatcttctcaaagacaggaaaggacctcagagagaaactacagatttcatctgtgagggagagaaaaaccctgcagtcatgagccgagtgggaaagccctcagacatttctcacccttgcagatgtgcatgaaattccacacaggagagcagtgacaaggggaaaccctcccttggctaatatcctgtaggtggtttttgatactttgtgggttcttccttatatgagggtgggggaggctcctgaatttaattccttttttcttgtttcttcttttagcacaactactaacaaactaaaaccaaacaaccaatcaaccaaccctctaattcacccccctccaccccatgtgccagtgaccatcaaccaaccacactgcctctcggagcccttgcattttatatgtcctccaagaagtgcccagaattccaaacattgcacaataacagagactatctgcagctggcaaaaccacgcctctgctagagcacgaggcaaatcattgtcagctgctggggacagtccgaagcagccccaccccccacagacaaagacacattcttataatatttctgtatttttaaaagaagcctaatgggggctggcgagatggctcagtgggtaagagcactgacttgctcttccgaaagtcatgagttcaaatcccagcaaccacatggtggctcacaaccatgagatctgatgccctctgctggtctgaagtaatctacattgtacttatatgtaataataaaatcttaaaaaaaaaaaaaaaaaagcctaatgggctggtgagatggctcagtgggtaagagcacccgactgctcttccgaaggtcctgagttcaaatcccagcaaccacatggtggctcacaaccatcagtaatgagatctgacgccctcttctggagtgtctgaagacagctacagtgtacttacatataataataaataaatctttaaaaaaaaaaaaagaagcctaagggttggagagatggctcagcagttaagagcactgactgctcttccaaaggtcctgagttcaaatcccagcaaccacatggtggctcacaaacatctgtaatgagatctgacggcctctctggtgtgtctgaagacagctacagtgtacttagacataataaataaataaataaatcttttaaaaaaagagggcccatgggagagaaggctggcagtcaagaaagaccttcaattgttcctcttccttacagagacacgagacagcacccttcgaaaaccagcagacgcacagtgtggggtcacactacaaagggactcacatacatacagtgttcgaggcaacctgacacaagagatgcagtcctactagtgttgtaggtgtcatggcacctgtgtgagcagtgtgtgtgtgtgtgtgtgtgtgtgtgtgtgtgtgtgtgtgtgcatggtgtgctggggatgaaccccagggcttttgcatgtgctaaacaaacacatcaccatcaccaccatgggactacgttcccagccctaaagtgtattttgttgttgttttgttttttgttttttgagacaaggtttctctgtgtagccctggctgttctagaactcactctgtagaccaggctagcctcgaactcagaaatccacctgcctctgcctctcaagtgctgggattaaaggcatgcgccaccactgcccggtcataaagtgtatttttcttttttttttttttaaagatttttatttatttattatatgtaagtacactgtagctgtcttcagacacaccagaagagggcgtcagatctcattacggatggttgtgagccaccatgtggtttctgggatttgaactcaggaccttcggaagagcagtcgggtgctcttacccactgagccatcttgccagccccgtatttttcttttcatggtgtaagtatatgcataagcttctgtgtgcagatgtgctcacacctgtgcagggctatttgcctgtgcacatacgcagaggctggaagaaggtgtccgggtcccccgtatattctagcagactctccctgcacctgggcctcatgtgcatctcagctgagctgaaagccggcaagtccaatgatctccatgcgtccacccactcagaactagggttgcaggcagcaccaaagcacaactttttcatgagtgctgggatccaagcccacatctcacggccggaggagagcaagttcccttcagtttgagctgtcatctctgcggtctcttaaactgaactctttatatgcagctaggcttggattatgctgggttcgatgtcaacctgtcacaaattaaaatcacctgagcagaagacacacctgaagagatgctctgactgccttccccagtgtaggacagtccatgccgatggtagcagcccagacagaatctgtcaggggaaaccatctcaccttctgctcctgtggcctccctctggctgatggcggaactggtatccccaaacatagccggtggctggttctccaggaaccttctggtgccagattggtactactgaggcagcacaccttgtgaactcaataactgccggttggccccagtgagagacgctactgtgggactactgtgatgctgggtctccagcctcaatgatagggatctgggtctcggggtctccggtgggcttgtgctggcgtcactactttagagatgactcagcacgtgcacgtgagcactcacacatgctcatgagcactcacacatgcacatacacggttctgtttccctggtggccctcactaaacagctcaatttccatccagtggccattagtaaatatctcttagggggctgtttggaccatgagtgctgtgatacttactcatgacctcagtggagtaatgtgggatcccacccattgcatttcctatctttccaactgggattattttactcactgagcagaagagcatatgctcttcattgataaagtatcagaagtgccaaataatgtaaaacttgaagagtagggcagcctggtcccctctggcatctgccatttgctgtttggttgtgaagttgacaaatgcctccaatcacctatgtgatggttcatttttttgtttttgttcatttgacacaaacctagagccaacaaggaagcatgagtttcaacttgctctatgggacattgctctgtgagcttcaaggacccagccacgggggtggccacgtccaggggagcccaggaagcagccaatgggaagccttcctccatggttcccaggtacttggagagaggagacactccaggatgaatttagccttctcggcagcgaaagggtcagctgacaagacaggctgactccacgacaggcttcagtgagattaggcctaaaactcaggcttcaggcagctagtcagaaactgccccaccacctggccagaagcaaggacaatgggtcagcagtttccaggcagcctccacacccaggtaaagggatgtccttagagacagagtaagacaaagcccacctaccctgggactcctctctgtgctttaaatcaggcctgagagctcacatcagggtctctctgtcctggtaaagggagaccccagcgtgctggacttctgcagaacaaagcactcttggcggctacgcaccattcgcgtctgaggcgtcattcagcctctataggactgaacacctgggcgcttttcaggaaaggctcttttagcaagtcactttccacatagcaaacctcttatcagatccaggagttgtctgaagcaaccattgcctaagcacttctcagccaaatgagacttctgggtctgccaggtatgtctcaggactgttacacaaaggctctgagaatccttcaggaagagcaactgcataaccctcagagagcaatcgtatgtgcaaaaggatccgtcaaagcctagaagccgtcactccagaacttgccatatacaatgaatggctccactagagttctattacagctctgtaaaccaggctggcttcaaacacagattccccctgcctctgcctaacaccctccccccacacacacccccaagtgctgggattaaagatgtgcaccaccactacctgggtcttctttagatatttatgtgttactaaaatgtctaattgggtggtgaatgcctcattatttgaacacttctcatagctctgattctacacagacactatgttggactttgtctctgggtgcctcattaagcgtgctgacctactccttcccgagtgttagggcctgggaggatttctagtgcatgcaacctaaagtatgcaattcccaaatctgggttcaataataatgttagaaatataagcacttggaccagcaagagagctcggagcataaaggggcttgctgataagttaaagtagcaaagatgagggtacttttgcagggcccatgtcaagatgtgctgctaagaaattatgttgtgcgacagatctagtgtaagaggtttggaggaggcagtgagagtgaatggctgtctcagagtggagacatgagggagagacaagagacagacaggcagcgaaaatgaacaagacagagaataagaaagtacaggaaggagacagagccacagaggaacaggagaaagatctggggtggccagagcattttctgtaccacacatggtacacctggagctcttggcagtaggtgatgatgaagaggtcagctcaggaactttagaaaagtccaccagacccctcccctcctggaaggtcataaagaacacaggcacccctcccctccagcaaggaggggctgattgcattcctcagacctcagggaggaggggcggaccacccatagacacattctgcaaccattggccacccacctcattccctatagaccaaccagtttaaaagtcacactgttctgccaatcacattgtgcctaatggctgctgccttgagaactgtataaaggctcgccagatgggctgcgcgtggtcggtctctctccatgtgcagaatgatcccaacgtgttagaacaataaattcctcttgctttttgcatcaattcctggctctgcaatgttcactcagggagtctccagtaagctaaggctctccagagtcttacaatgacataaactgacactaggtccctggaggcaggccggtggaaatgcctgatcactaacccttgctgccaacttgacaagctgagtgaattccctgggaagagagaaccataagttgtcctctgacctccacatgtgtgtcatgcagcacgaaccaccacctaacttaccaattagtctaccaagaagacaaacaaacaagatagacagatattcatgagctgaggagatggctcagcaggtaaagtccttaccaccatagcaatgcatgccccatgcgacttcagcactaacagaggccagaagggagtgttagatcctctggaactggagttacaaatgtctgtgagccaccatggagtgctgaacaaaagtcctccacaaaagcaacaggtaactgctgagcaatctctcctgggcacacacacacctgccttctttttgatagagtctcctgtagcccaggttagcctgtgctgcatcggaagatttaaaccagcttgagatatatgagaaattgtcaaaataataatagtagtactcgtagtggtagcagtagtaataataattgcccagggccagcctctgtcatttcagggttctcgagaatggagggactgaattggtgcaaactctcagtctcaagcaatgatacaggtgcacgctgacaggtgactgctgttctgaagctgagctcagaaacagcttgcagttctcccccccctcccagcgccacgccccccaagttcacctccatctttttaaaaaaagatttatttattatataaataataattattattttattattaatattatatgtaagtacactgtagctgttttcaaacactccaaaagagggcatcctatatcattacagatggttgtgagtcaccgtgtggttgctgggatttgaactcaggacctccaagagagcagtcaatgctcttaaacactgaaccaactctccagccctcacctcagtcttttattggttacacgcttccattgttatgcaattatacacaatcaaaagcctttcattattttcctcaagcccactatttttcctagaaactccatgtaactgtcaccagaaagcacaacgcacaccaaaagtcacagttcaacgtccacaaaagtaagttatacactcattaagctttacctctcagaaaactctccacatcacaggtcatccgggcatgaacttgtggtcacagcgttagcctgagagcagaaaggtgcaaaacaggaagggtaatgttagtatttgtaacttgtcttaaatttgcaaaactccctttcttaagcttatccaaatatctatttgtacaatgtgcctcaaactctttcccatgtgcaatatgaattcctcttgccgcttcccccagggctctctcgcaagcccaaattctatctcttaaaacctgtaccctaatctgtgtagctaagtgttagggtacttgtatgggaggcagacgacgccagggggtcaagtcagtgtgttccagtatctcttcccctgtcttgtcccttgtagttctatggatgtccctgtccttagtgactcaggcccagttttccttttccttggggtcttcaattctcttaacgactaaaacttcaagtttctcaagaacatttcctgcttcaaatatttcctggagccaggcgtggtggtgctcgcctttaatcccagcatttgggaggcagaggcaggtggatttctgagttcgaggccagcctggtctacagagtgagttcccagacagccagggctacacagagaaaccctgtctcgaaaaaccaaaaaaaaaaaaaaaagaaaaagaaaaaaaagaaaaatttcctggtacaacttaatcatcatgagttggctaagatttcccagagaacagttaaggcagtcagcctccacatccacaactccttgtcccgatatgcctgggctggctgcttgaatggccagggccagagcagttgattcctaacagacatcagagccatttccttctctagtaacgccctcaatccctttcccagaagaaaaacacaaagcagccgagaaagagcagctctgtctgcgtcctagtgggccagagatgcgttattcagggtgacagtgctcctgtgtcatgcagctgcattggcaaccatattgcacgataacaatgatgataactttaataataataataatcagagctgtatagatgtctcagcgggcaagcatggaagcatgcgttctgatcctcagcaaccacataagcgtcaggtgtggctgtcaacacctgtaagcccagtgctggcagaggcaggaggtgtccctggggttcagtggacagtccgcccaagtgaagccatgacatccttgtctcaaaaaataaagagaggctgctgagatggctcagcatgtaggagggcttactacacacgcatgaggaccaggctttgaatcctcaacaccacacaaggtcatgtggccctgtgacctcagcgctgtgggggaggagacaggaggatgactggggcttgttggctgactcagctctaagtgcagagagacactgtacaccaaaggaataaggctgggtgtgagtaatcaggacacaaatgcaccctcctcacatgcacacatgggagtgtgcatgagcacagaaaaggtgaagaacaatagaacaaagcacccattgttgacctctggtctccatgtgtacacaaatccacatcctcacatgaacacacatatacacacatgcctgtgattacccctccctggagcacccctctctctctctctctctctctctctctctctcaatgcataaagcatcttgtatgggatgcataaaaccatggacaggagagtttgctcagtgtttagagcaggagctgctcttgcagagaacagaggtctagtggtttatggctcacaactgtatgtaacttcagtacctgagaatacaacgtcctcttgtagccttggtgggcaccaggaatggaagtggtacacaaacacgcattcaaacaaaactcccatgcacatatgataaaataaaataactaattgtcattaaaataaacaaccattaggggctggaaagatggctcagcagttaagagcactcgctgatcttccagaggtcctggattcaactcacagcacccacacagcagctcacaaccatctgtatctctggatccaggggatctgacacccttgcacagacatgcatgcagacaaaacactaatgcacatgaaataaaaataaatacattgccaggcagtggtggtgcatgcctttaatcccagcacttgggggtggagtgggggggggggcagaggcagatggatttctgagttcaaggacagtctggtctacaaagtgagttccaggacagccaaggctacacagagaaaccctgtctcgaaaaaacaaaacaaaacaaaacaaaaaaaaaaaaattaagaaagaaagaaagaagtcagcaaatgattctagaggcccatattacctttgtaaatgagacagatgttccaccaccctaccccacccccagctcctcaatcatattccaggttcttcttttttttttaagatttatttattatgtatatgtaagtacactgtagctgtcttctcacacaccagtagagggcatcagatgtcattaaagatggttataagccaccatttggttgctgagatttgagctcaggaccttcataagaacagtcagtgctcttaactgctgagccatctctccaggcccatattccaggttcttaaagccacaacacgacattgttccattacaccatcatcagattggatttgttctaataaatcagcataacccccttcaccaagcaatttgtctttagtaacatttatcttccttgctatattccattcttctatttttgtggcttcctgactccaccacaataaccactgtaattgctgtccagtgtctagaacagctgacaccaatcccatctaatcgtggggggaaaccctattctgaacagcccaagtatttaacattttttaacatatggggagtgtaatccatataataccacagcctccttaaagtgctttaaatctagcattcctatcagatgccaggttagctcatcataggcatgtgctgcataaaacctgggatggcagaaggtgtctgtgtaagcccaaacaaatcctccagtgttgggctcagctgaacactttctcattgtccatgtaccatctcctgttcttcctggtccctagtttcatggagatgctggtgccaggtagtgaaagtgggtagagcagggcaaggtggcagtttaccttccagcctatttgcctccctttttcatcatgaagtaaattcctggtctcagacatgaatcctgaagtgtgccgttctcccactggctctttttgcttcctaagaattctgttcacaaactctctacatgctcagcaaactcctcaatcttctctaatacaagagatttgtcactcccatcccccgcccatctttttcaaaagagaatacatgaaaaccatgaaacagccgggcgtggtggagcacgcctttgatcccggcacttgggaggcagaggcaggtggatttctgaattcgaggcctgcctggtctacagagtgagttccaggacagccagggctatacagagaaaccctgtctcaaaaaacaaaaaacaaaaaaaagaaaagaaaaaaaaaaaaaagaaaaccatgaaacaaaaccaaaataccctctggaacaaggtaggaaacattgaggagccgtagctgctattgtgtcaacctccttaaagaacactgctaacctctgcataaccttacctttcctctaccacattcagagcagaattatccattatgcctaagccacattgggcaccaggatataggacttttcaaaacctactttaataagggttttcaaatgcttcaagcccccttctagcccatcataaacctaaggcaggggagaaaagatggtaaataagacaaggggatgtggacctgtttggaagtagttctttgtggtgattcctatctccatttgtcaggataccagcagtccagttcagtagtgccaggatatcaaacacaaatcaacagtggtggcaagatccagcagaaacagccaggcctctgctgaactggcatgttcagctggagtgactagaaccagccaggatgacaggagttctctgccatgcctctctcaacaaagtgaagatgcaaaaccaatgaagcactgcaaggctagctacataagtgcccagtcactgtacactgagtcacacatatactctctccaaacatcacatgtcctcccacaggtcttgtctcagcaaaatgtcacgagtgaatctgactcagcaaagatactaccacaaaagtctgcattgcacgacacaaccagaaacttgcacttcagcgcagaggtcaagggtgaacactgatcttcagagcacctaagattgtgcctacaccacactgggtggatgggtgtcaggtccatgggatctgatccctctggcctccaaagacaacggcactcacgtgcacaaactcaaacagacacacatataactaaaaataaaataaactgtttttgtttgttgttttattttgttttagaaat

SEQ ID NO: 84 - DNA, 29823 bp, Mus musculus
atttctaaaacaaaataaaacaacaaacaaaaacagtttattttatttttagttatatgtgtgtctgtttgagtttgtgcacgtgagtgccgttgtctttggaggccagagggatcagatcccatggacctgacacccatccacccagtgtggtgtaggcacaatcttaggtgctctgaagatcagtgttcacccttgacctctgcgctgaagtgcaagtttctggttgtgtcgtgcaatgcagacttttgtggtagtatctttgctgagtcagattcactcgtgacattttgctgagacaagacctgtgggaggacatgtgatgtttggagagagtatatgtgtgactcagtgtacagtgactgggcacttatgtagctagccttgcagtgcttcattggttttgcatcttcactttgttgagagaggcatggcagagaactcctgtcatcctggctggttctagtcactccagctgaacatgccagttcagcagaggcctggctgtttctgctggatcttgccaccactgttgatttgtgtttgatatcctggcactactgaactggactgctggtatcctgacaaatggagataggaatcaccacaaagaactacttccaaacaggtccacatccccttgtcttatttaccatcttttctcccctgccttaggtttatgatgggctagaagggggcttgaagcatttgaaaacccttattaaagtaggttttgaaaagtcctatatcctggtgcccaatgtggcttaggcataatggataattctgctctgaatgtggtagaggaaaggtaaggttatgcagaggttagcagtgttctttaaggaggttgacacaatagcagctacggctcctcaatgtttcctaccttgttccagagggtattttggttttgtttcatggttttcttttttttttttttcttttcttttttttgttttttgttttttgagacagggtttctctgtatagccctggctgtcctggaactcactctgtagaccaggcaggcctcgaattcagaaatccacctgcctctgcctcccaagtgccgggatcaaaggcgtgctccaccacgcccggctgtttcatggttttcatgtattctcttttgaaaaagatgggcgggggatgggagtgacaaatctcttgtattagagaagattgaggagtttgctgagcatgtagagagtttgtgaacagaattcttaggaagcaaaaagagccagtgggagaacggcacacttcaggattcatgtctgagaccaggaatttacttcatgatgaaaaagggaggcaaataggctggaaggtaaactgccaccttgccctgctctacccactttcactacctggcaccagcatctccatgaaactagggaccaggaagaacaggagatggtacatggacaatgagaaagtgttcagctgagcccaacactggaggatttgtttgggcttacacagacaccttctgccatcccaggttttatgcagcacatgcctatgatgagctaacctggcatctgataggaatgctagatttaaagcactttaaggaggctgtggtattatatggattacactccccatatgttaaaaaatgttaaatacttgggctgttcagaatagggtttccccccacgattagatgggattggtgtcagctgttctagacactggacagcaattacagtggttattgtggtggagtcaggaagccacaaaaatagaagaatggaatatagcaaggaagataaatgttactaaagacaaattgcttggtgaagggggttatgctgatttattagaacaaatccaatctgatgatggtgtaatggaacaatgtcgtgttgtggctttaagaacctggaatatgggcctggagagatggctcagcagttaagagcactgactgttcttatgaaggtcctgagctcaaatctcagcaaccaaatggtggcttataaccatctttaatgacatctgatgccctctactggtgtgtgagaagacagctacagtgtacttacatatacataataaataaatcttaaaaaaaaaagaagaacctggaatatgattgaggagctgggggtggggtagggtggtggaacatctgtctcatttacaaaggtaatatgggcctctagaatcatttgctgacttctttctttctttcttaatttttttttttttgttttgttttgttttgttttttcgagacagggtttctctgtgtagccttggctgtcctggaactcactttgtagaccagactgtccttgaactcagaaatccatctgcctctgcccccccccccactccacccccaagtgctgggattaaaggcatgcaccaccactgcctggcaatgtatttatttttatttcatgtgcattagtgttttgtctgcatgcatgtctgtgcaagggtgtcagatcccctggatccagagatacagatggttgtgagctgctgtgtgggtgctgtgagttgaatccaggacctctggaagatcagcgagtgctcttaactgctgagccatctttccagcccctaatggttgtttattttaatgacaattagttattttattttatcatatgtgcatgggagttttgtttgaatgcgtgtttgtgtaccacttccattcctggtgcccaccaaggctacaagaggacgttgtattctcaggtactgaagttacatacagttgtgagccataaaccactagacctctgttctctgcaagagcagctcctgctctaaacactgagcaaactctcctgtccatggttttatgcatcccatacaagatgctttatgcattgagagagagagagagagagagagagagagagaggggtgctccagggaggggtaatcacaggcatgtgtgtatatgtgtgttcatgtgaggatgtggatttgtgtacacatggagaccagaggtcaacaatgggtgctttgttctattgttcttcaccttttctgtgctcatgcacactcccatgtgtgcatgtgaggagggtgcatttgtgtcctgattactcacacccagccttattcctttggtgtacagtgtctctctgcacttagagctgagtcagccaacaagccccagtcatcctcctgtctcctcccccacagcgctgaggtcacagggccacatgaccttgtgtggtgttgaggattcaaagcctggtcctcatgcgtgtgtagtaagccctcctacatgctgagccatctcagcagcctctctttattttttgagacaaggatgtcatggcttcacttgggcggactgtccactgaaccccagggacacctcctgcctctgccagcactgggcttacaggtgttgacagccacacctgacgcttatgtggttgctgaggatcagaacgcatgcttccatgcttgcccgctgagacatctatacagctctgattattattattattaaagttatcatcattgttatcgtgcaatatggttgccaatgcagctgcatgacacaggagcactgtcaccctgaataacgcatctctggcccactaggacgcagacagagctgctctttctcggctgctttgtgtttttcttctgggaaagggattgagggcgttactagagaaggaaatggctctgatgtctgttaggaatcaactgctctggccctggccattcaagcagccagcccaggcatatcgggacaaggagttgtggatgtggaggctgactgccttaactgttctctgggaaatcttagccaactcatgatgattaagttgtaccaggaaatttttcttttttttctttttcttttttttttttttttggtttttcgagacagggtttctctgtgtagccctggctgtctgggaactcactctgtagaccaggctggcctcgaactcagaaatccacctgcctctgcctcccaaatgctgggattaaaggcgagcaccaccacgcctggctccaggaaatatttgaagcaggaaatgttcttgagaaacttgaagttttagtcgttaagagaattgaagaccccaaggaaaaggaaaactgggcctgagtcactaaggacagggacatccatagaactacaagggacaagacaggggaagagatactggaacacactgacttgaccccctggcgtcgtctgcctcccatacaagtaccctaacacttagctacacagattagggtacaggttttaagagatagaatttgggcttgcgagagagccctgggggaagcggcaagaggaattcatattgcacatgggaaagagtttgaggcacattgtacaaatagatatttggataagcttaagaaagggagttttgcaaatttaagacaagttacaaatactaacattacccttcctgttttgcacctttctgctctcaggctaacgctgtgaccacaagttcatgcccggatgacctgtgatgtggagagttttctgagaggtaaagcttaatgagtgtataacttacttttgtggacgttgaactgtgacttttggtgtgcgttgtgctttctggtgacagttacatggagtttctaggaaaaatagtgggcttgaggaaaataatgaaaggcttttgattgtgtataattgcataacaatggaagcgtgtaaccaataaaagactgaggtgagggctggagagttggttcagtgtttaagagcattgactgctctcttggaggtcctgagttcaaatcccagcaaccacacggtgactcacaaccatctgtaatgatataggatgccctcttttggagtgtttgaaaacagctacagtgtacttacatataatattaataataaaataataattattatttatataataaataaatctttttttaaaaagatggaggtgaacttggggggcgtggcgctgggaggggggggagaactgcaagctgtttctgagctcagcttcagaacagcagtcacctgtcagcgtgcacctgtatcattgcttgagactgagagtttgcaccaattcagtccctccattctcgagaaccctgaaatgacagaggctggccctgggcaattattattactactgctaccactacgagtactactattattattttgacaatttctcatatatctcaagctggtttaaatcttccgatgcagcacaggctaacctgggctacaggagactctatcaaaaagaaggcaggtgtgtgtgtgcccaggagagattgctcagcagttacctgttgcttttgtggaggacttttgttcagcactccatggtggctcacagacatttgtaactccagttccagaggatctaacactcccttctggcctctgttagtgctgaagtcgcatggggcatgcattgctatggtggtaaggactttacctgctgagccatctcctcagctcatgaatatctgtctatcttgtttgtttgtcttcttggtagactaattggtaagttaggtggtggttcgtgctgcatgacacacatgtggaggtcagaggacaacttatggttctctcttcccagggaattcactcagcttgtcaagttggcagcaagggttagtgatcaggcatttccaccggcctgcctccagggacctagtgtcagtttatgtcattgtaagactctggagagccttagcttactggagactccctgagtgaacattgcagagccaggaattgatgcaaaaagcaagaggaatttattgttctaacacgttgggatcattctgcacatggagagagaccgaccacgcgcagcccatctggcgagcctttatacagttctcaaggcagcagccattaggcacaatgtgattggcagaacagtgtgacttttaaactggttggtctatagggaatgaggtgggtggccaatggttgcagaatgtgtctatgggtggtccgcccctcctccctgaggtctgaggaatgcaatcagcccctccttgctggaggggaggggtgcctgtgttctttatgaccttccaggaggggaggggtctggtggacttttctaaagttcctgagctgacctcttcatcatcacctactgccaagagctccaggtgtaccatgtgtggtacagaaaatgctctggccaccccagatctttctcctgttcctctgtggctctgtctccttcctgtactttcttattctctgtcttgttcattttcgctgcctgtctgtctcttgtctctccctcatgtctccactctgagacagccattcactctcactgcctcctccaaacctcttacactagatctgtcgcacaacataatttcttagcagcacatcttgacatgggccctgcaaaagtaccctcatctttgctactttaacttatcagcaagcccctttatgctccgagctctcttgctggtccaagtgcttatatttctaacattattattgaacccagatttgggaattgcatactttaggttgcatgcactagaaatcctcccaggccctaacactcgggaaggagtaggtcagcacgcttaatgaggcacccagagacaaagtccaacatagtgtctgtgtagaatcagagctatgagaagtgttcaaataatgaggcattcaccacccaattagacattttagtaacacataaatatctaaagaagacccaggtagtggtggtgcacatctttaatcccagcacttgggggtgtgtgtggggggagggtgttaggcagaggcagggggaatctgtgtttgaagccagcctggtttacagagctgtaatagaactctagtggagccattcattgtatatggcaagttctggagtgacggcttctaggctttgacggatccttttgcacatacgattgctctctgagggttatgcagttgctcttcctgaaggattctcagagcctttgtgtaacagtcctgagacatacctggcagacccagaagtctcatttggctgagaagtgcttaggcaatggttgcttcagacaactcctggatctgataagaggtttgctatgtggaaagtgacttgctaaaagagcctttcctgaaaagcgcccaggtgttcagtcctatagaggctgaatgacgcctcagacgcgaatggtgcgtagccgccaagagtgctttgttctgcagaagtccagcacgctggggtctccctttaccaggacagagagaccctgatgtgagctctcaggcctgatttaaagcacagagaggagtcccagggtaggtgggctttgtcttactctgtctctaaggacatccctttacctgggtgtggaggctgcctggaaactgctgacccattgtccttgcttctggccaggtggtggggcagtttctgactagctgcctgaagcctgagttttaggcctaatctcactgaagcctgtcgtggagtcagcctgtcttgtcagctgaccctttcgctgccgagaaggctaaattcatcctggagtgtctcctctctccaagtacctgggaaccatggaggaaggcttcccattggctgcttcctgggctcccctggacgtggccacccccgtggctgggtccttgaagctcacagagcaatgtcccatagagcaagttgaaactcatgcttccttgttggctctaggtttgtgtcaaatgaacaaaaacaaaaaaatgaaccatcacataggtgattggaggcatttgtcaacttcacaaccaaacagcaaatggcagatgccagaggggaccaggctgccctactcttcaagttttacattatttggcacttctgatactttatcaatgaagagcatatgctcttctgctcagtgagtaaaataatcccagttggaaagataggaaatgcaatgggtgggatcccacattactccactgaggtcatgagtaagtatcacagcactcatggtccaaacagccccctaagagatatttactaatggccactggatggaaattgagctgtttagtgagggccaccagggaaacagaaccgtgtatgtgcatgtgtgagtgctcatgagcatgtgtgagtgctcacgtgcacgtgctgagtcatctctaaagtagtgacgccagcacaagcccaccggagaccccgagacccagatccctatcattgaggctggagacccagcatcacagtagtcccacagtagcgtctctcactggggccaaccggcagttattgagttcacaaggtgtgctgcctcagtagtaccaatctggcaccagaaggttcctggagaaccagccaccggctatgtttggggataccagttccgccatcagccagagggaggccacaggagcagaaggtgagatggtttcccctgacagattctgtctgggctgctaccatcggcatggactgtcctacactggggaaggcagtcagagcatctcttcaggtgtgtcttctgctcaggtgattttaatttgtgacaggttgacatcgaacccagcataatccaagcctagctgcatataaagagttcagtttaagagaccgcagagatgacagctcaaactgaagggaacttgctctcctccggccgtgagatgtgggcttggatcccagcactcatgaaaaagttgtgctttggtgctgcctgcaaccctagttctgagtgggtggacgcatggagatcattggacttgccggctttcagctcagctgagatgcacatgaggcccaggtgcagggagagtctgctagaatatacgggggacccggacaccttcttccagcctctgcgtatgtgcacaggcaaatagccctgcacaggtgtgagcacatctgcacacagaagcttatgcatatacttacaccatgaaaagaaaaatacggggctggcaagatggctcagtgggtaagagcacccgactgctcttccgaaggtcctgagttcaaatcccagaaaccacatggtggctcacaaccatccgtaatgagatctgacgccctcttctggtgtgtctgaagacagctacagtgtacttacatataataaataaataaaaatctttaaaaaaaaaaaaaagaaaaatacactttatgaccgggcagtggtggcgcatgcctttaatcccagcacttgagaggcagaggcaggtggatttctgagttcgaggctagcctggtctacagagtgagttctagaacagccagggctacacagagaaaccttgtctcaaaaaacaaaaaacaaaacaacaacaaaatacactttagggctgggaacgtagtcccatggtggtgatggtgatgtgtttgtttagcacatgcaaaagccctggggttcatccccagcacaccatgcacacacacacacacacacacacacacacacacacacacacactgctcacacaggtgccatgacacctacaacactagtaggactgcatctcttgtgtcaggttgcctcgaacactgtatgtatgtgagtccctttgtagtgtgaccccacactgtgcgtctgctggttttcgaagggtgctgtctcgtgtctctgtaaggaagaggaacaattgaaggtctttcttgactgccagccttctctcccatgggccctctttttttaaaagatttatttatttatttattatgtctaagtacactgtagctgtcttcagacacaccagagaggccgtcagatctcattacagatgtttgtgagccaccatgtggttgctgggatttgaactcaggacctttggaagagcagtcagtgctcttaactgctgagccatctctccaacccttaggcttctttttttttttttaaagatttatttattattatatgtaagtacactgtagctgtcttcagacactccagaagagggcgtcagatctcattactgatggttgtgagccaccatgtggttgctgggatttgaactcaggaccttcggaagagcagtcgggtgctcttacccactgagccatctcaccagcccattaggcttttttttttttttttttaagattttattattacatataagtacaatgtagattacttcagaccagcagagggcatcagatctcatggttgtgagccaccatgtggttgctgggatttgaactcatgactttcggaagagcaagtcagtgctcttacccactgagccatctcgccagcccccattaggcttcttttaaaaatacagaaatattataagaatgtgtctttgtctgtggggggtggggctgcttcggactgtccccagcagctgacaatgatttgcctcgtgctctagcagaggcgtggttttgccagctgcagatagtctctgttattgtgcaatgtttggaattctgggcacttcttggaggacatataaaatgcaagggctccgagaggcagtgtggttggttgatggtcactggcacatggggtggaggggggtgaattagagggttggttgattggttgtttggttttagtttgttagtagttgtgctaaaagaagaaacaagaaaaaaggaattaaattcaggagcctcccccaccctcatataaggaagaacccacaaagtatcaaaaaccacctacaggatattagccaagggagggtttccccttgtcactgctctcctgtgtggaatttcatgcacatctgcaagggtgagaaatgtctgagggctttcccactcggctcatgactgcagggtttttctctccctcacagatgaaatctgtagtttctctctgaggtcctttcctgtctttgagaagattgtagataaatgcaggcttccccacactactgacactcaaggacagacgcggtttctttctgagggatggctggtggatgttcctccacagcccttacactgtgcgtgatatcaatgctcttaggagtgagagacccctgtgatcctgatcccactgctgcactggatggtgagctgtgaaagaagaacgtcgagtggagactttgctgggtcatgaccctgttactcagggtttggggtgggagactttctggtctgggtgacgatttggaacgcatatgaagatgcctccaaactgagcgggatttctgtggcatttctccaccattcagttgatagaatggagaccactgccgtttgcaggatgtcagtcatgatcccgcctcggactctgattggacaaagctgaagtcggtgcttctgattgggcaggtgcccagccccgcctctgattcactacctgtacttagcatctatgattgtcgaggttctccaggttccacccctaacatctgagtgaccaggtcctctagaatgctggtgtggggaaccaggccctgtagtgggaccaagccccagaccaggcagtgggaagacagagacaacagagacatagagacccgagcaattgagtatcttcacttctaccaagttgggcgcagcctgtgacacatggatcttgggtgagtgggttgaccttgactaaccagacacctaggaactcctgggatgtggctcagtgcaagcacggaggacctgagtttgaaacctcagaacccacagaaaaatgttagatctcactgcgcctgcatgagcaagagagttgtgggagatctgtctccaggcctggagtggtcaggaggccagctccagaggtgatggtgtcacaggaatggtttcatccatggatttggccatgttggggtggaatgacttcaaaacaaaataacaaaacaggtccttcaaacttccgttttttggctgggtggggattctaacacacttaggtaaataaaggaggtggggtgggttgggggaacaggactggtgagagggctcagcaggtaaaggtgcttgagccaagcctgatgcccagagttccatgtcctgactccttcaagttgtcagctgacctccacacatgaacctccacacaccacacacacacaaacggaatacataaatgtaacaaaatgtaaaagaatggaagggattttgtatttattgcattgggagcttctgggagcctggggcccttagcacagatgggtgcctggtgggcccttggtggctctgtgtcagggccaggggatgggggggagatgcgtgcagggggcagcaatggtgtgtggagtgtgtgagactgctgctccgggcacatcctgagtcacgagcgggtgtgattggtagagaggcacgtggatccctgggacacggcctcttccacatgtgtgggattccccatgccctgagattccctggaaggacctggacaagggacacagtgagactttgaagaaaggagctgtgttggacatggtgtacctgcccgctgtccctactacagtagaggctgaggcaggcaggctagttccaggccagcctgggctatagcagtgagttccagaccagcctgagcgatctagggagtcctggtctcaaaaaaaaaaaaaaaaaaaaaaaaatctgaaaagacaccagggtgagatatgcaaacctgggctcagtccccagaatataaaaaacaaacaaacaaacaaacaaacaaaaacctcaacatgtgtggttccttcaagttcccctcccgccccacatacccgggtcagctgggggcagcctcggtcttcactcttttggggggcctgtggagtatagggctgttgggcttggacttatacgaaacatgcactgcaccattgagatgcacggggggctcagccttgagtgctactgggcgaggcagaggtggcagggctttgtctagcacgcagggtccatcccaggctggaatctccagccccagatgcttcatgagtctgcacatcacctcatccacgtagccgtggatgcgcaggtcagcctggcggtcctgccaagggagggacagtcagcgtgggctagggggcaccggggcaccgggcagggcactggtacatacatgttttgtgggttgcaggttgacaatgaccagacggcctcctcggcgcttagtggcaaggggcaggttcccactggggcggatctgcagcgaggtacccagggtgacagacaggtctgcggtcctggaacagggagcaggaagtgggtggggcccaggcccacctcaggttccagccctcacgcccacccaccaggcactggagaaacacttgggagctgagattcagtcttggtgtctcactgtaaaccactgtccagttttgggttttgttttttcaagacagggtttctccgagacaggcggatttctgagttcgaggccagcctggtctacaaagtgagttccaggacagccagggtaaccctgtctcgaaaaacaaaaacaaaaaacaaaaaacaaaacaaacaaaagacagggtttctctgtatagtcctggctgtcctagaactcactctgtagaccaggctggcctcgaatttagaactcagaactctgcttgcctctgcctcccaagtgctgggattaaaggcatgcgccaccaccacccggccagttttttaaaaattaacgacaaccaggctgggtggcacaggcctgttgtcctagctattccacaggctgaggcaggaggatcaaaaggttcaagctttgagcgaactgcattcgcattgaattccagcattcagaaggtagacagacctcttgagtctaaggccagtctggtctacacagcagaccttctctcaaaaaaggaaagcaaatattcctgtatggtgaaatgactcaaagctggaggtcagggtggagccccacctagaatgccccagttaggtactggggggcgtggtctgggcggagccccacctagaatgccccagttaggtactgggggcgtggtcaggacgaagcccccacctaaagttcccagttaggtatgggggcgtggtcagggtggggctcttgcctagaatcctccagcgaaggggctgattctgcagagggcttgtttagtgcacacaggcccaggattctccccactaccacaaaaacctgaaagcaggaacgcgaagaaaccttccactcactctgtgtctcagcttctcctctgcacctatggtgcccagggccctgggctgggggtgatggggacaaccctgctgtcccacccgagtttcgaccttctgtggaggtctgcgtagccatccccacccatttccacctggggagtgtggggtcccacctgctggcctcatcagcgagcatcaggtcccggtcaggcaacgagtcctcccagtccagaatggtgtctctcagctcccctctgtggcagtcagggaatggagtcagggggcgcccacctcctcacaggtggagggtgtgaggaaagtcacctacctacaggcccgaagtcccctggtcttggccacggtgcagagccggcctgtggccttgaggcccatggtgcccacaaccgtgtctctgacgtactgcctgtaaagggggaagggtgcacacacattttctaatgttctctcagctggggggtggtgtagccaggctcaacccatgggctactgagcaggacaaacaaccgagggatagacagacagactactcagtctgaaagtgcctggcaagcagactccgggctctgtgtttgagtcatccatggaaaacgaagagcatggtggagcaggattgtcgccccagagcttgggaggctgagctggggaccccaggagttcactggccactcagctaaaccaaagaggtacaggttctgagagcaagtctgcctcaaaacacaagcagagggggctgagccagtgtcagccgctggcatccacacaagggagggtgcgggagggaggaggctaagggaaacatgatggctcgcacctgtgagctcagcacgcaggaagctgaggcaggaggatgccaaatttcaggataacctgggcaactttaatgaagtcctgtctgaataaagaacccctaagagggagtcaggggccaaagctcaggaggcacagtcctgctcaacaccccgaggctctggtgtgcaagccatgttgacacccagcccagagccatagcaaaggcagggcagggagaacccctcattgccaagggcatgaccagcttctcccttggggggctgtgaagaaagggtttgccccatttgtctacgagcctttgttggtctgttttcatctgactgtctctggccttctctaggccatgctaggaccctgagctggcttaggggaggagcagggtcttgtgttacacgggcaacactcacgtcttacacttgggacattcctctacaaacatgtttccgtgcagctctgccagcttgtccctgcagaagaagatgccagtaaggacccttcccagatcctggggcttggaccagctgctcagtctgcctcctcctccagaaagccttcctagggggctcactcacaaggggcgtccacttctctttcctggaggatgtcccagcctgtcccattctgaggaactgttgcatgcatagctgtctgacggtgtcttcacaaactcacaaatacctcctccccactacaaaaaacctgttggctagccgcggcacacccctttaatccctccattgggaggcagaggcaagtggatctctgtgagcctgatctacagggcaagtcccagggtagccaagacatggagaaattctgtcatgtactcgccctctgccgcaacagtcagttggccctaaagcccctgccaacctccccaccccaccccagtgaggggtggaaccctgcctacatccccccaatttgaccaagtactgcccggctttgggctccgagccttccccctctttgcatccctaataaatgcccctgagctagggcaccctggtccaataaggaggaagagatgcaattgagccccagccccccggccgactcatcggacctggggaagcccgagcgcacgtgcagcccgtctacgttctggctgaccaggaagctgaggaagcccatgcgttctagctgaaccagggccatgtgggtcttcgagggccgagcattctcgaaggtggtgtcaaacttgggggccaggccgcgttcctccatggtccacacgccatgggggcctctgaggatagcaagcagaggaggacaggcacagaggtcaaacattcattttccaggctgtgggctcttcctgttaatgctgaagtcagcccatgctggccccagccccgttcttagggtggttctgtatcctgtggtggagacaatgactgccgggtaggcaagaattctaaagagcatgggacgtcttcatgaaagaggcggaggggctgagggtctgggggtaaacaaaggcaggggagctagtggagctggggctgagtactggttaagaccggctgcgggttcccagaatgctttacagtggtcataggctgccaccgaaggttatgggtgagctagtcactccacaacattgagtcattctgaccctagaaaacccagtggctggccgagctgcatgaatacatttcccagcatgccttgcagctactacattatgtgggcatgctctgatccttgggcaagtggagtttttgctgggcctttcagagacataggaaaactgaaaggtccttctgccacctcaccttagtccctagaggtgtatcagcaagagccctgcctcagtttcccctcattgttcaccgacctgaagtcggggatgccagaggcggtgctgatgccggcgcccgtgtggaaaaccacgctggaggactgccacattagccgggccagctcccacaccttgcgttccagctcctctggtgggtcgaagatctgtagggtcagagggcaggaggaggcaacacgtgacctcccaagtggcaggcctcctgtgggtcaatgctctgtctgccccttctcaacatccctcagttccagccacactcttaacacatcgctgtgtcctaccccagggcctttgcacatgccgagccctcttcccagagtgctgttcctgcaggcagccactcctttgtcctggtctggttgtggcccacgtgacctccccactgacgtcatcccccatcctggactttagataacccacctctctcccctaaatcaagatgcagctctacttgtctaggggctccgttaacatgaggcaggcagggcatggtgtcgcaggcctttaacaccagtactcgggaggcagaggcaggaagattcctgtgagttcggggccagcctgggctacaaagagagaaccctccaccctactacaccccttcagaaacaacaaagactgacagccccacactcaggatccatctggcccagattcagggaggagtacagagtggggtacagggatgcccccaggaaagggtgccagcttccggccctgcagatcttcccacagctccaggttttccctgacaattaagacgtccactccctgacctgacgatttggtctcgttcccattagcccctcactccttccctgacccaggttcctccgtgtcacccagcctgagcagtgggtgtcacttcccgccccctccttccagggaagtccctcccattgtctagactctatgtttcatgctgttcccacaatgccccgcttcgcccggccgctccccgtctggggtcattcggtgactcgaacactgcagctctcacctcgggcagcccgcacttgcccttatccgcgtaaggcgacaaccctgctgcataattcaccgacatcgtcgccggcgctgccgcacgggaacaataaagtttcccttgttgaggccgcttccgccggaagtggtgaagggacggtcgggaaagagtagccgccttccctagatacgtgcctgagggtggggtgggtacgtggaggtgaaaaacagcattctttccagagcgcatgcgccctcctgatgcagcaagcttagtcttcagtgctggccgagactacctctctgacttagtggattccccagtcctgggatccgcgaccagagccagaaaagtgatgaggccactcacaggagtcgaggcagggggattgcgagtcccagaccaactccctgtttcaaaagagacaacatcagcaaaacccagaaatgaaaccaaacaaagcaaaacaaaaatccacagttctcagtgtgtagagccctgcccggagtgcttatagcactggcaggaggggacagaaagttcgaagccacgctaggctacatgataccctaacctttgtgactgtcatccagggtctgcctgactctggctacaggagagaatgaatggaaaactggggttcttgggcagaggaaagacctctgggccccctgccaacatttcctgggttagtttctggagtgcacctcccggaatatcacagagcatagggttaggtccacagaactgggcgagttccacgtgttacccagaggtgcccagagatgcaaggagagaggtgaagagccctgcttccgtggccatctagagatgggaggcactatctgaccattctgcctgttggtaatcaacagacacaggagccatgtgatgggtcaatggcagcatataacaaccgaagcctcctgatccccgtggagaccccaagaaaggcttcgaggaggcaggagcacacaaggaggtgggagaggccgtccttggggctgcccatctgagcaagctggctaacagcagcttgtctcctcccttggctcatccgtcccccgctcccccaccccaacctgatcgggtgtcacctctactctgctgctggtggctcgcagctggagcgggtaaccagagaggctgcttggacgctgggttccggtctggagtcgcctgaggtagggggatgtgggtgagggaggccagggaagtctgggtgctggtgaggggtgctacctgcaacagtatgaacacacgcatctgcacacttgtgacaggtgcacacatcccacgcgggagccaaggcccaggcccagtgcgcagcgtcacctgtgctgtgtcacctcttcagaaggcaaacccttaaatccacaggccttccctgccaccttgccgtggcgatttccttcagactggtagcatgtggacaactcttttgggtgttttgtcacccacccttggtggtaggtgtggggtgaaagtgaacctgattagtagaggaggtgggatcagtgaatggatggatggatgggtagatgggtgggtggatgggtgagtgggtagatgggtgggtggatgggtgggtggatgggtgagtgggtaggtgggtgggtggatgggtgagtgggtagatgggtgggtggatgggtgggtgggtagatgggtgggtggatggatggatggatgggtgggtggatgggtagatggatgggtgggtggaactgccctaaatagtgacagttttgaccagactttcttgcaaaacactgactttccagtgtgtctccccctgtagctccattacatatgaacccaggttagaggtacaggaggagacccagcttgggagaacttggaagctccgtttggggaggtagatagttctgtgtgggagagaggcgattttgtgaatagaaatttcacagagaagagtgtttgtgtggtggggagtttatggcatcaatgattgcacaaactccaggttgcagcctgtgtgagctgctgaactagtgctgctggttgtgatgcacgctcagccccacttcaggggactgcctggacaaggaggaattatctctgtttacagttgaggacagttccttcagagggtgcaagtagcctgaacttggacacacagcagatttgcccaggctgtgttgtgaggacagtgtggctgaccaccccagcatcctgtccctcacccgacccacgccttgtccagaaacaagacgagagcccctagcaggtgtgatgaagaccctccgggcacgattcaagaaaacagaggtgagtcttcaggcttggaggactgctcagtcctccctgctgtggctcagaacccaccagtcctttaggctccacctgatcccctatccgctgttcccccagctgctgcagcaggtcagctactccagcaggtcagctgctccagcaggtccctggttcagttttctggatcaaatgctgattgcccacgtaggttcactgagtcccactcatggttcagttctgctcacccaccccccactcagggtctcagtggttactggggcaacccttcctcctttgcacatgctggcaaggtgtcaccgagatacccccaaactcttcctgcccccgttttcattttcatcgtcgtccgaatttagtgattcctgagggattcccaagtgctctgctctgtgagccctggtcttttgctcactatgattcttcaaggaatgaacttatgtgcatttgagagaggaaggatggctcagagaggtggtagaagctcctcaaagccacacagcagggaagcgatatgcctgtctccattagaagatggagataggtatcaatgggtgtgacctgcagggggaatggggagggaagggctgggaggggggggaggaagcaagagatccagagagccagagagagcaagggagagcatgagagagagagagagagagagagagagagagagagagagagagagaactgttgctttcctagacagtaaagctagactagttggaaaccaagtcattgcacatgctgaagaatgggctggcaaaatggctcagcggggccaggtgtggtggcgcacgcttttaatcccagcacttgagaggcagaggcaggcaaatttctgagtttaaggccagcctggcctacagagtgagttccaggacagccaaggctacacagagaaaccctgtctcgaaaaacaaaacaaacaaacaaaaaaaaatcaagatggctcagcagggaagggtacttgcagctgaactctggtcctctgtgatagcagccattgatctaactgctaagccatctctcctgagtttgattctcagagcccacatggtggagggagaaaaatgaccccacaaggttgtcctctgacctctgcctccatgcatgtgtgcatgtacacacctaaatgcaactttaaaaaaactctttaaaaaaaaaagatttatttacacggtagctgtcttcagacacaccagaaaaggttatcgggtcccattacagatggttgtgagccaccctgtggctgctgggagttgaactcaggattctggaagagcaaccagtgcacttaactgctgagccgtctctgcagtccctataaatgcaatttttaagttaaggaaaaatagtttttgaaagcttaatcaggccagctgtgatagctaaagcctttaatcctagcagaggcagctggatctccgagttctaggccagcctggtctacagagtgagtttcaggatagccagggctactatacagggaaaccctctgtggaaaaaacactcacctacttaaaaagctgaattatttcaaaatcttgcagcctacccacccttggcaagagacacttagcttggaatgtgggtgtattttggtggggcttcgaagaaggggcagcaacagagtagggaggggtgggtccctggtgctggaccagcctgggcagcagatgggaggcctggtcggcccctccccgccgggaacctgtctgccaccctcacccttctctggtttccccatagcagccagggtgaagcttggcttttgtctctgcagcccctagggaagaaagtgaacactcatggctgcctggaggccccttggtgccctgggcctctgggtcctctcctgctgtggccaagtgccaggctgcagccctgcagatgttagctcaggctgagctcattcccaaggtgtcctcaaggttccagcaggggctcagtgggctctgggccccagattctcttgtgtggaatggggactactttatctggggcacccttgctgacattctgaccttattggaggaaaatccctccaggcagtgatggaggcttatacagttttggaagtgggaaccctggctggccttgaatcacagtctttcctcttcagtctcctagtattgcgatcatgggttgtacagtcacatcgggctcaaagcattctttctcccttttttgtttgtttgttctgtgtagccctggctctcatagaacttgctctgtagaccaggctgccctcaaagtcacagagatctgtctgcctctgcctctcaagtcctggattaaaggtgagagccactgtgtctggctcagtattctctctctctctctttaaaggtggcacatgtgtgtgtgtgcgcgggtgtgtgtacatgtatgtagatatgtatgtgtgtatgtatatgtgtgtctctatatatgtgcctatatacatgtgcatatatgcatatgtatatatatgtatctatatgtgtatatatttatatatacatgtgtatatatgtacacatattctaggactctctgcagagagggacacaccagtatctagagtgttatgggacacagaggcaggagttgcttattgtttattagggagaccatatctccacctgtgcaaggcaatttcatgaacgactcacttctccccaagttctgcctctctgggattctcatcccacagctcctgtcgtgtgtccctgcctgctgctccgtctccaagacagcttctacagtgccaacttacatgcacagaagccagagagctagaaagtcattccgcagtcacttgataaatgtagaacagaagagtctcaggctgtggcccagggatattttgtgggtcctgcatagagggctctaatttcaggcaaggcagacaagtgcccacacaccttagagccagaaacgggggttgcaacccccacttccagttgatctaaagattcctctgacccagcctggaagctgtgcacaggtccagatgcatgtgcctgaagaatgaaatgcagttcttattgtgtactcatggtgtaccaggcctgttgtgcagggcggtgcgttctgctcagcctctgcacggccctccggagctgtgtctggaaagtctatgtgaaaccccattgcacatatgaggagggcggaggctccaacaggtgaggtctaggtcagtcccataggtggataatggcgaggcagacctgggattcaagtttggagtgagacttgagagctactggagcgaagtaaataatgaaagagtagatgggtggacaggtaggttggaggagtgaatgggtgagaggatgtgtgcgtgaatgaagggatgagtaagccaatgcatttgcccatgaaaagacgttagtaaatgggtggtgaggaaattaatgagcgaatgggtgaatgaaaacattagcaaagtgcgaataatgactgttggagagagtgaatgtgtgaaacgatggatgaacgaatgaatgaatgaaaagataggcataaatgtatgaatgaatgaagactggaaggtgatggctgaatgaatgatgtccatcattgtaagtaaggtgagctggaggtgaggagttagcgggctgacacccgatagggaccatcatggagttgcggggcggagccttttcagcgggatggagcgtgtcggtgcaggagtggggtggtggggaagagagcactatatagcagcgggcgagcgggcctggggaaaatgggagtaacctggaacttagaacggatgtgagcgggccctgagctttcgtggaagaggtgggaggggcctgaaatctagggggaagctgggcgggctctgtgcctgagcctggtgaggaagggtgctgagtctggagaagaggtgtgccacaggaggagggcagagccccgtgtctgaggaggtaggcgtggtctgatctggccccgccctcctgcggttcgccatgaagcagctgtgcctgtgtgctgctgcctccttcgcggtaggcgtttgggtccctctgcgccttcccctctttcctagaaagaagttcggcagagggcggggcgcctgtagagcctgggcgggaagtggagggcggtgttgagggcaggcgtgtctgtgcaggcgtggggtcagcaggccgttgcgggatgcaggtcttggaggacactgtggacagtgagtgactcaggaactgtccatgttcctgggcagtgagtttaaaaacattagcggctgcagttctgctggccaggccttgatgctacctgggggcgatggtcttggctgagcagctgtgaaggacggagcgaggttctgggcgctggaggatagtttggaaaaggccagtcatcccagcattcggaggctaaggcaggggatctttaattttagttacacccagtctcaaaaaaactaagacagtaaaataattgtgaacgaggagcttggcaccaccaagccctggcttccatgcccagcactacataaaccaggtgtgatgttccacacctgtcaccccagcctcgaggactgggaggcaggaagttcaggaattcaaggtcatcctgactcccagggagtttgacagcagcctaggctacttgaggccctgactcaaaaaacaaaaacaaagctggatcattgaaatcctcgcactttgggagatttctgtgactttcaggctaccctggtctacataagagacatgctatttaaaaaaaaaaaaaaaaaaaaaaaaagttgtaccctgtctttcaaaactggctttggattaaggcacacacaggtggtttgaggaggattgatatctggaagctgccctggtggtgggcctggatcacacgctggggggtgcaggtttcagagacactgtctgaggcccccagcccaggaccacctatcccacagctccggctcagccccaccgacctcagctcctgcccaccctgtggccggtgccctatcccaaaacccgcagccagaggcaggcgccaggcaagtgctcaggggtgggtggggagagcccggagcaactgcccctgttccttggtggggaaaggacatcgacccactcagtccctcgcacctctgggtgtgccaccgcagggccaagactggggcaaaagtgaccagcgactgctccaggcagtggagaacaacgatgtggccagagtggcctcgttgatcgcccacaaggggctggtgcctacaaaactggaccccgagggcaagtctgcgtgagtgtccaagccctggggctggggtggctttggacattcttctggggttgacccctgactcgtgcctctaggttccacttagcagccatgaggggtgcggcggggtgtctggaagtgatgctggctcaaggtgccgatgtcatgagcacggatggagcaggtacttatggaaggaccgtccctgggtggatggcagggctgcatcagctgtgcagagcagggaccacaggtccaactgtggaagctcactgtccacagtgggagctcactgtccacagtggggctgtagctcagtaggtaggacattcaccaaacatgagggaaatcctaaggtctgtcctctgaactgctggcgcacacctgccatcccagcacttgtgtggaagtacgaggatcgggagttcaaggcgatcctcagctacatatgaactggagaccaacctgggctatatgagaacctgttaaaaataaaagtaaaagacccctttgatcgccgcaccagatggcagagagatcctgtgagttttaggatttttaaattatttcaaaaacaaagatagcaaatgaatatagcaataaaaagccctctgggaacagcacagttttaagaagtagctgagtttggacattcaggcttgggaggcagctgagaatacctggaggacacgcctcttctcttctcccctcaggttacaatgcccttcacctggcagccaagtacgggcacccagagtgtctgaagcaactcttggaggtcctgatgtccattccctgtctatactgaattccagctatttctccaaaccccagctgctcctggtccccagccctgccttgcccctttgttacagccatcaaagtagggctatccggagggctggaacatgggttctcagcagaggaagatggtagaggggagaaaaagagcctgaggggctggagagatataatgaatctgccaggcacggtggcacacgcctttaatcccagcaattgggaggtagaggcaggcggatttttgagttcgaggccagcctggtctacaaagcccaggacagccagggctatacagagaaaccctgtctcgaaaaacaaaaacaaaacaaaacaaaacataatgaatctgtgggtctcatttgcctcaagcttgatctttgttccctgggacgcacatggaaggaaagagcaacctcccacaggttatcctccactctcagcagtgtgccctgccatatgtgagcatgcacacacagaaagaaggccatagagagttacaggaaagaccctgagataaagcagggagcaggggagggcaggagaaatcagtcactccggaaacagagatgacatcacctgtcactccttcccaggcttcctgcgtggtggacatcgaggacagcagtgggtggacagcccttcaccatgcaggtaggtgcagctagattctcccgaattcaaggaaggccctctaccaacgagctacatccacagccctcactagggaactctaggtggggctcctccctgaccacgcccccagcccctcagaccacgccccccagcccctcactgggattctaacagggactctaccctgaccacgcccttagtttttaaagaatctgtgttcatgtgtccctgcgtgtggcctgtggaagtcaaagacaatcttaaggtgtcatcatcaggtaccctccacaccctctgagacagggtctctctctgaaactggtcttcacgattaaagctaggttggctgaccagtgaaccttggatccccctgcctctgccttcctggtgctggggtcacagacatgcactcccatacctgacttatgtgagttttgggaataaggcgcaggtcctcagacttcctagccctctcagtatgttgacatagagtctctctctgtagcctaggcttaaccttgaagtcagggttctactgcctccgcctctgggtttttgggtgacagatgtgggccactgtccctatctgctttgcttcttttgacctgaatgcagtccccaacagaaccaggcccttttgcccattgcacaaagaagttaggcacatgtactagtgggggaaccctattccttggaccccaaagcctagtccctgggtgtacaaagtggggtgcctagaaccctaattccctccagggtctcctgggtgccttgattgcagataggtcctccagcacacccctcaaacccagactccatcctcagagcaattaaggacttactggagccagtgagcacagggtccaggttagagccacctgtccccagggacggcacacttgaatttactttaggggtaaggtaattagccactaattccccagtcagagtggcaccaccaggtggtgtcgatgccaataggggatatcttaacaattaagttgcatttattcatttattgtgaggttagggacatccttgtcatggtgcttgtgtgacagtcagaaggtgacttttaggagttgtttgtctctccaccggctggctcctggatgttgaactcaggtcacttggcagcaagcacttttaccaactgagccatctttgagacccattttttaataagttgtttttatttgattttacatttttgtgaaaaaatattttaaaaatgtgtatgagtgtggtttggttgcatgcatggctgtgttccatataagtgcctggtaccatcagaggccaaaaaggggtgtcagatccctggaacttttacatacatgagctgccatgtgggtgttgggaattgaaactgagtcctctgtgggagtagccagtgctctgttgagccatcattccagctctgaggttttagttgaggtatggtctcaatctgtagcccaggctggcccctaacttgcagccatcttccatcctgggccttccagctgctgggatgacaaatgttaactgctataatgtatagtgagttctaggccagcctaggttacagactaagacactgtctcagcaataaaattatagtgttcttggcaggcagctgtctctcccacctactcttcttttttcttgtctgtcccagcggctggtggttgtctgtcctgctcaaagctgctctgttcctttaaggcacacatgaacccccgggaccgggtgagctgctggggtctcattgggtgggaggtacagtgttatccttatgatagatgctcaccatgggcaacaccccaggcatcatctgcaaagcacgggtgagactcatgccatttcatcctctctaccagtcgggtgccacacccctcatcatagcggctcagatgtgtcacacagatctgtgccgcctcctcctacagcagggggctgccacaaatgaccaggacctgcaaggcaggtgagcacttcccctctagacctttccatcatatgctgcatgatttggggcaaatatcttgacctctttaagctggtgacctagtcacctcttcctcccttctcttcctggcctgggtacaaagacagttgtatggtgttggggacaagcctctgtcccctcagcagctcctttatcccacaggacagccttgatgctggcatgtgaggggggcagccctgagactgttgaagtactcctgcagggtggagcccagttgagcatcactgatgcactgggccaggatgccactcactacggagccctgactggagacaaactcatcttgcagcttctacacgagtctgcacggcgctcttcacctcccagtggtatgcaagccctacccttgctctcctaggcagtttctggccatctccttatatgttactgatagtttcgaggtactccagtctgctgtcatgaacattttcatgcttcttaactcagggcagtttcaagaagcctcagtggtctgaggatccactgtgattttctgggtcatccttagtatagagactctgcctttcctaagaggtggcaccccacccacccactccaacctggagctccagtgccctgagtctctgagagattaaaggttctccccacccaggactctacccataggtctctctaccttactgtcccttattcagaggctggactttgtggtgcctgactaggagaccagagcagttagatctgagtttgtggttagcctgaggtacagagcgagactcacagtatgaacaaaagaagcactaatgctttggaagctttgagagcctgtggaataccttgggttggccagtgacctttctgagaactgagaactgtgtgctgagaactgggaactgtgtgcccgactgtttcccctctctccccagcctctctagaggaggactccggagaggcctcatcccaggtaggaatccggaatccgtgaacgtccccagtgctatgcaccactcactgtcccctgacctacaggaagagacagacctctatgtacagagttctgtcatggcccctatccaggatctgtccctgctcagtggcagtgacacgaacaccagcagtcctgcacactagggacagtggatctgggacaggtgactgaggactggggttgctaagggctgcttcaggcagagcaagagcgggcctggccactttccacattcctgcc

SEQ ID NO: 85 - DNA, 54859 bp, Homo sapiens
gtgtggaccagtcccggacagatgctgggtggttgtggtgggtgagactggagaaaagcagataagtggagaggcattttggagataaaatggataggctttggggctggtaggataaggggtaagggagaggtttgttgtccttggtttctggttgtgatcactggatggtgaggagtgagctttctgagcgtggagctctggaggaaaagcctgtttgggagtgttagaggagtttgaaccagagcaactccatcttgaataggggctgggtaaaatgaggctgagacctactggctgcattcccagagggttaaggcattctaagtcacaggatgagataggaggtcggcacaagatacaggtcaaaaataccttgctgataaaacaggttgcagtagagaagctggccaaaatccaccaagatggcgacaagagtgacctctggtcatcctcactgttacactcccaccagcgccatgacagtttgcagattccaggtaatgtcaggaaattaccctatatggtctaaaaaaaggggacacatgaataatccacgccttgtttagcatgtcattaagaaataaccataaaaatgggcaaccagcagcccttggggctgctctgtctatggagtagctgttcttttattcctttacttacttttttttttttttttttttgagatggagtcttgctctgtcacccaggctggagtgcagtggcgcgatctcagctcactgcaacctctgccacccaggttcaagcgattctcctgcctcagcctcccgagtagctgggactgcaggcgtgtgccaccatgcccgcctagtttttcattttctttttagtagagacagggtgtcaccgtgttagctaggatggtctccatctcctgacctggtgatccgcccgcctccgcctcccaaagtgctgggataacagacgtgagtcatcgtgccctgccatttctttactttcttaataaacttgctttcactttgcactgtggacttgccctgaattctttcttatgcgagatccaaagaactctctcttgtggtctggctcgggaccactttcttgtaacaggaggaagatggcctatctgggacctaatgagctcagggtgcctttgagatattgaccaggcaagtgggactggagagcaaagcagagacctaattttttttttttttttttgagatggagtctcactctgtcacccaggctggagtgcagtggcgcgatctcggctcactgcaacctccgcctcccaggttcaagcgattctcctgcctcagcctcccaagtagctgggactacaggcacgtgctaccacacccagctaatttgttgtatttttagtagagatggcgtttcaccatgttggccaggatggtctcgatctcctgaccctgtgatgctcctgcctcggcctcccaaagtgctgggattacaggcgtgagccatcgcgccgagccgaggcctgttcatgttctgcctctttggctgtaatggtggctgcctatgagaggcatgggtggctggcagcccaggtagaaggaagccttatctttttcttcctccccttttgtattcttggaattgtgtaccattgtgcatgcattgcctattcaaaaatcaataaaatagaaaaagcaaagaaaaagtaccaaataagatggactgaagatggagactctctgggctatgtaacgtttataatcccttctggcttgaacctcattttactgcatttctccagatttttcctttatggtctaccagactctaacaatgctaaataacatcatcttcccccaactttgaaagccttcaaaagaaatgtttatgggatagagggggatcaaaactaaattgggcacagcagaatcctgcccactgggtaactcctctccatgaaaatgaatccctcttcacttcctccttgtatctcataattaccaggggagatatctccaggacacaggaaaatatgtatgactcatagtagtactagaaaagaactaaaaacacttacattgtttcctcacttatccctctcttattccaacagggaaaagatttccctaggtttatttgtttgtttttaaactcagacgctagccttacctctttgacagagttctaactggtccttataaaacccacacaaggggccgggcatggtggctcatggctgtaatcccatcactttgggagaccgaggcgggcggatcacttgaggtcacttgaggttcgagaccaacttgaccagcatggtgaaaccccgtttctactaaaaatacaaaaattagccaagtgtggtggtgcacactgtaatcccagccactcaggaggctgaggcaggagaatcgcttgaatctgggaggcggaggttgcggtgagtcacgatcctgccacagcactccagcctgcgtgacagagcgagactctgtctcaaaaaactgaaaacaaaaaacccccacacaaacaaaatcccagccactagaaaaagtagcttccttcttcattaccctatcacttggacaattatctcctctaaaaattcatttcctaggcacggaagattaggcaaaatgtgcttattgggcagctaggacctcagaatccatgataatatgataattagcatctgtataccacttggtttacatagcactggggctcttgtggtgtgaacgtctcctcccagcaaccccaccgtgaggactttgttcttggagcctcacgctgagtctggcacacagaagacacaagacattgttaattcagtgtttgttgtatgaggaaggtagacagactggaaacagacttccctaaggtcttatagctagcaatggcagaaaagtctattgaatcctaaagccgagctgagggcctttctattctcctaggtctgcgttgggagaatgagcaagatgccttggccctcactccttcggtgggtcccagcacgtgccaggggcagcatgtgcggtcacctgtatgacccctttgctctagtcccaattccctactacagataaaacatcattcacccctccgcaggctttctgttctgaatcacgattaccagcatgtctcatagctcagatcctaaccagcacttactaggcagaattcagcacttaagtgacccattaaggacttttggcagaggaatgggaaagataaaaataggaaaaaaatcagaaaacagaaaaggataatttggtagcccaatgtgaccaggaacttggagctgcccagttgagtggctggaagctggaatgaagaacttgtctgcaacatggccagtgagaaataacaccaggacccatcagggtccatctgggttaggctcaacactgatttccttgctttgctgtctttaaaatcaattttttagtacctgtagggatcagccaactgtatgtctcaccgtctatacgataatggcaaataataattttttgttgttggcatttgagagcattatttaagtacccccattactgaggcatctcagccaacttccctgctgagggtacttcccttccacttgtcttaaaactggcacaacttcctaacatgaaccagtttgactcaagtaaggcctgctcttgatctgaggggtggagatcgtggcgatctctatagttatttgaggagaaacttctctgtaaccgtagacgatctagtgtttttcctccaatgttttctacagagaaaactgccttctgagggagatgccctcccagaccacccactgcagggacctcactttcatcactgacttcctatggcttgggagtgtttataaagttatacacttaagtgataagtgtggcttgggtattgaaaagttagctcaaagaaaacaaaatttcgttccttttttttctgtcacttaggctggagagcagtggtgcagtcttagctcactgcagcctctacctcagggtctcaagtgatcctcccacctcagcctccagagtagctgggactacaggcacgcaccaccacccccagctaatttttgtattattattattattattattattattattattgagatagaatctctctctgtcacccaggctggagtgcagtggcgcagtctgggctcactgcaacctctgcctcccgggttcaagcgattctcctgcctcagcctcctgagtagctggaattacaggtgccagccaccacgcccagctaatttttgtatatttagtagagacagggtttcaccatgttggtcaggctggtctcgaactcttgacctcaggtgatccacctgcctcagcctcccaaagtgctgggattacaggcgtgagccaccacgcttggccataatttttgtattttttgtagggacgagttcccactatgttgcccaggctggtctccaactcctgggctcaggcagtcctcccacctcagctgtccaaagtgctgggattacaggcgtgagccatcacaccaggcattgttccaggtgtggtggctcatatttgtaatcctttcttttttttttttctttttgataggacaattaggactctgatcacctttgcctggctagtcaactcagctaatctagtctaaaatatttcttcctttgggaaaccttttgaggcctctcccagacagaatgagtcccttgactttctgttcttagagccagtgcctccattcttgctgctggggtaacactgatcccatttcatgagagtttgtggctctcctagactgtggacttcttgagggcaaaggctgattaatcctcacatttataaccctcagaggtctctcctggatcctgactccaatcagctctgaatcagtgctggctaaatgaattgaaaatcatgtgaacacgtttctgttccaaaaagcaaagctctcattttctcagattgggcaggctccttcctgtgcctgtgtcatcctgacagccgtatttatctttttttttttgagatggagtctcactctgtcgcccaggctagagtgcagtgtggtgatctcagctcactgcaccctcggcctcctgggttcaagtgattctcctgcctcagcctcccaagtagctgggattacaggagcatgccaccacgcctggctaatttttttgtatttttagtagaaatggagtttcaccatgttggccaggctggtctcaaactcctgacctcaagtgatctgcccgccttggcctcccaaagtcctgggattacaggcgtgagccactgcgcccggccctgacagcagtatttattaggctgtccatcccaggttaggacttgcacctgactgatatctggaatgacttttgattaggatgggcatgtttcctcgctgactctggccaggctcatgacgaagcagcctccacccttgctgtctgggatgagacattggcctctgttgttaccagcctcttcctgtagcaactgcctcacagagagagaagctgtctatagcatcatttccacgtgggaccttgccaacttgtccttttctacaaggacatcagaacaacgaatttcaggaaatgagaaaagcaagcagagatttgaaaacaatttaaatctgtttatttttgaataagtaacacattcacacggttcacaattcaaaaggtacaaaattatacagagtaaaattcccctcccagttctgttcttcagctgtccaggggccctccttggaggaaacggcatctaaatgtgactgtagatttgaatgtctctattgtcctcactctttaccttttctggatgtttctcatctcctccatagcaacattcatttcatcctgcccccattccaatccctgatacctagttgcatgctctggataggcacctggcaaatgttggggatcagctgacagcttgtctgtaatccaagaatatttgtggagtccgggcttatagtatttttgtttgatagtgaattagatgcattttcattcacttatgttcctgttcttccaagagaagccaagaagcgttgattgtcccatcagccttccttgtactgtcttcttttcataagccatcacttccatttgtattgttgccagttgtgcatggtttagggctcactcacacatttttcaggggatgattgtgcaagaaatgttgatgttttccagtacttttttggtctcctcaatggtttcttcttttggcttgtgcaagaaaaaaatctttacccctgtcctcactcccatcaacacacatccatacatgctttggggcctctctctgcccttctcttctggaatccactgacaatgagcaaagaactgaaaggcagaatcctgtcttctctagacaggcacttttcagcttttacttatcattgttttgaggtgtcaagagttttggagatttttttcccctcctctttctctctcaagtcaggcccctccagaagcctgcctctccccttggcaggtgtggagaattcacctgctttttcggtcacttcctgtgcactctactgccttccctggctgctcagaaaacatgggccttggagcaacttccctcgacttcctctctcctctagattcctagccagcagccggtcaagaggcagccccacagtcctctgggcggcagtggccggtgattaagtagccaggtctttagctgattccatccttgtttgtcataactctgctgcaagttattttggtctctgtgacttgtggcggcaccatgattagggtttgattactatcaccaaagcgactaaaagatgaaaatagaagccacaacaggaaataaacaactgcaaatgagctattttattccatattccctgccagcaaatgattagaatcaaactcattcacaatagtttggtgaactcttaaacttttttcttaagggtcagaatagtctgaaactgcgtgtttgttggcctcctttgtgcctgtggaagggaaagaaagaaactacctttctaggcacaccagcctgctgggaattcctctactgccaggcttctggcttctttcttggagaggagagggataagaatgtgatggggtggggctatcaggaaagctgggatgttaactgattcaggggatgccagggagctataaagcagcaccaatcattgtagctacttgctcagcaccgcacccagcttctacctagggtagcaaaatggaagaggaaagccgtgtagagaggggtgacacctgaattaatacacctacaattacactatacgggaacatatctctgcaagtacatgcatgttccacccagacaaaccgtgacgtcagactccactcttgaaacacccatgaaacctacctgccctgtgtgtgctccggcctctcattacagagccttagcactactggccagatctccaaaagattcttcagattctccatttagccaagaaactgaattagaattatgacctctactttctctgcttatttaagtcctttctgttgctatgaagcctggtctgaccactctcaataagtgaagatcttttagggagatccagaacagagagggaatgggaccctagagagcggaaacttgcccagaaaatcttataaactctgccaagtgctcgcctaacgtggggattgctgttggccctagttgcttaaccagtgagcggcaacgccccagcctggaatcaggttttctgacctctagtctggtactctttctaagcctttctaaggtgaaaatatgatacatttcccagacaccttaaaaatcccatttctgggccgggcgctgtggctcatgcctgttatcccacactttgggaggctgaggcgggtggatcgcctgagctcaggagttcgagactagcctgggcaacacggtgaaaccttgtctctgctaaaatacaaaaaaattagcgaggtgtggagtgcacgtgtagttccagctactagggaggctgaggcaggagaattgcttgaacccaggaggcggaggttgcagtgagctgagatcatgccactgccctctaggctgggtgacaaagcaaggctccatctcaaaaaaaaaaaaaaaaaaaaaaatcccacttctgtctctttcgtcttcccttgcctatcatgataggcctcccaaagtgctgggattacactccttctccattctctcctgtgctttctcagctgctgtcttcacaggttgcttcttagaatgtttttttaatacacacacaaggtttcaatgcccttttatacaagccatattttaatttacaacaaaattatgatgttatacaactgcagcttatgtggccttacacagtaaatgttcagaatggcagcttctgtccgtccagtagggttctgcactgcttggcatcctactatcttccaagtcaataagtgttaggatctccttgcctggaaatgatcatgtaagcaatgttgctgatttcctcttgaatttatattaccaaaggtacttttggtggggtggaggaagggtccaaatgccccttaagccctaagtgttgatttctaaatatttattaagcatctactattgtactaatatgttagaaatctttttaattgctagagggggagaggacttgagctctaaaggcggctaagattcattcctgccttttccttttaagaacatataatttagccggcaagatgtacatttcatctttacttttctttttttcttttctttttttgagacagagtctcactctgttgcccaggatggagtgcagtggcgcgatctcagctcactgcaacctccgtctcccgggttcaagcaattctcctgtctcagctgggattactggcgcgcgccacccgcctggctaatttttgtatttttagtagagacgggtttcaccatgttggccaggctggtctcaaactcttgacctcaggtgatccacctgcctcagcctcccaaagtgctgggattacaagcgtgagccatcgcacctgggcacatttcaccttttctaaagattattttaaggccaggtgcagtggctcacgcctgtactcccagtactttgagaggctgaggcaggtagatcacttgaggtcaggagttccacatcagcctggccaacatggttaaaccgcgtcactaccaaaaaatacaaaaattagccagatgtggtggcgcgcgcctgtagtcccagctactccggaggctgaggtgggagaatcgtttgatctggggaggcagaggctgcagtgagccgaaatcgagccactggactctagcccgggtgaagagtgagactctaaaaaaaaaaaaaaaaagaaagaaagaaagaaaaaaagattctttaaagcccccaacgagtttcactgctggcctgatctcacaattctcaatggctttttaaaaaaatcgtatttcactgaatatgaagtgaggttagatcaccatgccaactagtggcctcatcaatactgatgtgtgtgtatttaaatcattacgtttctcggagccatcagctttcacgctgtaaatgcgtttatgccctagcaatgccatgcccgtttctatgcagtaacccgccagcttgggtatatgtttcttcgggacctggggtcaaggaataaactctctgactctaagcaccttgaaagctacgaggcccagaaacagggcctgcatgcaaatgaatgccctaggcaggtctgctcgctgggtaaccttcccgcgccgggaggcagggtggcgggtggcggaggtcttccgggcccgggaggaaacctgcccgcggcgcgcaggcgagcccccacccccgctccccttctcccgccgggatgctgcccctcacagctcgtcagccggccaaatgcattccagagctgtgcacaagacacacttctccaggcagtcctagaaaccggagcccggagctgagagggcgggagggagcgcgcggccgccgctgaggtcatattcacgccgcctccccgccctcggcggctgttcccctcagcgcacacttcccagggcctcggtccagtccggtataaatgtcttttaaaccgagacagcgctctcctccccttgccctcgggcgcggccaagggatccaccgccagggcctttaaaacaaaaccaatgaatgaagcgctagggcgagcgcgcgcgagatggccaccgcgaaacccagccgggtcgaaatcgggccaccgacccgctcgctcagctccaaaactcgcggcgaagcccgctcggtgctccctgcttttccaatttctccatggctccggccggggctcaatccattctgggagcttctctgccccccacctatctctctcccctccatcggtaccccctctacagacccgggagggggtggcggtggcggggggttggggggagaaatagcttttagaaacccgatctgttgtttgcgaaacacaatcgctttttttttttttttaaagcgacagggtgtctagacggccacgtgacgaggccggagccgggcgcgccactgcgcagtggaaccagccgagcagagggccggagggggggtgcgggggggcggggaggaggcggcgcggctgcggcggctgggggcgggggagggaagggggaggaagggggagggaagggggcgggggcgggaggccttgcgggaggcggtgagccccgggcacactcgcttgctgctcggcgcacggaagatcctgtccccgagccgcgccagccgagccagccgggcgccgtgctcggtccgctcgccgcgcgggagagagctgcccgagacagagccagtccgtcggcgccgagccgccgagcgcccggcccctgagcccctgagtgcggcgcggcgagcccctggcggcggcagaaggaccggagcgccaggagagggcggaccggggacaaggaggctcccgggcgcgacgaggagagtctcggaggaggaggcgccgagaggacaccggggcctcctgccgccgcagctgggtcgaggcgagcagcccatgcggggagcctcggcggccagccgcggccaggggaagggacatcggcggcccctgcactagcaagcagcttgtgcccggggggggcgagaacgcgcgacccgtctggggccctccgccgccgccgcgccaccctcccccgcgctgtcagccccgccgggctcagccgccgccgcagcatcttctgcccctgcgcccgcgccagcctcgaggaagtccccgccgaggacctgggcccccaggagcgcagggggaaagaccagagactcccctaaaccacccagatgcgcaggattgaagcggtctagccaaagctttctgtggattaaaaaaatacacgatttttttttttttttttggcagaagaaaaggagaggaagaccagcggggctttgcaaggaaacggggggatgtaactcgtggatacatttttccacccatcaaacatcttgttatactttgtaaacattttctttttttaaaccccagttccagccggacgcccccagacctctgaggttcgaggaggtggtggttttcatttggggctttgcatatttggttgttaggttttgcgagagccttcttattttgccagacgtctcatgcggggtgaagtccactcggccccctcccctgagtcttcgtgtgcgcggaattcgaggagatccggttactaaggatatagaggaaaaaaataaatcgcttgcttttttttttttaattgcctgcttctccccacccccaaattaagttgcttagcaagggggaaagaggctttttccttcttccaacagcccagccgaacgcctttcgttttttgcccccgcggaccttccatgtaggaagccgaggctggcgagcccgacattcgggagccactgcgggggggcctctttttggggaggcgccgacgggggcaggctcggccgtccccagggaagcggcggccgggttcctccggggcgcgccggggccggagagccgcgcagggcgcgggccgcgcggggtggggcagccggagcgcaggcccccgatccccggcgggcgcccccgggcccccgcgcgcgccccggcctccgggagactggcgcatgccacggagcgcccctcgggccgccgccgctcctgcccgggcccctgctgctgctgctgtcgcctgcgcctgctgccccaactcggcgcccgacttcttcatggtgtgcggaggtcatgttcgctccttagcaggcaaacgacttttctcctcgcctcctcgccccgcatgttcaggaccaaacgatctgcgctcgtccggcgtctctggaggagccgtgcgcccggcggcgaggacgaggaggagggcgcagggggaggtggaggaggaggcgagctgcggggagaaggggcgacggacagccgagcgcatggggccggtggcggcggcccgggcagggctggatgctgcctgggcaaggcggtgcgaggtgccaaaggtcaccaccatccccacccgccagccgcgggcgccggcgcggccgggggcgccgaggcggatctgaaggcgctcacgcactcggtgctcaagaaactgaaggagcggcagctggagctgctgctccaggccgtggagtcccgcggcgggacgcgcaccgcgtgcctcctgctgcccggccgcctggactgcaggctgggcccgggggcgcccgccggcgcgcagcctgcgcagccgccctcgtcctactcgctccccctcctgctgtgcaaagtgttcaggtggccggatctcaggcattcctcggaagtcaagaggctgtgttgctgtgaatcttacgggaagatcaaccccgagctggtgtgctgcaacccccatcaccttagccgactctgcgaactaggtgagaagttgtccccctacccccaacattttccggagcgccagtgctggaagaaaagcccctagggcagtgcgtttgtgcagccatccctccagggggagtgtgcataccctcctgggagagtgtgcataccctcctgggagagtgtgcataccctcctgggaagagactgggggctgaaagtagagaagggacaaggggaaactcaaagggcattccctgggggttcccttccaggttttctcctgtgttgccccgaaggggtctacgggcactgctcctgcagtctgcggttaaaaattagacgccttcatttccggatcaacaagggggtgcagagggaggtgggggggtcacgcctccccgcacccggaaagacgttgaggtgtgtggccgagttggatttggtccaggcccgccaaggaaggctgggagaggcgtgctataaaggctggaaggtctccgtatttactcctttagtaaatacggagaatcacgtcgaacaccagtggcccagatactgtcgtggccgcgcacctttggagttttggggcaaagagagttggatggaaggccgaactgggtatctgtctcctttcaactctgccagccccagggtgcagaggaacaaacaggcaggagaagttgggtgtcccctactttttccttccttccgcacagataagtctgtagattagtggggccccggcgcctcagtgacgttgtcgcctcttactgcgctggggcctgggcttctcggctgagaccctgaaactcctttccttttatcctctcagctttctccattccttcctttactctacgtctctgtacacagagtgtgatgtgagggttcaccccgggcgcccgcagatcccccacgttccccagcacgcttgggatgcatctcccgagtgcgctaggaatgggcagccccgtgtcccccgcgcgagtgccgagcggaccggcgggggcagaggtgaattgcacgcctggggggcgggccggggcggggagccgaggttgctgggagctgggtctggagtccgaggacggggagggggcatggtcgccccccgccctgtgaactgtgaagtgcgcggctccggccgagccggtggtttccagccgggccagccgagcgcggcggctgcggccgcagacgtggaggagcggagcgccgaggctggcgccaggcggcctcttttgtttatctgacagctaaatatcaaggcaatcaccgcctcgcggccctgcctccaacccccacagctaagacaaacagttgggctaaaagaatgcctctgttatcataagtttctatctctcttctcatggctgggcctttattttctcttgcttttttaatttcagagtctcccccccctccttactccagatacccgatggattttctcaaaccaactggtgagtagatgatttttaaaatatcctgcttatcttaagttagaaatagagcctctagaacgtggctttttgtgtgtaggcaaaggcttggggaggtgctgggcttcacgttggttctaggtttcctctgttggaagtttggtgaatttttctgttgtggctgggttttttgctgtttttgcaaagacgttcccttgatatgctttacattttgttcctttttcatgtatttgtgctgtgtagccggtgggctcagctttaacacgtggaagctttagtccagagagaagtgtcttgggaaccaaataggactggttgatggggataactcggagacttagtgagtgccaggagcatcagtgggaataatggaaagggtgattcgatagatgggaagacggtttaaaaaggtgcaaagaagactttggtctggagtagacactagaacttttcagaagtataggcaacagccagtaaaaggggggggggggtaggttcctcctgctccagtcacctgcaagtcagtcctctcccggggttttctcagtattcgccatagggactatcaaagtttgaagcatagctctgcctgtctgctgctttgtcactggctggcatgaagccatggcagaagcccatttgagactggcaccagccctgttgtggttgtctgcattcaacttctggccggcagcagcacaggggtccatcctctggacatcacagtgctggggacagggtcagcaaaatgaacttgggggtgacaacaaggacaaacccaaattcctggagctccctcttacagtaggagatagatctgtttgctaaaagtacaggttgtatgtaaccttggtttttgtgcctgtatactggtgcctgaaaaaaacattaatacttgggacatttttattttgccaaggttctgggagaaggaaaagtgaagggttgggcaccatttagctcctggaattctgcaagtccttccgcctcctgcgttttggctgttgggcctttccccccactaattaaaagttttgctggggcgttgtcataaattaaatactttaatgaacgtgtaaccgaagcccatactctgcagccagtcctcctgggactctaccagctccctcaagttgggaaggcgttcctgcttgcctggtgccggtctaataagtggcccgcaaagcatgtgatattttgctttcgatttacaaaacaccagataaatggttattaataaggagatacccagctctctgtatttgtaacaaacgttaactggaattaccaagctctgttttcctaaagactgtaacttgactgggttttggcttaaagaatcaagaattcttttatgaagttcattttccaaggggccacctctgacctgttttttttgtccttccatattcttcaaatttggaggttttccttaaaagagagagaacagtgaccttagccccagggataaagaccagcaggggtaaatgttcccagaaacctccaaaaaccatagaaaagaaaggccatgttcccttgggtttcctgcagagacactgggataaatctgttctcaggatttaagcagtcattctgccaggccagggcctcattttcggtgagtggagtgatatatttattcattagcaagtgttgacattaggtagcaaaatgtgtgtaaacagagaagccacaaagacaggaatgtgccatttccaagggggagaaaagttctccagatcagccaataggaagtgattaacctgccaatcggaaactaagacagctggttactcacccaaaacgttttgttgaaaatagaacaaaaaaagaaatgagaaaaggcgctgctgtgtaagaatttagcatcagtaatagacaaagcccccacgaagggaattgtcctgccacattggaggacagccaggtctggagctggagcacaccccccccgcccccctcacaggtctggggctggttttgccagctgctgtggccgggggcattgaggtcagaccacagatgggcgctgacccaggtcttcatccccattttgcgtatgggagaatgtttggcccgggaatctacatggaccatttacattcttcagtttctatgtcccttaggttgaatttttggtcttgggttactagatgaaacaggcacaaagttttacagtggacaactgttaaaatcttaaccagttgcacaactaaaggaatacatcctgtgaagtctccatcttaggaaaaggtggtgggaatggggctggggcctggtaccctgcagcctttggagacacagagggctcaaagctaggaactccattttgctataatttaagccactccactcagcatctgggaggcctggactttagacacctaggtactgtgtggtccaaccaggagagccttctttgaaagagtgttcacatgactgaacctaggggaggccagttgtgacttgtggctgtcagaagtcagaaagacacccccacctccacatcccacaagaagtcagaatttgctgtttaaagctggatctcggggatagctgtgtgggctctgcttcccgtgtttcattgtatctgatggtctgaaaggtttgaggaatggctggccttggggggttgctgggtgagctcttgagggacccaggtggccagtatccatgggcagatccagcctgcaaatccagatcggaagtctggtgtcttgacctgagatctggcactgcgtttctctcttaaccgaggtccctcttaacttttctaggcctcttttaaaatcagcatgatgaaagagattaggtcattcattcatttattcattcattggttcagtcattcattttacaggcatgatgatgtgcctacctagaaatttgaggattccgatgcagtgctgtgttctttttttttccgagacagtctcattctgtgcccaggctggagtgcagtggcccgatctcggctcactgcaagctccacctcctgggttcacaccattgtcctgcctcagcctcccgagcagctgggactacaggtgcccgtcaccatgcccagctaattttttgtatttttagtagagacggggtttcaccgagttagccaggatggtctcgatctcctgacctcgtgtgatctgcccacctctgcttcccaaagtgctgggattacaggcgtgagccactgcacctggcagtgctgtgttcttttataaccagggttcatttgagttctgggttggttgaactacctggggcagagctgggacccttggggtacagtggtgagtaggggctcctctgtctttaacagtacttaggaagctcagaacgcagttgctgagactatcgtgggactcccagctcctttaccttgtactcattctcaatagttcgctccttggctgctccccagggttgggttttcaaagactctgttggagctgctcggagaaaggaatgagtctttttctctcgcagaacctagtgcttaccaagtgcttgataacacttagtgttgcgtgagtcaggagtggcctagagcttctgtctgccagccagcctgggctctggggaacaggcgacacaggcctaaggtgagaccctgacttcagagatctgtctatgcggagcttttctgtgggtgagagatggaggtatggctcctttaaccttgaggccagtctggatggcctggccacctccaggaaagagggtagggactccatagcctgcctggggagtgagagccatgggatagggctggactcttgggaatagcccagctcactgggtggccctttgagctagtcagtgacgcctcagtttacctggctgcctatggaacaggtatactttgcttcttcacaggggtggtagggaggcttaattaacgtttgtaaatccctcttgagatcaaagccactgcagaagggcagagcaccatttcacaaaaatgcttgtggttgcctgtgtggagctggcttacctttgatctgagatgggctgacaccctgaatgtggtctcagctctgctctgagatgcccggcttttcctttgaaacacaccttgcccctgggattctgccagccaaaggtggcggggagtggctgtggataagtcattatgtttaatgtgggggtgtcttccatctgggaggagtgggtggaggagagggttgagaagcctatctctagaaaatgatgaaggccatcaaaatggtttagaaagtgcagggtatacaccatttaacaagtaactccatttcctgcctgcctctattgttttctgtttgattaagtgtatcctgtaaaactgtatattcctgttaggaattagactttaccctgataaaatgagattacacacacagtcttctttccccctacccaccgcagccacctcacccccacgcctgcctccacttctgcccctcgcccgcttaggagagttcttgaaaagttgtccttccagccttgagaatgtgggagagggagtgaccctgagttagagagagaaacttagcattaagagggcagacagcagaaacccagagatggtttggggctatgtgtaggccactaaaggattcccatgggctacttgcccgtctgctctttttttttggctttcctatttgccagcatggccaagtggttccaactggaaacccacagggacattgtcctggtggcctggggtaggaggcctggtgtctgcacgatccaacctgttgtgtttgctgcggacctgggcagcacctttccttagccgggctctccgctaggacttcagggagtttggcgctgccagtggtgcatgacaagcttacagggtcttgtgtatttgtgtttcatgggactaatgagttgtggttcatggacattaggttttgctttaattgcttggagggcggttgtggagactgtttctcagctggaattgtcattatcctcattaacggtgaggtcactgtgcagagtacctgagggtgacagaagttgaagagaagtctagttaagggcagatgcaatctaaaggtaaaaatcagtgaggaaactccgagtgttgggtgccaaatgttttataggaactgagggcagagagccttagcaggtctggggttgcctgggaaggtttccagagatgaggggtttggactagcctgggagaggtagaacatttcccctccggctcggagccttgctgagaatgttctctgtcttgatctggtggtggttacacagatgtatacatgagtaacattcattgcgtctacttgggattttgtatactttgctctacttaagttagtcctcaattaaaaaaggggaaagaagtcccggcagcccaacatcaatcttgagaatgttttcaagaactgggaaacctgtctttaaaaggatgaaggcagagaggacatgggctccaaggagagagccttctgcccttgatgagggatgacagagcaaccagggttgagaaagtccaacccaaacctcctttgaccttgggaaccacctggtatccgtaatgggggactggtaatgcaagagaaattccagccagtctcattgagcctgactcgagtaatgattaactggctgcccggagcccagacgggtgacaaggtgctgtggtctgtcttacgatgggcagtgaagcctgagcagaccattaataatcagcatcaaggccgcgagtcagccttttggaatgtgtggtttgtctttcatgctgtttagagcgtgcttaaagatggatcttggtgtttttatttgtgtatttatttctttctctccccttttcaaatccacagcagactgtccagatgctgtgccttcctccgctgaaacagggggaacgaattatctggcccctggggggctttcaggtaagatgctttctcttattttcctggcaattccaaccttttttgaaattgctaaagactggaggaatgggggtggccttctgccaccccagctggtctggacttcattctcatttttatatgccttaagttggatgcatcggtggtgacattgtggtgcccttcagctcctcatcctgcagtcctttacgctctggacactggatccgttccgtggacggggagacaagagcgagctggggattgctttggtgtgtgaagtgttgcccggttatttttaagcagctcctggcttggggggcttcagcttggtgactttggtgtcattaactcatgcatttgagctctttttttgcttttgctctttgcgcatgggggatgtaaagggaatggacccacctttagggaacttgttgaagacagatcccaagcatacgatgggatttcagagtagatctgaggcttccctcccaagttctgattcccagcccagcctgctgcaggattttgcagcacatgtctggggctgggagcaccagggtgggagcactgccaacagtaggagctgtaattgttccctagcggggcaggttttcctcagggctcacaggtatgcgtgaaggcctggaatgccagtgctggggggtcacggggctggctgacaggcacggggtagccagagcattgttgttcctgaggatgcgaaaagagggcagtacttagagaaactcactggttatgtacatgggacgcatttcatgttgttctgaagaaatcctatttctacctgtttttccatccccaccatgtcatcactagattttctaagaactggctgaagcaagagggaaaacgaccttaaaaacagaaattccagcagagttttgggcatttggcatttccttgcctgtaggatcacgtggtagcagctcgaatagaagctgtgccctgttgtggtgtatcctcttgtgtgaggggcacccttttttgtggggtacctgctctgactacttggtggtgtgtcttccatggctggctcaggcaaagttcattcccggacggctccctccccggctctcctcttcaggaactgagcttgctgagaacgtctttagggagacccttgtttgttttcatttcaatgcaatatatactctgttatctgagactgagggtattgtttactcaaagcttctaatgagaattgagcaggaaaaagagggacctagagaagggagggggcttcaggcagtacggtgggagtggacagaggagttgaggagggagaaaaggcagcagtgtgtgaactgcatcttttctgctttctaaggctgagagagttcttgaaagaaagaaggccaatgagaggaaagggtctcagcagaataacacgctcaggatgttgttagatggttttattttttaaaccctgaatgtgcagggaggagccccggcccctccaaaccacatgaaataagcaagggaagtggcagcttttgaaagggtcctttcggaaggtttgtcttcttgataacatcttgtctgtctcccctgccggaggaaatgacgacaccaggctgagataccagcctgagtgcctcctcacccgcccgtgccatgtgacctgtgaagccctcaggagatgggtgggcttttttttttttttcttttttgacaaagtctcgctctgtcgcccaggctggagtgcagtggcgcgatttcggctcacacagacggagtctcgctctgtcaccaggctggagtgcagtggcccgatttcggctcactgcaacctccacctcccaggttcaagcaattctcctgcctcagcctcccaagtagctgggattacaggcatccaccactgtgcccagctaattttttgtatttttagtagagatggggtttcgccatgttggccaggctggtcttgaactcctgacctcggatgatccacccaccctttcctccccaagtgctgagattacaggtgtgagccactgcgcctggccgatgggtgggctttttttccccaaagctcttccagtcctagaaagaaactgggggtaaaacaatcattaactccttcccctcacccctccaggtaattgtagacacagatattaataaggagctgccaggaagaagcagtgactctctgaagggcagtgtggcttcagaagactgcagagagaagagggggccttccacatggcaagagcatttgttttgaatttcagctcttgatttactaattccaaaggcttcaaagtttgagctccttcttctttccgttcagagttggtgcagtgtattcataatgggccatggtggggagggtacactgttttgggggttgatgtcaccggcttgggggcgtctggaggggaggtgatgggcacggagaaaacctagggctgtcctctttgtagcgagaatgccttccaaaagggaactttattggcccctgtccagggcagagagttttgtaaatggagaaagcccaaacctcctccttttcaagaagttgatcgttccatggggggtggcctgggtgtgtctgccttgctgtggatgaggccagtgactggatgtggcagggctggatgggggaaggggcatagcagacactgaggttggggggtgggagcctggcagcaaggtggggagcagtgaaaactgaggagtttctccctcctcctccttgaaataacctctctgagcctctttcacaggccctgtgtgctgttttccttcctgtcctgccctggctgagagcgggcttaatgaatggggctcagtttagggtgggaggaaggtcggcagcaggagccagggcttgattctcttggcaagggaagaagggaaagaaaaaacagccgaatgtgaaaatgtggtgcctcggaggtgggggtggggtgtgctcaaaggccggtcctctcctgaaatgcaggggtgactccaaggctggcccttccctttcctgcgcccttgcaaactgcccgggaggaaggggagtgggcgggtaggagcccgggggcggggctgctggctgcaggttggaattccagcattgcagctttgttttgggggggtgtgggggggtgggtagacgacaggcctggtcgttagggacttgcagtgaaacacaccccacccttgcaagtttcctcggtctgggaaaatgggacatttttagaaggcagtgacttgcttccaggagattgtactttcatttttgacagctggctctctgagacagatggattgctgggtgcaagcttgtgtgtgtatgcgtgtgtgtgtgttgtgggggtgggtgtgtgggtgggtgggttttgccgcagacgtacagatagacaatcccgtgcgcaaacacatgagagcgtgcggatgcccacaggcaggctctgggatagggtgggtccctgtcgctggggtgggttgatgtcagggcggcctctccaagaggttgtggacttgtggggtggagtttgtggattgattctgctttgtgatttggcagtctgtgcctgactctctgggatgggtgtcttttgaaaggcatgcaactccagaacaggtccttgctgctgcttggacatggatgtgtcatggctcaggaagatcacctgggagaggtctgatgtagctgggaagcctctaggctcagctccgtcgtggagatggaaaggatttgctcccagagctttccggggatcactgggaatgcagagcatgtgttggaagctatcatctttgcagcctccatctggagtttctgtctgggggctttcattttgcctgtctgctgtcctggtttgagtgggttgagggagcagcatctcccttgtgagttgtaggttattcagctgcagactcatcttctagcctcctcctttatatatgaatgtctggagctggctgggcctcagccatatggacctgcccagttagggtagggattggaagccagcaaccacttgtagttatttaaacttcaaaagaagtgctcccatggatctcaaggagggaggtaggaggcagtggagacagaagtgctcacgtgtcctgggaaactccatctcttggctgtgcgaagtcatgcttgttggagagacccggcaccatgcctccaacccaagggtggccaactctttgcttgagattcatatgtggctactagtccccaagtctgggggatgggagcgtccttgagtcagtatccattcagcatccaaggatgtttctgtctccttctctttgatccttgctggcatctgtcatagtctcagaggagagccttcaaaaatacctatataatctgaaaatgcacccctggctcagtccacagttgacttgggctcaaaccaagtagcttaggaaacattgctccatcctgttttaaggaaagttaatcagctgcacgtgaacaattattcattgtctggcttggaattgtgatcatgaactgggaacctgggcctgggcgcctgttgctctgcttttaaattaagtcacctccccctgcctggctacaaaacagctcatggtttcactgaggtctctaatgccattgtggagtgagggcagggggcacaggttgagctcacaggcatgtgggcctttcatccaaatgctcatgagcgtggactttgggggactcaggtggacaggtgcttgtgaccatgagcaagctccttccttcccatccccttagtaccctgcaggccactgtgagaaatgacggcctagaactcaggggacaccttctgcctctccttaaacacctgccaacaggatgagtcagggctggggcgggctcacctggtgcacacccacaccctggtgaagaccagtcctggaccccgcctcttctgcagtgccccaggtcatgcacttccccctggagaagggcttactgataaaaccccttttgtcctggaaagaatgaggcagtccggcaggggttaaatacagggtgacagcatttaaaatctctggagcaaatttgggctgctctgccggccagacaagatggtctgctgccgcctcacgcatcctgtccccaggctgaactgggccagcaaagggagagggccaggtgaaggccaggctttgggtggtgtcacttttggtgacactgtagcatgctgattgcccctcacttcctacacacacacacacacacacacacacacacacacacacacacatgcctttacttagcaaagcctgactgtagctgcgtagacttgtacacctatgggacctccgtggcaagctcagagccggtggagcagtgaaaagggaggaaatgccgaagaattcatgatcaagtttggcttcctttgcttctttttaaaattttttaatgttttaattttttttttttttaattcgagatggagttttgctctgtcgcccaggctggagtgcaatggcaggatctcgagtcactgcaacctctgcctcctggattcaagggactctcctgcctcagcctctgagtagttggattgcaggcgtgcaccaccacgcccggctaatttgtgtacttttttgtagagagagggttttgccatgttggtcaggctggtcttgaactcctgacctcaggtgatccgcccgccttggcctcccaaagtgctgggattccaggcatgagccactgcgcccggcctctttgctcctttattattgttgttactgtgtcataattccttgcagaattatgatggccaggctggtctttacttccttcggtccaggccttgaactcggagcagcactctcaaagcagttgtcttcacctggcagaagaaaaaaaaggtgtaaagtgctggttcctggacttgctcgcacactaaaatccctcgggattcagcttcccagataactttcttgcttctttgtagagacatttgagagaaaactattattaactatacatggtccactgttttgctttgctgtcatgaatgggattgtaaaagggacccatgggaccgggtttccttttgggacgatgaaaatgttctggaactgtagagtggtgatggttgcacagttcaccgaatgtattcaatgccattggtggcacattttaagttatgtgtattttaccacaagtttgaccaaaaaatggccagcggtaggttttaaatacatgtagatacttggataatctataaggaacagtgattgtggagagtaaaattggagagacttctgttagttgcctaggacctgatgatggtagacacttgttttggtggcagccctgaggtcacatgggaagtacattgatggaccagggagcaaggctggtagcctgcctgggatctcgtgtgtgtgtgtgtggtgtgtgtgtgtgtgtgtgtgtgtgtgtgtgtgtgtgtgttttgagatggagtctcactctgtcaccctggctggagggcagtggcgtgatctcggctcactacaacctccacctcctgggttcaagccattctcatgcgtcagtatccctagcagctgggattacaggcgtgccacaccatgcctggctaatttttttctagtagaaagggcgtttcaccatgttggccagactggtctcgaactcctaacctcaagtgatcctcccgacttagcctcccaaagtgctgggattataggcgtgtaccaccacgcctggccttctgctgtgtgttacctgagcaagcagacacatctgtgctgatccttcgaccttccttttttcttcgtgggttccagaaatgagagacaggaaagttccctctggtttgattcccggcctgacttttctgctgggggaagtgaatatgcttgttctcactctgcggggtccccctggcctgcccatcccagtgactgcgaaccaggatggtgccagggttggctccaaaagctggtgatccagacccttcctgggcccctggagaccccagtccctgtgatgtccttgcccaagttctagggctgcagtggccgtaggtgactggcccgggcaccctccctttgcgggagcctcgtgaaaggatactgtaagcacagccacagggaggtcaccactggccctaccacctctcgctcggtattgaatggctagccccaagcctggctgcctgcctactgtcacacagaggcttcctctccgggctattttcagcgggaagatattattaactgctgaggcacagttctcaatttagtggttaacacaccaagaaagcaacactcacctgatcccggccactctacctaaacctgttggctcacttgggggactcggctgccccccagcctctctgtttctctctgtgggttcacctgggagatgtgggcttccactcccgtggaaggtgccccgtggattcagtatctgctagagagagaaccaggcttcttacgaagccaactcttaaaaggtgtagaaaatgatcgtatttatactctaagatggggacattttttgataggggtgggcactggctgggaaaagggactttcagcggtgttgaggacagttatttaaaacagggtgataactttcaccttgtaagttaacaggaaatattgggacaagacaggaaattgcatcatctttttttttgagaataactccagagaaaagtggttcgtgaaaggtagtggctgagaaacggctagcctgttttctgttttgtgttttttttttcttcccttccactcccacgagaacatgtaggccattttctttaagaaagaggctgtttgagaactttatgttatttttattatttaaaaaaatattttaccagaagggtcaccttcagttgaaatgttaactgccgccttatttcccattttactaaagaatctttcatgactttttcagcttccttccccaaatggtaaggccaagcagctcttggctggaagctaattttggtttggctggggagtcctcaacactgagccccacccagtgtcattagctcagttttaacttgcaaaaaaaagattgtatttttttttttgatggggggtacgtaagaatttactcacgcctttagcctttttacccacccccggtactgccttcccctaacagaggcacctggcacttagccgccgggaactcagggctgccttcgtgttttcaagccaccgtgtccccctcatcctgcaggagttctgtaactttcctgagactatttctagggtgctagtgaggagtggaggggaaatgggtctcggagctgccctggtacagctgtgtccagtaacggtgctgtgctttggaggaaggagtgatatggttcacctagaagcatctcccagagagggggcttatcacagccctacagtggtgcagataaggtccagttccattttttgtctctgggtttctaaatcccctctttgttgatgtcattgttctaatgacacagggcatgggacagtgccccggcccgtgctgccaaggagccgtctttaggacagagaccagaaagaaagagacctgtgtgtgtggctggcccgctctccactcacgctcacccccaccctcccagctttttccttagcgtgctttgttttgttttcataacacaacaagggccctggggtgtgtaaaagcattgttgaacacttggtgagggcaacttgtccaaacagagcaggacgccaaagcagaatgctgtgggcaggtggtgtgcccacagaggttggtgggccggcgccggccttggaaacacctctcagtggcatatgccgcggcggctgagtgtgacctagcgcagaacagggcttccctcttgtgtcctccgtggggagtccaggagagggacttggtccttctggctgactccgtgcttggaaggtgtgctcccctctcaggtgggttcacatgtgcctccctctgccgggtgtgaagctaggtgggcccgctgctttggaagaagccagtgtgtccctgtggtttgtttatggagcaaatatgtattgacacctattatgtgccaggctgtgtgctgtgcagaggaccagttcctgggctgggttagaattaagaattggcagttggaatggcttgtccgaaggtgatgttgaatccatggggatggagccggcgggaggggggattgactaggagttgcctctacctggaggcaggcaggggcagcttctgtaggacagaggagcctggtccctccatgaagccaggccataggtgggggaggtgcagggtgggccccctgggatgggcctagctcttgagtcatccacttctacttctgctttggttgtgtggtctgttgagaattgagataaagcaaagcttgtggataaacagaggtaggtctcccgggttttggttccagcccgcctccccaccccgcttcttgctgattgtaagatgacagcaggaagaacaggagctgtggttataatccaccctccagaccctggtagtacctggggcacagcacagagtggaagtgaccagcctagcgccaggctcctcagtggaccacggccaaggggtggggaaacatctggaaagacagtatctaatgtcttgacagccagaggagaagtgggatgttttcaaagcccaggagtgactttccctttgtaactccagaggacttgattcgcaacgaagaccatctgggggatgaaggaaattcttgctttttaattttaaatctgagggttaagcccgtttctgaggtgtcagccctgtgtgtgaggccctggcctgtctggggttgggtttggatgaaataatctaagatgcagttaccagggtgtttccttttcacattcatccttctctgtctgttcccccggggccaaccgatggcttccaagctctgtggagttcactaattgaattactcttctcgctcctccgtgaagccccaccaggaagaaaaggcggggagagctgcttttgctggggggtttgatcagagcagaaagggaagatctggtctcaattccaatttcatcttgcaaagtcgggactttctttcagccagaagacaactcagataaccaggccagcgactgtgtgctcatttcagtattgctttcttacgttttgatctgcgactgtcactcaacaggaacaaaaacaataagacgccaagatatgactgtgccgttggcagattagctgtctgcattttctggggtggctcactcggaggttaaatgattgtccctgtcccctgtcccaccttccagtcacctcatgaagctgttaagtgtctccttcccctgcaggctaagtgaggatcatcaagagctgggcctggggaccttgtcagcctcactgcagcctctgagccagccctgccccaccccctcatgaatcagtaaccaagagggaaaattaaaaagttagttatcagtgtgatctgagtgcaccataccgttcttacaaatagatgggccccatctcctgctcagtgggggcacaatcaaaaccctgctgggggggctgttttctggggaagagcccaggatcgtggggcctgcaaaaactcagaagcccccccaccttccccccagggtgtccaggatgccctagtcccaggagggggctgggagagaattacaatgtcggggccagcatcctccactttcctgtcactagaggctggcctgctctcctgggttgaggccgagtgtctcagcccctggctggccacatggccttgcaggagccatttctgtgttctgggcctcagttttctcatctgcaaaataagggcttgggcttggctgccaagtcccttcggtgatctgtgatctttgtctcttggatttgaggggtgtgggaatgatccccctattgatgagatatccctatggaagccaaagactgcttccattttaaaataaaaaggttgtagttctttctgtctcttggctcgcaaactcttccaagtatgggtgaaagctgaggactctgttcagaaaaatgcatgctataccacaatttgtatacatctgcagggggccgatatctttgctgaagcccagtcccacccgtggaatccccagttcaggaaatctatgcttatgaggactagttatgggggtgcaaaggagagccttaagagagctgaggcctttttcttttattgtggtaaaatatacataaaatataccatattaacaatttttaagtgtatagttctgtggcattaagtacattcatattgtgctattatccccaccgtccacatccagaactttttcatcttccctagctgaaactttgttcccatgaaacactaacttcccttctcccctcccccagcacttggcacccaccattctttctgtctatgaatttgcctcctcctctaggtacttcatagaatagtggaatcagacagtgtttgtccttttgtgatcggcttatttcacttaacataatgccctcagggttcatccatactctagcgtatgtcagaatttccttcttttttaaggctgaataatattttattgtatgaatattccatgtctggttgatttattgcttgatggacacttggcttgcttctaccttttggctattgtgaataatgctgctgtgaacatggatgtgcaaataccactggagtcgccgctttcagttcttctgggtatatacccagaggtggaattgctaaattacactgtcattctgtgtttaattttttaaggcatcgccaacggtagggcctccttgacttgtgcctcatgtgtcggcacacaccgatcgcatgcggtgggggagccctacccaccggggtgggcttgagggcgaatcctggggcagagggagtgagaaagcggggaggggacagtctgtccctgcgcggtgggggaggggcagtgctgggctgctgcagtcaccagccagattggagctcacatttatgggagcccatgtttatgggaggcctggaggctctgaaaggtggggcacccagcacagagcagctggccgtgtatgttggactccagggccttgtgacagcagcttctgggtgggggaccctttcattcttcttttattcccttgacctcctaactggaggttaggagtgggaggacccgccagagggagtgggggcttgggtctgggaggtcctgggtgctttaggggtgaaagggctgggatggctgaacagtgagtgtgtccaagcgggagagattagattacggaggcagacagaagtaatgattaacttttccagtctgcacgctgtctccaggctgtcgtactgttgtttttccctctaagtacagtgcggccctggcctggccaggccctggtattgggttgtaaagtgagagatggaatgagggctgggagtgcacggggaggggggccagggagggagctcgcaggagaagaaggagcttttccatcggatcctgcattggaatttattggccggaatgcagtaaatgttcaaaatgccatcccatccaacagttttcataattgttatggaacaaggggagccgggggaggggaggaatgaaaaggacttttgtttctcactgtatttttccatgtcttcggacagttttcctaccctctagaaactggagtggagttggatctgtgggggatagggtgggagaagggtctgcctttgggtcctgtgatgccttccaaggactaggggtcctggtagcctggggctttattaaaacgaggcccacagcaaaagtagcttggtttcttgcacacacagagcccccccaccacctgcaaaaccagggaaaaactgtcctgtccttctaggggttttgtccttttggaaaattggcttaatgatgcagtggtttgtattaagattttcatgatgctttaacgtgtgtgtgtgtgtgtgtgtgtgtgagtgagagagagagagagagagaaagagagaaagagattgagagagagagagagagaatgaatcagcattcagtgccagctgcccagttgggaatccagatagggaatttggggaatctcctacactctcagggtggcaggtgggtaggtgggtgaggtaagagacttgacttggtagtttctcttggacacgacagactttctgttccatgcttgtcccagcccttgtgtcttcctgggggtgccagggtcatgcccagagggaaggcagctgagcagacaatgccatgcagggctgagggcttctgtgcctgctaatatgtgaaccccctttctgaagagagctgctctgagttacttggggggtaacagtgggaacctggttggtgtaccatggaggggaagtatctggaaatttgaactcgagaaatgattcgactgcatgcacactaaacagcagccagagaggccctttactgtcaatattatgaatggagttggctgggtcgggagtccccacccttcctctgaggcctctctcagaggagcctgggcagagtgggcctcctcagacagcagtggctgcaggcagctgggtacacgctgtaatttgcatggctgaatgctggggcacaggaagccgcgtcagcctgactggcgagacagacaagagcttttgatttgtgtggctttcctcccctgccccgtgccaccctcaattacattctccatggcgagataaatgctcttaggagcattcatccccaggttgggggcttcagactcagatgcttggggggttttgggaggtggtgtgggaccagtttggggagccagggagtacattttagttctaggaattgattatttaacataatttgtaaggacacagtcactaattagtgttctagaccagcaggatctgcgaaatatgtaggcttgggagaggtggcaaggagggcggtgatgggaggagaaacttcagggaaccaagcctgggcagacagtggacggatgacagtgataaaagagatcctctcttgggggctcaccgtctcttgagggtgatgaatagtaagacagagtaaaaagtcatttctgactctgaaattaaagaaaaaaaaaagttggtttagagatggacacagcaaaacctgactcaaacctcctttcccttttgattttattttgttttattgttgcaaattaaatgcaaaaatgtaccctgctcctcaaagtggttttcttactctctggaaggtagtaaaaataaatggaaccagtgttgtttaatactgagaatcagagtccagccagagaccatgaaggcagaagggggcccatggggccatcttcccttgtcccctttacattatttatggacaggtcaaactgagaccctgagagggcaagccacttggccaaggtcacagagcagcttgctggcaaaaaagccgtatcaccccccacttcttgctgcaggggagttgcaccccatgcgcagctctaaaagctggtgcagcatttccaaagtgtgttctgaaggacactttggagaggaacagtgggcttggtggctttagaggcctgtgtccacagctcacaccaggcaatattctgggcttgaattgcagctctgcacttcggccagtgacttgtgcctcacccctactactccctttttttaagataggctggtgatagtatgcagcctcagagggttgtcatgagccacttagagaacacagcctatgcaaagtaaatgcttattaagtgtaggcattggcccagaactgttctaccatggggtgtggggatgtggagacaatcaggaagactggtgggcattttctgagcggctggagaacccaggagcctcagagatgagaccaacgtgtgtgcagcactctccacaagctggccccaatcacttttgcatcaaattggtacagcaaccttatgaggctggccttgggggaaccctgttttagggatgagctgaacttaccgggaggctgcatgcgaggttggtgtgaaatgcatatctggctttgtagctggtcggctcacctctggggttggcacaggggcgggggttctgccatggctagaatgcgctaaggggtggaaacgaagcctgctgggcccgggaaccagagagcagcctggcctttgaaggagaccctgtggcaccccctgcccacccccaagtccagccatctcacttcactggagatgctgcaaagcatgaaaaaaaaaaaatccagtgttctcaggtcagccttccaccagccaggattcatcgtctgatctgtttggggagagagcatggggtggtggagatgggttgggccccagtgttttctgattaactcgcagtttacctgaaacattttggtttgtttcctccatgaggaactcactctaaaccccagcattgtctgtgtttcctgaggagtctgagggagctctggggtcctatttcctcttttggatgaggctgtgagcatggtggattagagacagccccttaaagttagcccagatatctcagcaagttttacgcgtctctatttgggggagggattcgcctattgaaaacaagagaccagcaagggtccttgtgaattatgatggtttggcgtgagaatagatgggatggattggcactggagtccccttttatcttaggcttgtccctgaagagggcttgttgatatcagaacagccaatttcctgacagggttgggagcaggggatgggtgctgttaacctttgagatgtccgttgtggagggagagacaggatgaggcaaccgttggtggcgcctgggtcctgaggagggaggaccctggacctggcgttagcgaggcgtggtgatgtttgcgctcccaggttgccaggtgcaagctgtctgtgtccacatttctgcccttcatttgcccctgattggcacagggagcctgcaggaggcggccgtgcctgcccaggcgcccttcctccccaacttctccgtcctcagccttctgctctgctggaccatggaggagggggctgataggcccgtggccctgttggactttggcagaggaatatcacttcattatccaagtgcctcacagagatgagagccggtggagacccgtcctcactcgcctttgaccccagctcccggtaccctagcaattgggcacatttaaccgtgggtcatcagctgatggagctcatgtctttactggcttttttccccaagcttgcccttgttcctaaatggaatcttgggggaccccctccccacaagtacgttctttgtgtgtctgggcccagtcaggcccagatagcttctcttccacgcgtgcccgtgttctcataaccccatggctgttcttggagctgctctgcctctctgccctctgccttcaggtggagaatggtattgttgaggcactgagcaaggcctttcccccctcctcccatttttcttctttctcatctcctgacgccttcaaattaaaaatttaagaaggggtctgggtgcggcggctcacgcctataatcccagcactttgggaggctgaggctggcggatcacgaggtcaggagatcgagaccatcctggctaacacggtgaaaccctgtctctactaaaaatacaaaaaattagccaggcgtggtggcgggtgcctgtagtcccagctactcgggaggctgaggcaggagaatggcgtgaacccgggaggcggagcttgcagtgagccgagattgtgccactgcactccagcctgggcgacagagcgagactccatctcaaaaaaaaaaaagaaaaacatttaagaaggggaaaattccttgcttaacctaaaatgtggccttgaggcctggtcaccctgtgccattgagacctggggtgtgaggttcattcacgagcctctggtctcctggaagggtctggtctgttcattcatgagcagggtaattaaataactctttgtaagagtcagggagctccttgctaagtggtcttccccagttggagcgcaaacacaggctgaagtcctctcctttctcaacacccacctcccccttccctttaaagggaggattttatgctttaagggaaatggggaaggttgggggggggcaacaccttaaaggaattttaggcagattcagcatttttctggtgttgctccaaaaattccccacactgtaataaaaagatacaactgtgagcaggcatctgattagtgagctttttacaacacagcttttcttttggatgctttaaaatgaacacatactgttttaaaacaagcccctgtacagttttctggggagggggagaagtttgtggaaaataccggaaaaggttataaagctgagggaaattaacaaaggactgtgagttttgccttcagaggttaactatcagcgagaggccaaggctcttccttagtccttgtactgactgaacttcccagcccctcgacacgtggcccgggaagtccctgggagcaaagcgtccacacagacctttgtggggagactcgtgtgggctgtgggcccgattcagggaactgtgtttctgtgaagatgaagctgagcatttcccagaaatgagcccaaatggcggggaattcagggcaaaggggaatctctgtagtggcaatgggggatgtcgtgcggggtccccagaaggtgtgatgtccacacaagggtgtgtgttcgaggggcctttgctgttgccgaatggttttgctggaaagcttgttttttgtgtgtgcttagagatagtcccggcaggaggagactggagctgtcctaacgggaggacagaggctgctggtgggggagctggaggggacagcgagggaggagcaggcaggagtctccctgcggtgggttagggcaccaaatggacttcagggcccttgttcacacacagcagcattcacgacatccatgcattgcagtttttctgggctgggccattaacctcagcagaaaaatgctttttccagggggtgtctggcagcacattgctggcgggctgcacagatgaaacagaaacccacctgacacttccccgtcctgctacagatctcaggctccagtccccacccagcttcctctgcccccagaggcccccacccttggcagacaaggcttccaccccttgcctaggtggctgacaggcctggcatgggggcacctcgatctcaggtccatactccactcactcccttgctcctcctcctcctcctcctgttggccggtgccaggtttcagtgggtcctggctgcatgaaacaaagcattgtgaggctctgctgagggtctcccacccaccctccctcccgcctccttcccagcagctcctcgagtcttcctttccaggccaggtttgttgtcccgaattgggaaaataagcaaaagcttcttgtgtttcagaacaccctcctccacaccaaaagggtggatgtgctgtgcctcccggaagagggctttctcccccgcttcacacttgatgccaatgtgtccttccttccctgggcgttcaggtctttggtgtagccttcagagctgagttccctcagcaagaaagttcaaagattgccagcgctcacaagtttattagcagttgatggatactttgcagaaacaagtgaatgcctgatgagtcaccttctccctgtccctgtcttgttttccatatgttccagtacgtatgtgcacacagaaacacacataacacacactcgtacacactgacatcatggacacagtcttgcacacgcacatgcacaagcactggacttccaagctacatggggggtggtgaccggccagttttctggtgttgatttttagtgggggttgggggttgagggaaaggaatgagacctcagtgtcccctttttgtggagcttttggggcaggcatttgggaaggccagcttggggtgtctgtagggaaccgctgctctgggtgtgtgtgtctgtggctgccccagcaggccgcagtgtgcacatttgtatggccttactgacgggcacctccatccaacactggctgctacttaaaacaacaacaacaacaacaacaactgagtggagccagtgggttcccaggtcctaacacgcctgtaaaagttggagccagttagtgtcctgggctgccccagttacccagcctgctggggcagcaggatgcggccccatcttccgccatggaccccctgcagggtgcaacccatcatcattgactctgaacccagttactccagaaacacaaaggccacaccaaaacacatctcacactcaacccctgctttgtgccccccaggtccccaagaggaggagctggggctgcagggagcgagggcaaggccctgaccgacgtggggcccttcccctctgcttttccccctctgctgtccccatttttgttaacaaatacaagacttccggtctccaccctgctgccacaaaccacagcgttcctgcagtctggctgggctggggagatttatggtcccaagtctgaggcctgcccgctggctcctacttaaggaggagtcagaatgcccgccgccggggctccctttccctccgtgtgaccccccttttaaagtcctccaagtgcctgttgaggaaaattaccttaccagaatcaccccggcccccaggctgcctgtgggaagactgtgtagggaagcggggcggggcctgcaggggagggatgagggcggagcagggcgccctgcaggctccagatgcttctgtggaaggaggggagagagggggcacccctggggatgggggtgccggcagagaaggggagaagggggacgcatctatttgagacacataatcttctgtctgggctggaggaagctttgttaaggtagcccgggttaataccggtctgcatgttgtgatttggcattttgacatgaattcaccctttgtgtacagggctgctgctgacacactgagactgttttcctattaggaatatagatgtttttgtcccaagccaccctcatttttatttttaccagataggttcctcatgaccacggcactgatttgagagctgggtgacaggcacccagagaccatcgcataggtggtcccagagtctagacacctgggttctagctctggctgtgtcatcccctggtactccagcagcaggctttctgggtcctggttttctcatcaggatgacaaggggctggaggagctggccttcaaggttccatccagttgaaagatctgtaactccaggacgttgctgaggctttttgaggccctaaaagcagactacccaagctattaagggtccctttgcatctgtgctctgcagagaagaggctttgttggccaggtgggcacagatgctggtgtactggactcctgatgggcaggggcctggagagaagcagcacccagcgcttcctatgcttaaagaaaggcagggtcctggtcaaagggctgtaagagcctgggcaagtccaggactagcctcaccgcctccttctttctgtctcgtcctgagagatgagctggtgactgggtgcagtgggggggcgggtgtcttcattctaggagtcaccaatgcctgtccccactaaccctctctgccaatgtgttttctagattcccaacttcttctggagcctggggatcggtcacactggtgcgtggtggcatactgggaggagaagacgagagtggggaggctctactgtgtccaggagccctctctggatatcttctatgatctacctcaggggaatggcttttgcctcggacagctcaattcggacaacaagagtcagctggtgcagaaggtgcggagcaaaatcggctgcggcatccagctgacgcgggaggtggatggtgtgtgggtgtacaaccgcagcagttaccccatcttcatcaagtccgccacactggacaacccggactccaggacgctgttggtacacaaggtgttccccggtttctccatcaaggctttcgactacgagaaggcgtacagcctgcagcggcccaatgaccacgagtttatgcagcagccgtggacgggctttaccgtgcagatcagctttgtgaagggctggggccagtgctacacccgccagttcatcagcagctgcccgtgctggctagaggtcatcttcaacagccggtagccgcgtgcggaggggacagagcgtgagctgagcaggccacacttcaaactactttgctgctaatattttcctcctgagtgcttgcttttcatgcaaactctttggtcgttttttttttgtttgttggttggttttcttcttctcgtcctcgtttgtgttctgttttgtttcgctctttgagaaatagcttatgaaaagaattgttgggggtttttttggaagaaggggcaggtatgatcggcaggacaccctgataggaagaggggaagcagaaatccaagcaccaccaaacacagtgtatgaaggggggcggtcatcatttcacttgtcaggagtgtgtgtgagtgtgagtgtgcggctgtgtgtgcacgcgtgtgcaggagcggcagatggggagacaacgtgctctttgttttgtgtctcttatggatgtccccagcagagaggtttgcagtcccaagcggtgtctctcctgccccttggacacgctcagtggggcagaggcagtacctgggcaagctggcggctggggtcccagcagctgccaggagcacggctctgtccccagcctgggaaagcccctgcccctcctctccctcatcaaggacacgggcctgtccacaggcttctgagcagcgagcctgctagtggccgaaccagaaccaattattttcatccttgtcttattcccttcctgccagcccctgccattgtagcgtctttcttttttggccatctgctcctggatctccctgagatgggcttcccaagggctgccggggcagccccctcacagtattgctcacccagtgccctctcccctcagcctctcccctgcctgccctggtgacatcaggtttttcccggacttagaaaaccagctcagcactgcctgctcccatcctgtgtgttaagctctgctattaggccagcaagcggggatgtccctgggagggacatgcttagcagtccccttccctccaagaaggatttggtccgtcataacccaaggtaccatcctaggctgacacctaactcttctttcatttcttctacaactcatacactcgtatgatacttcgacactgttcttagctcaatgagcatgtttagactttaacataagctatttttctaactacaaaggtttaaatgaacaagagaagcattctcattggaaatttagcattgtagtgctttgagagagaaaggactcctgaaaaaaaacctgagatttattaaagaaaaaaatgtattttatgttatatataaatatattattacttgtaaatataaagacgttttataagcatcattatttatgtattgtgcaatgtgtataaacaagaaaaataaagaaaagatgcactttgctttaatataaatgcaaataacaaatgccaaattaaaaaagataaacacaagattggtgtttttttctatgggtgttatcacctagctgaatgtttttctaaaggagtttatgttccattaaacgatttttaaaatgtacacttgatttcatgttgtcctccaactcctttttcttctgctgcttggagggagtggggaggagtgagtattcatccaaattcagttgagttggcgtcttcccagcccagtgcttggaggatgggagacgtgggccacaaaagagacatctagaacagccctggtcttcaagagtgctggaaagacctgcagccacccagacatccctccttcttgtgtcttgaatttgtaatgggagacaacctacaggagctctgtgggtgataattcaaagcttgtagaattgaggacagggaattacatctagggtaatgggaaggagacaggattagaggatggatggatggagaagtttagccccaagaacctgggtccatctggttcttgccaactcctcacttggtattaaatcctaagcctactgtacccctgctagactggattccaggagaagtttcctgggggctgagaccctggaagggtgatgaaggtgggggttgaatgtcagtggtgttcagagggactaggccacctcctggcgccctcccaaatactgtcctgggccacagaagtcacagagtacaagttccactctgcaatatcgtcccttgtctgctgggacttaagtgacagttcactagtccccttccccagcctagctctggtggcacttgcagtcaaaatgcctcttcagtgctgtctttgcatcagcctgccttggttcgctgctgaaccgtgatctgagccatgttttagatttgggaaatcttgcacaagagatggtctaaattgggtaccaaacaaacggctgtgcaggtgtctatgtaaggggttttgaaccttatatccaggaagggggtccttttgaagtgggggttaagatttgaatatcataagcctgtacaatttcatgaaagctttttggaaggccaatgtaggacagccaactttctattttgccaaaaaatgaccaaaagcgctacagcctactggcgccaccacttcattaaagggaatgacagtacaattggttagcaagaaatattaatacatgttgattgctgatttatgctccagggcattaatgccaagtggtcatcctggccaacttgtttacatgtgatagggagcttactacctctaaaagtagcttttgcttttttttgttttttttgagatggaatctcgctttgtcgcccaggctagagtgcagtgatctcggctcactgcagcctctgcctcccgggttcaggcaattttgctgcctcagcctcctgagtaactgggattacaggaacacactaccacacccggctaattttttgtatttttaacagagatggggtttcatcacgttggccaggctggtcttgaactcctgaccttaggtgatccacccgcctcggcctttcccaaagtgttgggattacaggtgtgagccaccacgcctggtcgctttttgctttttatcattgaactgaaacttgcttacatcgtagttctgtaacccagaataagtgcaaaatctcatctctagaaaacacccaaggagggttctaattaactctagggtggtagcggcggaggaggggcagggagggaaggtgtttcactgggggctgtcaaagttattttagtttgctctaaattgcgtcggcatgcccggaagctctttaataattgtagctaccatttactgaatgcttcactaggtgccaggcataatgttcaggcgtttgagggaattctcatttcatcttcattaggacacgctgcaaaaatggaggctttgagaggtgaaatgactggctcaaggtcacacagtgagatagtaagtggttagggagatcaggatctgactccgggctgagtggttcttcctgcttggtccacgccctgttgagatgtttatttggtaggatcctgtgtggctccagtcccacaactccctgaaatggagagaaggtgggagggtggtccgccacgtttcctcctgaccacttgcgcaaggcctctggatttgggaggcagaagctgtggcttctggaggaaggagaggctggaacaggggtggaggtgtgtgggttctggcagcatggctgattccgggtggtggggaaagaggagtgcttaggaggagtctggcatttgctggtttctgacacttccctctttttgccggcaagcccgtcacccacagtcatctcctgagcaccttcaatgtgccgcagcgggcacggaggtaacgtggacctggacggtgcctgtgagtgatgctgggggacaagacgccacacctgagatgatcagcaacagagcaggcagaagaaaaggcgaggacccaggaggaggcctggtcttggggccacaggtgcttgcagaggaggtgggactttcagctcagatggcattgagattagcagagtagggggagaaggtaccccattggaaggaagttttcctgcctcttggtactccttcctttcagtttgccccttaaatttcagggtatcttatataattcgatctcaggctctgctcaggctacaccctctccctggatgacagcatcactctggtggttctgtctccctcagacctgtagatgcctcagctgtcccaaccagaaacctggattccccatccttgcccctgtcccccataatgaaaaaaaacaaattccctccatcctgtttcacccgatcaataattataaaatgcaaatatctctctcagagttctgttttctctacccccactagcatgacttatttcagggcctgtaagttttccctgggtctcccttacctctggtgaaagtagcccttcagcatccacctctgccaacctctcccctgagtccccagccctccacgcacagaaaccttttgttccaggcatgcagggggatgcactgtgctgcaggcccgccgtgctcatgcgcttctgcagcaagtgctttgcagccacttcaattagctatctcctccttatcctttgggatgtgatgcaggcaacacttcctccaagaagcctcctccctttaaaaaatttctgtctgggcgggcgcggtggctcacgtctgtaatcccagcactttgggtggctgaggcgggcggatcacctgaggtcaggagttcgagaccatcctggccaacacggtgaaacccccgtgtctactaaaaatacaaaattagcctggcatggtggtcggcgtctgtaatcccagctacttgggaggctgaggcaggagaatcacttgaacccgggaggcggaggttgtggtgagccaagattacgcaattgcactccagcctgggcgacaagagtgaaactttgtctcaaaaaaaaaaaaaaatttgtcctgaagaatgttcaatagtgtaagattctctcttctgctgaactataagctcttggcaccctggggtctcaactggagtctcagttaggattcactgccctgacaattcctggtgtggtactcagacaggacttgtctcatgaacgaggcatatttgtgggcttagcttgggctgggaataattgtcatcatcttcatcatcaagaggcaacactgagtatgtcctgactctgtgctaggcagtgttctaagcactttacactgggattgtcccatatgatcctcacagccactctgcgagtggataccatgatcatcactcccattctacagataaataggttcaaagaattgcccacagtctcccagctgttaagcgatagcatcagatttcatcacttctgtgttatctaatctctctgggcaggcctggctcaaggagttgggtatatgttttttctaaaacaagttctggtttggaaggaccaagctgatctgactgctgagcaacagaaacaacacctgccatttgtacttgtcagtgcataccaagggtcatgctgcctgtgcccccacgccgcagaggacgtgggcaggccttccctgattcaggaagggcctgaccctccaatgggtgagtgatttgcccgggaccacctatgcacagcctgtgatggaagctggatttgcacccaaacctatagcaagcgatgacttctcgctgggtctattaagctcccaacactcagcagcctgcaaaggacctgtttgtcagctcagccggtgtgccctcaatgagcaactcctgattgtccctgagggtgtgctgggggcaggcaaggtgggggcctgatgtgaaataggatgtggctcacagtcaccggtttgggggtcagacagatctgggtttgagcactcacttgggcaagtcacaacctctctgaacctcaatttccaaagcacaaagtgtgtattatactttcatgaggctaaaatcgggactggggagaaaattcatgtgaagagctgaccatatgctaattaggttgaaccacgtgggattgctaatatctgatcatgttgacccacaataatggcaatttcagatactttatgagatacttaatccaaggcagccagccgtaatcaggggtccccacccttcttttcatcccgcagctgcagtcagaggctggtggtgccctctgggtggtggattttgcagcaagtgagagaagacagttggaaagccagtccatggatagtaggggggtggccaatattgaggcgattccttcctgctcaaaatgtcatccaactgctgagtccaggccagggcaggaagcaaagaccaccagcagccagggctgcagggttggggtgtcctggcctcaggaggaggggtgcgtgggcccaggctgccacccttggagccaggagcagcccgcacagtccctggtttcctggcggctctcaagcaggaggcccgagctgctagctcagcagttttccctcagccagaagaaccccgctctctttctgaaagtaatgattttctaaaaatggattccctcccctcccccagctgcaattaatctacccaacacaaagtggccgctggaggaggactctggtgagttgggactagtgcaagtgctttgattaattcagggacaatttcctggctgggctgggggtgagaggctgggcagggacgcgctgcctgggtcgggggtggcccactgcagggtccatttaaacagctatgagagccacggagacctgggagagctgggagcctcttcctagggagcctgtgcccgccttcctggggatttgagaggcagagtctgccatggacatgtgcccaggtgccaggggaagctcttgctaagcctggagctgcctggagctgccattttagtggaagcttagggggagaaggaatacaattgtttctaccataagcccttatatcttacgtagtagaatgcaaacttgacctgaattgttgagaaaaaacaagacacttcaaggacacgtggttgcccttgatgttgctttaggtggtggccccaggccctggcagtttctcttctgcagtgggcattttagtggaaaagtgtaagatcagtgggacacagaagcgctggggacagaaatagagtgtgtatattaggactgctttgaaccttaaagaaaatagagatgtgtcatagacaactgtattgaatccattctccgcagtgtagactgccctttgatacacgttcctctaatgattctggatgggagctctgactacccccattttagaagaaactgaggctaaaagagatgagcgacttacacaagtcacccagccaagaggtggccgagcagttttccttaagcctaacccagggctcttttgtccaaagcctggtgctcaccactctgtcccatgcccatttcaaactccaggtcttgcactctgcctgcccagatcccagcagtaatgagtgacctggggtcgagacatttcattcccagggaatacttatgcatttccctcatttcccagcctcccttgcagtttgtttgggaccatgtgaccagttctggccaatgggctgtgagaagtgccatgtgtcacttccaagctaaagcattgaaaaattggtgcagggtgacccagctctctctctctctctctctctctctctgccacagggacctggaagatatgttttaggatgatggagacagaagatggaaaagcgttcggatcctgaatggctgctctggagagcccctgggcccgctgcagactttgtttgaatgtggaactttttctttgtggctgagatttggaggtttgcctatccagatgattatgtgacctgtgccccacactcagtcccttgcagaatctggcttgcttctttcttttatggaggtgggtcttgtatctccagcgtctgggagctccttgaggtcaggcacgagcccagccctcatgcttacttgaatcctttcacagtcacagtacaaagcccagcactgggctcgtagtaggtgatgagtaaatacctgctgtaattggcatgaagtgcctctccagtggtgccccatgagggactgccaccaggtgtcctccaagggcacagtctcccacctggtccagggctcctctctgatgaaaccctgcccttgcctgctcctcagctacgtagtctttgaaacggctcttcaccttctcctcaacctcatctggttgaggccaggggccactttaacctggccaaagccagtaccctctgggcaaggagagagaggctcagagcagagctccggctccagtgaacacattgattagagtcatcagaccacgttcccagctcctcttgcctatcctgcttgatttttcttcatattggtggttgacattatacttactgtattatatacacatttgcctttttttttttttttgagacagagttttgctcttgttgcccaggctggagtgcaatggcatgatctcagcttactgcaacctccgcctcccaggttcaagtgattctcctgtctcagcctccggagtagccgggactacaggcgcacaccaccatgcctggctaattttgtatttttagtagagatggggtttcaccaggttggccaggctggtctcgatctcttgacctcatgatccgcctgccttggcctcccaaagtgctgggattacaggtgtgagccaccgtgcctggcctatgtttgacattttattatatatctgtttgttggcttgactattatcagaggcccctagtagagtgtgagctctgtgacagcagggactttgctctggtcactgccataaccccagaatctagaacaatgcccagcacatagaagggatagaaggcactcaaccgatattggatggatcaatgttgaatgactatttaacttttcaactaaaatatatgaatttaagttccaggtgaattccttttttttatcttttttctttttttttagagacagggtctctgttgctcaggctgtagtgcagtggcatgatcatagccttgaactcctgggctcaaatgatcttcctgccctcagcctcccaaatagctggaactaaaggtgagcaccaccctgcctggctaattttttaatttttttgttgagacggagactcgctacattgcccaggctggtttccaactgctggtctctagtgatcctcctgccttgctgggattataggaatgagccactgtgctcagccaaattcccttttccccaagaaaagtgggtatgggaccaggtgcagtggctcacgcctgtaatcctagcactttgggaagccgaggtgggcggcttgcctgagctcaggagtttgaaaccagcctaggcaacatggtgaaacccagcctctattaaaaattagctggtgtgcacctgtagtcccaaatactcgggaagctgaggcaggagaattgcttgaacctgggaggcagaggcttcagtgagcgagattgcaccactgcactccagcttaggggacagagcgagactccatctccaaaaaaaaaaaagaaaagaaaagtgggtatgtacttactttataacactagtgaaaataaaaagcacattattatattcttttctcccaaaaggtgaatgcaaaactttacctcttagggtggtggtaatagcgacaactacacccacaataataataacaaaaacctgcgtttacttagggctaagtatgtgccaggcactctctgcaaggtactttttttttttgtttttttttttgagacagtttcactcttgtcacccaggctgaagtacagtggcatgatggcatgatctctgctcactgcaacctccgcctcccagactcaagcaattctcgtgcctcagcctcccgagtagctgggattacaggcgtgagccaccgcgcctggcctacgttgtgttgtctttaaggtaagcgctctcattagctcattttacaggtgaagacttgcaggcccagcgagagactcacagcaaaagcgtggtagaaccgaagcccaggtctgcctaactccacagcccttgctctgagccctgggtctccaggggagcctagagacaccagcagccttgaaagagtagttttcccagcttctgttccttaaggtcgagacagaaacacgctaaggcctgatcccactgaggcagctcgagactctgggggtctctctgcaggaagggcttgctccttggccaagctgtcctgtcccaaccggggctgtaatgttcactgtgtatgggcgtcgtgtcatcagcaccaaatcttctaatgacacactgcagccagggaaattacagtgcccgggagacttgtcccagaggccctgcccgaggtaattccagagcaggagcgcatgctgggaaataacaagaatgacagagtctggctgccagccttagataatggaatggtgagtgattttattttacttatacagatctttttcttgaattttaaaaatattgaaaaatggtatcaaaagtaaaaattagcgctaacctcatcatttaaattatgccctccaacttcactccccagaggtgagcatgctggagactcagatatgtcccctttctgaattggcttctgcctctacatatgcacatatacaattctcaccaatggagtcacattctacatatcagcctgcgccctgcttatgtcacttaatgatacatcacagacatttttggagattattcattttcatggttgtctagtagtggagcagaatttaaaagatgctagtgttcatttaaagatatgctacttagtactgaatgggagtgaggacgtggtgcaacaggaactcttgtgtgatgatgctgggggtataaactggttaactttttggcagtatctaccaaagctaaagagaatcatacctgcatcagaaatgcacacatatattcactaaaatatatgtgtcttttagtgaatatattcttgaacatgtacaagaatactcacagcaggccgggtacagtggctcacacctgtaatcgcagcactttggggggcctaggcaggcagatcacttgagttcgggagtttgagaccagcctggccaatatggtgaaaccccacctctactaaagaaaatgcaaacattagtctggcatgttggcacatgcctgcaatcccagctatttgggagactgaggcaggagaatcgcttgaacctgggaggcgaaagttgcagtgaggtgagatgacaccactgcactccagcctgggtgacacagtgagactctgtctcaaaataaaaaaataaagtatattaatagcagcactattgataatagctctaaactgaaacaactcaaatatctgtcaaaagtcgatggttatttacacagtgcacatcatgcaacaatgggcatgaaagaactccaactctacacggcagcaggatgatctgcacagttataacgctgggccaaagaaggcacacacagaaaagtctacactgtatgattccctttatataaagttcaaaatcaggcgaaaccaatttgtggtgttagatgtcaggaagtgggcacgagaagaacttctaggggctgatgatgtcctgtttcttgatcttagggctggttacacggggtgtacagtttgtgaaaattgtgcacttttctacatgtgttatacatcagttaaagtctatatatatatatatatatatatattttttttttttttttttgagacagagtcttgctctgtcgcccaggctggagtgcggtggcatgatctcggctcactgcaagctccgcctcccgggttcacgccattttcctgcctcagcctcccgagtagctgggactacaggcacccgccaccatacccggctaattttttgtatttttagtagagacggggtttcactgtgttagccaggatggtctcgatctcctgaccttgtgatctgcccgcctcagcctcccaaagtgctgggattacaggcttgagccaccgcgcctggccaaagtctatatttttaaagaagtgtcaatggcaggcatcccctccaaaaattcagtcttgtttaccctaagtttgtccccttcttccttttcttccagcacctaatgagctgcatgtaggacagtgccttatgtatgatgtgacccagggagggaatgggagttgcacgttgtggtttttaatccctgggaccaggtggtcagcctcaggtgatgactgagcctgtgctgtccccacgtatttgctctcaggtagtcagtgagcaatggggtagagagaatgtcagcgggagggggtgggaggaggaggaaaaaaaggaggaagaagaggaggaagaagaggaggaagaggaagaggagaaagagggaaaggttgctgttctcaggactgctgaggggactgtcttgcacatgggcacttgcatgagtggtggaatttctggggtcctagctactattacagcaatgacaataacaacaactactactattattaatagcatccaacttttcttgaattcttacctattgccaaacacggagctgagtgctttatatgcatcactcatgtggatccttttaacactgtgtagtttttatcagtacccatttgcatgttggaggctcacatacatacagtaagcccctgaccaccacaccacacaagcccctgcttgttttgattattcagttgtttatctggagacctattatgtgcatgatgctgtcgaggattgaggtataaaaatggatgtgtgccaagcatggtggctcacacctgtaatcccaccacttcggcaggctgaggtagacggatcacctgaggtcaggagttcgagaccagcctggtcaacatggtgaaaccccatctctactaaaaatacaaaaaaatttagctgggcatggtggtgtgtgcctgtagtcccagctcctcaggaggctgaggcaagaggatcacttgaacccaggaggcggaggttgcagtaagccaagatcacaccactgcacagcctgggcaacagagtgggacttcatctcaaaaaaaaaaaaaaaaaaaaaagtatgtgatacagtctctatagtgtctgagcaggttaataattgggtgcttatccaaaccaattgtcagtgctttatttcttattttgggagtgctcaaaataggtgattcatttcttttgctatttacttttatctccttagcaagatatgttccctctttaaatattagagactaaattaacaaatacaaagggagggctgggctcagtggctcacgcctgtaatcccagcactttgggaggccgaggcgggtggatcacctgaggtcgggagttcgagaccagcctgaccaacatggagaaaccccatttctactaaaaaatacaaaattagcagggcatggtggtgcatgcctgtaatcccagctactcgggaggctgaggcaggagaatcgcttgaaaccaggaggcagaggttgtggtgagccgagatagcgccattgcattccagcctgggcaacaagagcaaaactctgtctcaaaaaacaaaacaaaacaaaacaaaaaccaccaa

SEQ ID NO: 86 - DNA, 54859 bp, Homo sapiens
ttggtggtttttgttttgttttgttttgttttttgagacagagttttgctcttgttgcccaggctggaatgcaatggcgctatctcggctcaccacaacctctgcctcctggtttcaagcgattctcctgcctcagcctcccgagtagctgggattacaggcatgcaccaccatgccctgctaattttgtattttttagtagaaatggggtttctccatgttggtcaggctggtctcgaactcccgacctcaggtgatccacccgcctcggcctcccaaagtgctgggattacaggcgtgagccactgagcccagccctccctttgtatttgttaatttagtctctaatatttaaagagggaacatatcttgctaaggagataaaagtaaatagcaaaagaaatgaatcacctattttgagcactcccaaaataagaaataaagcactgacaattggtttggataagcacccaattattaacctgctcagacactatagagactgtatcacatacttttttttttttttttttttttgagatgaagtcccactctgttgcccaggctgtgcagtggtgtgatcttggcttactgcaacctccgcctcctgggttcaagtgatcctcttgcctcagcctcctgaggagctgggactacaggcacacaccaccatgcccagctaaatttttttgtatttttagtagagatggggtttcaccatgttgaccaggctggtctcgaactcctgacctcaggtgatccgtctacctcagcctgccgaagtggtgggattacaggtgtgagccaccatgcttggcacacatccatttttatacctcaatcctcgacagcatcatgcacataataggtctccagataaacaactgaataatcaaaacaagcaggggcttgtgtggtgtggtggtcaggggcttactgtatgtatgtgagcctccaacatgcaaatgggtactgataaaaactacacagtgttaaaaggatccacatgagtgatgcatataaagcactcagctccgtgtttggcaataggtaagaattcaagaaaagttggatgctattaataatagtagtagttgttgttattgtcattgctgtaatagtagctaggaccccagaaattccaccactcatgcaagtgcccatgtgcaagacagtcccctcagcagtcctgagaacagcaacctttccctctttctcctcttcctcttcctcctcttcttcctcctcttcttcctcctttttttcctcctcctcccaccccctcccgctgacattctctctaccccattgctcactgactacctgagagcaaatacgtggggacagcacaggctcagtcatcacctgaggctgaccacctggtcccagggattaaaaaccacaacgtgcaactcccattccctccctgggtcacatcatacataaggcactgtcctacatgcagctcattaggtgctggaagaaaaggaagaaggggacaaacttagggtaaacaagactgaatttttggaggggatgcctgccattgacacttctttaaaaatatagactttggccaggcgcggtggctcaagcctgtaatcccagcactttgggaggctgaggcgggcagatcacaaggtcaggagatcgagaccatcctggctaacacagtgaaaccccgtctctactaaaaatacaaaaaattagccgggtatggtggcgggtgcctgtagtcccagctactcgggaggctgaggcaggaaaatggcgtgaacccgggaggcggagcttgcagtgagccgagatcatgccaccgcactccagcctgggcgacagagcaagactctgtctcaaaaaaaaaaaaaaaaaatatatatatatatatatatatatagactttaactgatgtataacacatgtagaaaagtgcacaattttcacaaactgtacaccccgtgtaaccagccctaagatcaagaaacaggacatcatcagcccctagaagttcttctcgtgcccacttcctgacatctaacaccacaaattggtttcgcctgattttgaactttatataaagggaatcatacagtgtagacttttctgtgtgtgccttctttggcccagcgttataactgtgcagatcatcctgctgccgtgtagagttggagttctttcatgcccattgttgcatgatgtgcactgtgtaaataaccatcgacttttgacagatatttgagttgtttcagtttagagctattatcaatagtgctgctattaatatactttatttttttattttgagacagagtctcactgtgtcacccaggctggagtgcagtggtgtcatctcacctcactgcaactttcgcctcccaggttcaagcgattctcctgcctcagtctcccaaatagctgggattgcaggcatgtgccaacatgccagactaatgtttgcattttctttagtagaggtggggtttcaccatattggccaggctggtctcaaactcccgaactcaagtgatctgcctgcctaggccccccaaagtgctgcgattacaggtgtgagccactgtacccggcctgctgtgagtattcttgtacatgttcaagaatatattcactaaaagacacatatattttagtgaatatatgtgtgcatttctgatgcaggtatgattctctttagctttggtagatactgccaaaaagttaaccagtttatacccccagcatcatcacacaagagttcctgttgcaccacgtcctcactcccattcagtactaagtagcatatctttaaatgaacactagcatcttttaaattctgctccactactagacaaccatgaaaatgaataatctccaaaaatgtctgtgatgtatcattaagtgacataagcagggcgcaggctgatatgtagaatgtgactccattggtgagaattgtatatgtgcatatgtagaggcagaagccaattcagaaaggggacatatctgagtctccagcatgctcacctctggggagtgaagttggagggcataatttaaatgatgaggttagcgctaatttttacttttgataccatttttcaatatttttaaaattcaagaaaaagatctgtataagtaaaataaaatcactcaccattccattatctaaggctggcagccagactctgtcattcttgttatttcccagcatgcgctcctgctctggaattacctcgggcagggcctctgggacaagtctcccgggcactgtaatttccctggctgcagtgtgtcattagaagatttggtgctgatgacacgacgcccatacacagtgaacattacagccccggttgggacaggacagcttggccaaggagcaagcccttcctgcagagagacccccagagtctcgagctgcctcagtgggatcaggccttagcgtgtttctgtctcgaccttaaggaacagaagctgggaaaactactctttcaaggctgctggtgtctctaggctcccctggagacccagggctcagagcaagggctgtggagttaggcagacctgggcttcggttctaccacgcttttgctgtgagtctctcgctgggcctgcaagtcttcacctgtaaaatgagctaatgagagcgcttaccttaaagacaacacaacgtaggccaggcgcggtggctcacgcctgtaatcccagctactcgggaggctgaggcacgagaattgcttgagtctgggaggcggaggttgcagtgagcagagatcatgccatcatgccactgtacttcagcctgggtgacaagagtgaaactgtctcaaaaaaaaaaacaaaaaaaaaaagtaccttgcagagagtgcctggcacatacttagccctaagtaaacgcaggtttttgttattattattgtgggtgtagttgtcgctattaccaccaccctaagaggtaaagttttgcattcaccttttgggagaaaagaatataataatgtgctttttattttcactagtgttataaagtaagtacatacccacttttcttttcttttttttttttggagatggagtctcgctctgtcccctaagctggagtgcagtggtgcaatctcgctcactgaagcctctgcctcccaggttcaagcaattctcctgcctcagcttcccgagtatttgggactacaggtgcacaccagctaatttttaatagaggctgggtttcaccatgttgcctaggctggtttcaaactcctgagctcaggcaagccgcccacctcggcttcccaaagtgctaggattacaggcgtgagccactgcacctggtcccatacccacttttcttggggaaaagggaatttggctgagcacagtggctcattcctataatcccagcaaggcaggaggatcactagagaccagcagttggaaaccagcctgggcaatgtagcgagtctccgtctcaacaaaaaaattaaaaaattagccaggcagggtggtgctcacctttagttccagctatttgggaggctgagggcaggaagatcatttgagcccaggagttcaaggctatgatcatgccactgcactacagcctgagcaacagagaccctgtctctaaaaaaaaagaaaaaagataaaaaaaaggaattcacctggaacttaaattcatatattttagttgaaaagttaaatagtcattcaacattgatccatccaatatcggttgagtgccttctatcccttctatgtgctgggcattgttctagattctggggttatggcagtgaccagagcaaagtccctgctgtcacagagctcacactctactaggggcctctgataatagtcaagccaacaaacagatatataataaaatgtcaaacataggccaggcacggtggctcacacctgtaatcccagcactttgggaggccaaggcaggcggatcatgaggtcaagagatcgagaccagcctggccaacctggtgaaaccccatctctactaaaaatacaaaattagccaggcatggtggtgtgcgcctgtagtcccggctactccggaggctgagacaggagaatcacttgaacctgggaggcggaggttgcagtaagctgagatcatgccattgcactccagcctgggcaacaagagcaaaactctgtctcaaaaaaaaaaaaaaaggcaaatgtgtatataatacagtaagtataatgtcaaccaccaatatgaagaaaaatcaagcaggataggcaagaggagctgggaacgtggtctgatgactctaatcaatgtgttcactggagccggagctctgctctgagcctctctctccttgcccagagggtactggctttggccaggttaaagtggcccctggcctcaaccagatgaggttgaggagaaggtgaagagccgtttcaaagactacgtagctgaggagcaggcaagggcagggtttcatcagagaggagccctggaccaggtgggagactgtgcccttggaggacacctggtggcagtccctcatggggcaccactggagaggcacttcatgccaattacagcaggtatttactcatcacctactacgagcccagtgctgggctttgtactgtgactgtgaaaggattcaagtaagcatgagggctgggctcgtgcctgacctcaaggagctcccagacgctggagatacaagacccacctccataaaagaaagaagcaagccagattctgcaagggactgagtgtggggcacaggtcacataatcatctggataggcaaacctccaaatctcagccacaaagaaaaagttccacattcaaacaaagtctgcagcgggcccaggggctctccagagcagccattcaggatccgaacgcttttccatcttctgtctccatcatcctaaaacatatcttccaggtccctgtggcagagagagagagagagagagagagagagctgggtcaccctgcaccaatttttcaatgctttagcttggaagtgacacatggcacttctcacagcccattggccagaactggtcacatggtcccaaacaaactgcaagggaggctgggaaatgagggaaatgcataagtattccctgggaatgaaatgtctcgaccccaggtcactcattactgctgggatctgggcaggcagagtgcaagacctggagtttgaaatgggcatgggacagagtggtgagcaccaggctttggacaaaagagccctgggttaggcttaaggaaaactgctcggccacctcttggctgggtgacttgtgtaagtcgctcatctcttttagcctcagtttcttctaaaatgggggtagtcagagctcccatccagaatcattagaggaacgtgtatcaaagggcagtctacactgcggagaatggattcaatacagttgtctatgacacatctctattttctttaaggttcaaagcagtcctaatatacacactctatttctgtccccagcgcttctgtgtcccactgatcttacacttttccactaaaatgcccactgcagaagagaaactgccagggcctggggccaccacctaaagcaacatcaagggcaaccacgtgtccttgaagtgtcttgttttttctcaacaattcaggtcaagtttgcattctactacgtaagatataagggcttatggtagaaacaattgtattccttctccccctaagcttccactaaaatggcagctccaggcagctccaggcttagcaagagcttcccctggcacctgggcacatgtccatggcagactctgcctctcaaatccccaggaaggcgggcacaggctccctaggaagaggctcccagctctcccaggtctccgtggctctcatagctgtttaaatggaccctgcagtgggccacccccgacccaggcagcgcgtccctgcccagcctctcacccccagcccagccaggaaattgtccctgaattaatcaaagcacttgcactagtcccaactcaccagagtcctcctccagcggccactttgtgttgggtagattaattgcagctgggggaggggagggaatccatttttagaaaatcattactttcagaaagagagcggggttcttctggctgagggaaaactgctgagctagcagctcgggcctcctgcttgagagccgccaggaaaccagggactgtgcgggctgctcctggctccaagggtggcagcctgggcccacgcacccctcctcctgaggccaggacaccccaaccctgcagccctggctgctggtggtctttgcttcctgccctggcctggactcagcagttggatgacattttgagcaggaaggaatcgcctcaatattggccacccccctactatccatggactggctttccaactgtcttctctcacttgctgcaaaatccaccacccagagggcaccaccagcctctgactgcagctgcgggatgaaaagaagggtggggacccctgattacggctggctgccttggattaagtatctcataaagtatctgaaattgccattattgtgggtcaacatgatcagatattagcaatcccacgtggttcaacctaattagcatatggtcagctcttcacatgaattttctccccagtcccgattttagcctcatgaaagtataatacacactttgtgctttggaaattgaggttcagagaggttgtgacttgcccaagtgagtgctcaaacccagatctgtctgacccccaaaccggtgactgtgagccacatcctatttcacatcaggcccccaccttgcctgcccccagcacaccctcagggacaatcaggagttgctcattgagggcacaccggctgagctgacaaacaggtcctttgcaggctgctgagtgttgggagcttaatagacccagcgagaagtcatcgcttgctataggtttgggtgcaaatccagcttccatcacaggctgtgcataggtggtcccgggcaaatcactcacccattggagggtcaggcccttcctgaatcagggaaggcctgcccacgtcctctgcggcgtgggggcacaggcagcatgacccttggtatgcactgacaagtacaaatggcaggtgttgtttctgttgctcagcagtcagatcagcttggtccttccaaaccagaacttgttttagaaaaaacatatacccaactccttgagccaggcctgcccagagagattagataacacagaagtgatgaaatctgatgctatcgcttaacagctgggagactgtgggcaattctttgaacctatttatctgtagaatgggagtgatgatcatggtatccactcgcagagtggctgtgaggatcatatgggacaatcccagtgtaaagtgcttagaacactgcctagcacagagtcaggacatactcagtgttgcctcttgatgatgaagatgatgacaattattcccagcccaagctaagcccacaaatatgcctcgttcatgagacaagtcctgtctgagtaccacaccaggaattgtcagggcagtgaatcctaactgagactccagttgagaccccagggtgccaagagcttatagttcagcagaagagagaatcttacactattgaacattcttcaggacaaatttttttttttttttgagacaaagtttcactcttgtcgcccaggctggagtgcaattgcgtaatcttggctcaccacaacctccgcctcccgggttcaagtgattctcctgcctcagcctcccaagtagctgggattacagacgccgaccaccatgccaggctaattttgtatttttagtagacacgggggtttcaccgtgttggccaggatggtctcgaactcctgacctcaggtgatccgcccgcctcagccacccaaagtgctgggattacagacgtgagccaccgcgcccgcccagacagaaattttttaaagggaggaggcttcttggaggaagtgttgcctgcatcacatcccaaaggataaggaggagatagctaattgaagtggctgcaaagcacttgctgcagaagcgcatgagcacggcgggcctgcagcacagtgcatccccctgcatgcctggaacaaaaggtttctgtgcgtggagggctggggactcaggggagaggttggcagaggtggatgctgaagggctactttcaccagaggtaagggagacccagggaaaacttacaggccctgaaataagtcatgctagtgggggtagagaaaacagaactctgagagagatatttgcattttataattattgatcgggtgaaacaggatggagggaatttgttttttttcattatgggggacaggggcaaggatggggaatccaggtttctggttgggacagctgaggcatctacaggtctgagggagacagaaccaccagagtgatgctgtcatccagggagagggtgtagcctgagcagagcctgagatcgaattatataagataccctgaaatttaaggggcaaactgaaaggaaggagtaccaagaggcaggaaaacttccttccaatggggtaccttctccccctactctgctaatctcaatgccatctgagctgaaagtcccacctcctctgcaagcacctgtggccccaagaccaggcctcctcctgggtcctcgccttttcttctgcctgctctgttgctgatcatctcaggtgtggcgtcttgtcccccagcatcactcacaggcaccgtccaggtccacgttacctccgtgcccgctgcggcacattgaaggtgctcaggagatgactgtgggtgacgggcttgccggcaaaaagagggaagtgtcagaaaccagcaaatgccagactcctcctaagcactcctctttccccaccacccggaatcagccatgctgccagaacccacacacctccacccctgttccagcctctccttcctccagaagccacagcttctgcctcccaaatccagaggccttgcgcaagtggtcaggaggaaacgtggcggaccaccctcccaccttctctccatttcagggagttgtgggactggagccacacaggatcctaccaaataaacatctcaacagggcgtggaccaagcaggaagaaccactcagcccggagtcagatcctgatctccctaaccacttactatctcactgtgtgaccttgagccagtcatttcacctctcaaagcctccatttttgcagcgtgtcctaatgaagatgaaatgagaattccctcaaacgcctgaacattatgcctggcacctagtgaagcattcagtaaatggtagctacaattattaaagagcttccgggcatgccgacgcaatttagagcaaactaaaataactttgacagcccccagtgaaacaccttccctccctgcccctcctccgccgctaccaccctagagttaattagaaccctccttgggtgttttctagagatgagattttgcacttattctgggttacagaactacgatgtaagcaagtttcagttcaatgataaaaagcaaaaagcgaccaggcgtggtggctcacacctgtaatcccaacactttgggaaaggccgaggcgggtggatcacctaaggtcaggagttcaagaccagcctggccaacgtgatgaaaccccatctctgttaaaaatacaaaaaattagccgggtgtggtagtgtgttcctgtaatcccagttactcaggaggctgaggcagcaaaattgcctgaacccgggaggcagaggctgcagtgagccgagatcactgcactctagcctgggcgacaaagcgagattccatctcaaaaaaaacaaaaaaaagcaaaagctacttttagaggtagtaagctccctatcacatgtaaacaagttggccaggatgaccacttggcattaatgccctggagcataaatcagcaatcaacatgtattaatatttcttgctaaccaattgtactgtcattccctttaatgaagtggtggcgccagtaggctgtagcgcttttggtcattttttggcaaaatagaaagttggctgtcctacattggccttccaaaaagctttcatgaaattgtacaggcttatgatattcaaatcttaacccccacttcaaaaggacccccttcctggatataaggttcaaaaccccttacatagacacctgcacagccgtttgtttggtacccaatttagaccatctcttgtgcaagatttcccaaatctaaaacatggctcagatcacggttcagcagcgaaccaaggcaggctgatgcaaagacagcactgaagaggcattttgactgcaagtgccaccagagctaggctggggaaggggactagtgaactgtcacttaagtcccagcagacaagggacgatattgcagagtggaacttgtactctgtgacttctgtggcccaggacagtatttgggagggcgccaggaggtggcctagtccctctgaacaccactgacattcaacccccaccttcatcacccttccagggtctcagcccccaggaaacttctcctggaatccagtctagcaggggtacagtaggcttaggatttaataccaagtgaggagttggcaagaaccagatggacccaggttcttggggctaaacttctccatccatccatcctctaatcctgtctccttcccattaccctagatgtaattccctgtcctcaattctacaagctttgaattatcacccacagagctcctgtaggttgtctcccattacaaattcaagacacaagaaggagggatgtctgggtggctgcaggtctttccagcactcttgaagaccagggctgttctagatgtctcttttgtggcccacgtctcccatcctccaagcactgggctgggaagacgccaactcaactgaatttggatgaatactcactcctccccactccctccaagcagcagaagaaaaaggagttggaggacaacatgaaatcaagtgtacattttaaaaatcgtttaatggaacataaactcctttagaaaaacattcagctaggtgataacacccatagaaaaaaacaccaatcttgtgtttatcttttttaatttggcatttgttatttgcatttatattaaagcaaagtgcatcttttctttatttttcttgtttatacacattgcacaatacataaataatgatgcttataaaacgtctttatatttacaagtaataatatatttatatataacataaaatacatttttttctttaataaatctcaggttttttttcaggagtcctttctctctcaaagcactacaatgctaaatttccaatgagaatgcttctcttgttcatttaaacctttgtagttagaaaaatagcttatgttaaagtctaaacatgctcattgagctaagaacagtgtcgaagtatcatacgagtgtatgagttgtagaagaaatgaaagaagagttaggtgtcagcctaggatggtaccttgggttatgacggaccaaatccttcttggagggaaggggactgctaagcatgtccctcccagggacatccccgcttgctggcctaatagcagagcttaacacacaggatgggagcaggcagtgctgagctggttttctaagtccgggaaaaacctgatgtcaccagggcaggcaggggagaggctgaggggagagggcactgggtgagcaatactgtgagggggctgccccggcagcccttgggaagcccatctcagggagatccaggagcagatggccaaaaaagaaagacgctacaatggcaggggctggcaggaagggaataagacaaggatgaaaataattggttctggttcggccactagcaggctcgctgctcagaagcctgtggacaggcccgtgtccttgatgagggagaggaggggcaggggctttcccaggctggggacagagccgtgctcctggcagctgctgggaccccagccgccagcttgcccaggtactgcctctgccccactgagcgtgtccaaggggcaggagagacaccgcttgggactgcaaacctctctgctggggacatccataagagacacaaaacaaagagcacgttgtctccccatctgccgctcctgcacacgcgtgcacacacagccgcacactcacactcacacacactcctgacaagtgaaatgatgaccgccccccttcatacactgtgtttggtggtgcttggatttctgcttcccctcttcctatcagggtgtcctgccgatcatacctgccccttcttccaaaaaaacccccaacaattcttttcataagctatttctcaaagagcgaaacaaaacagaacacaaacgaggacgagaagaagaaaaccaaccaacaaacaaaaaaaaaacgaccaaagagtttgcatgaaaagcaagcactcaggaggaaaatattagcagcaaagtagtttgaagtgtggcctgctcagctcacgctctgtcccctccgcacgcggctaccggctgttgaagatgacctctagccagcacgggcagctgctgatgaactggcgggtgtagcactggccccagcccttcacaaagctgatctgcacggtaaagcccgtccacggctgctgcataaactcgtggtcattgggccgctgcaggctgtacgccttctcgtagtcgaaagccttgatggagaaaccggggaacaccttgtgtaccaacagcgtcctggagtccgggttgtccagtgtggcggacttgatgaagatggggtaactgctgcggttgtacacccacacaccatccacctcccgcgtcagctggatgccgcagccgattttgctccgcaccttctgcaccagctgactcttgttgtccgaattgagctgtccgaggcaaaagccattcccctgaggtagatcatagaagatatccagagagggctcctggacacagtagagcctccccactctcgtcttctcctcccagtatgccaccacgcaccagtgtgaccgatccccaggctccagaagaagttgggaatctagaaaacacattggcagagagggttagtggggacaggcattggtgactcctagaatgaagacacccgcccccccactgcacccagtcaccagctcatctctcaggacgagacagaaagaaggaggcggtgaggctagtcctggacttgcccaggctcttacagccctttgaccaggaccctgcctttctttaagcataggaagcgctgggtgctgcttctctccaggcccctgcccatcaggagtccagtacaccagcatctgtgcccacctggccaacaaagcctcttctctgcagagcacagatgcaaagggacccttaatagcttgggtagtctgcttttagggcctcaaaaagcctcagcaacgtcctggagttacagatctttcaactggatggaaccttgaaggccagctcctccagccccttgtcatcctgatgagaaaaccaggacccagaaagcctgctgctggagtaccaggggatgacacagccagagctagaacccaggtgtctagactctgggaccacctatgcgatggtctctgggtgcctgtcacccagctctcaaatcagtgccgtggtcatgaggaacctatctggtaaaaataaaaatgagggtggcttgggacaaaaacatctatattcctaataggaaaacagtctcagtgtgtcagcagcagccctgtacacaaagggtgaattcatgtcaaaatgccaaatcacaacatgcagaccggtattaacccgggctaccttaacaaagcttcctccagcccagacagaagattatgtgtctcaaatagatgcgtcccccttctccccttctctgccggcacccccatccccaggggtgccccctctctcccctccttccacagaagcatctggagcctgcagggcgccctgctccgccctcatccctcccctgcaggccccgccccgcttccctacacagtcttcccacaggcagcctgggggccggggtgattctggtaaggtaattttcctcaacaggcacttggaggactttaaaaggggggtcacacggagggaaagggagccccggcggcgggcattctgactcctccttaagtaggagccagcgggcaggcctcagacttgggaccataaatctccccagcccagccagactgcaggaacgctgtggtttgtggcagcagggtggagaccggaagtcttgtatttgttaacaaaaatggggacagcagagggggaaaagcagaggggaagggccccacgtcggtcagggccttgccctcgctccctgcagccccagctcctcctcttggggacctggggggcacaaagcaggggttgagtgtgagatgtgttttggtgtggcctttgtgtttctggagtaactgggttcagagtcaatgatgatgggttgcaccctgcagggggtccatggcggaagatggggccgcatcctgctgccccagcaggctgggtaactggggcagcccaggacactaactggctccaacttttacaggcgtgttaggacctgggaacccactggctccactcagttgttgttgttgttgttgttgttttaagtagcagccagtgttggatggaggtgcccgtcagtaaggccatacaaatgtgcacactgcggcctgctggggcagccacagacacacacacccagagcagcggttccctacagacaccccaagctggccttcccaaatgcctgccccaaaagctccacaaaaaggggacactgaggtctcattcctttccctcaacccccaacccccactaaaaatcaacaccagaaaactggccggtcaccaccccccatgtagcttggaagtccagtgcttgtgcatgtgcgtgtgcaagactgtgtccatgatgtcagtgtgtacgagtgtgtgttatgtgtgtttctgtgtgcacatacgtactggaacatatggaaaacaagacagggacagggagaaggtgactcatcaggcattcacttgtttctgcaaagtatccatcaactgctaataaacttgtgagcgctggcaatctttgaactttcttgctgagggaactcagctctgaaggctacaccaaagacctgaacgcccagggaaggaaggacacattggcatcaagtgtgaagcgggggagaaagccctcttccgggaggcacagcacatccacccttttggtgtggaggagggtgttctgaaacacaagaagcttttgcttattttcccaattcgggacaacaaacctggcctggaaaggaagactcgaggagctgctgggaaggaggcgggagggagggtgggtgggagaccctcagcagagcctcacaatgctttgtttcatgcagccaggacccactgaaacctggcaccggccaacaggaggaggaggaggaggagcaagggagtgagtggagtatggacctgagatcgaggtgcccccatgccaggcctgtcagccacctaggcaaggggtggaagccttgtctgccaagggtgggggcctctgggggcagaggaagctgggtggggactggagcctgagatctgtagcaggacggggaagtgtcaggtgggtttctgtttcatctgtgcagcccgccagcaatgtgctgccagacaccccctggaaaaagcatttttctgctgaggttaatggcccagcccagaaaaactgcaatgcatggatgtcgtgaatgctgctgtgtgtgaacaagggccctgaagtccatttggtgccctaacccaccgcagggagactcctgcctgctcctccctcgctgtcccctccagctcccccaccagcagcctctgtcctcccgttaggacagctccagtctcctcctgccgggactatctctaagcacacacaaaaaacaagctttccagcaaaaccattcggcaacagcaaaggcccctcgaacacacacccttgtgtggacatcacaccttctggggaccccgcacgacatcccccattgccactacagagattcccctttgccctgaattccccgccatttgggctcatttctgggaaatgctcagcttcatcttcacagaaacacagttccctgaatcgggcccacagcccacacgagtctccccacaaaggtctgtgtggacgctttgctcccagggacttcccgggccacgtgtcgaggggctgggaagttcagtcagtacaaggactaaggaagagccttggcctctcgctgatagttaacctctgaaggcaaaactcacagtcctttgttaatttccctcagctttataaccttttccggtattttccacaaacttctccccctccccagaaaactgtacaggggcttgttttaaaacagtatgtgttcattttaaagcatccaaaagaaaagctgtgttgtaaaaagctcactaatcagatgcctgctcacagttgtatctttttattacagtgtggggaatttttggagcaacaccagaaaaatgctgaatctgcctaaaattcctttaaggtgttgcccccccccaaccttccccatttcccttaaagcataaaatcctccctttaaagggaagggggaggtgggtgttgagaaaggagaggacttcagcctgtgtttgcgctccaactggggaagaccacttagcaaggagctccctgactcttacaaagagttatttaattaccctgctcatgaatgaacagaccagacccttccaggagaccagaggctcgtgaatgaacctcacaccccaggtctcaatggcacagggtgaccaggcctcaaggccacattttaggttaagcaaggaattttccccttcttaaatgtttttcttttttttttttgagatggagtctcgctctgtcgcccaggctggagtgcagtggcacaatctcggctcactgcaagctccgcctcccgggttcacgccattctcctgcctcagcctcccgagtagctgggactacaggcacccgccaccacgcctggctaattttttgtatttttagtagagacagggtttcaccgtgttagccaggatggtctcgatctcctgacctcgtgatccgccagcctcagcctcccaaagtgctgggattataggcgtgagccgccgcacccagaccccttcttaaatttttaatttgaaggcgtcaggagatgagaaagaagaaaaatgggaggaggggggaaaggccttgctcagtgcctcaacaataccattctccacctgaaggcagagggcagagaggcagagcagctccaagaacagccatggggttatgagaacacgggcacgcgtggaagagaagctatctgggcctgactgggcccagacacacaaagaacgtacttgtggggagggggtcccccaagattccatttaggaacaagggcaagcttggggaaaaaagccagtaaagacatgagctccatcagctgatgacccacggttaaatgtgcccaattgctagggtaccgggagctggggtcaaaggcgagtgaggacgggtctccaccggctctcatctctgtgaggcacttggataatgaagtgatattcctctgccaaagtccaacagggccacgggcctatcagccccctcctccatggtccagcagagcagaaggctgaggacggagaagttggggaggaagggcgcctgggcaggcacggccgcctcctgcaggctccctgtgccaatcaggggcaaatgaagggcagaaatgtggacacagacagcttgcacctggcaacctgggagcgcaaacatcaccacgcctcgctaacgccaggtccagggtcctccctcctcaggacccaggcgccaccaacggttgcctcatcctgtctctccctccacaacggacatctcaaaggttaacagcacccatcccctgctcccaaccctgtcaggaaattggctgttctgatatcaacaagccctcttcagggacaagcctaagataaaaggggactccagtgccaatccatcccatctattctcacgccaaaccatcataattcacaaggacccttgctggtctcttgttttcaataggcgaatccctcccccaaatagagacgcgtaaaacttgctgagatatctgggctaactttaaggggctgtctctaatccaccatgctcacagcctcatccaaaagaggaaataggaccccagagctccctcagactcctcaggaaacacagacaatgctggggtttagagtgagttcctcatggaggaaacaaaccaaaatgtttcaggtaaactgcgagttaatcagaaaacactggggcccaacccatctccaccaccccatgctctctccccaaacagatcagacgatgaatcctggctggtggaaggctgacctgagaacactggattttttttttttcatgctttgcagcatctccagtgaagtgagatggctggacttgggggtgggcagggggtgccacagggtctccttcaaaggccaggctgctctctggttcccgggcccagcaggcttcgtttccaccccttagcgcattctagccatggcagaacccccgcccctgtgccaaccccagaggtgagccgaccagctacaaagccagatatgcatttcacaccaacctcgcatgcagcctcccggtaagttcagctcatccctaaaacagggttcccccaaggccagcctcataaggttgctgtaccaatttgatgcaaaagtgattggggccagcttgtggagagtgctgcacacacgttggtctcatctctgaggctcctgggttctccagccgctcagaaaatgcccaccagtcttcctgattgtctccacatccccacaccccatggtagaacagttctgggccaatgcctacacttaataagcatttactttgcataggctgtgttctctaagtggctcatgacaaccctctgaggctgcatactatcaccagcctatcttaaaaaaagggagtagtaggggtgaggcacaagtcactggccgaagtgcagagctgcaattcaagcccagaatattgcctggtgtgagctgtggacacaggcctctaaagccaccaagcccactgttcctctccaaagtgtccttcagaacacactttggaaatgctgcaccagcttttagagctgcgcatggggtgcaactcccctgcagcaagaagtggggggtgatacggcttttttgccagcaagctgctctgtgaccttggccaagtggcttgccctctcagggtctcagtttgacctgtccataaataatgtaaaggggacaagggaagatggccccatgggcccccttctgccttcatggtctctggctggactctgattctcagtattaaacaacactggttccatttatttttactaccttccagagagtaagaaaaccactttgaggagcagggtacatttttgcatttaatttgcaacaataaaacaaaataaaatcaaaagggaaaggaggtttgagtcaggttttgctgtgtccatctctaaaccaacttttttttttctttaatttcagagtcagaaatgactttttactctgtcttactattcatcaccctcaagagacggtgagcccccaagagaggatctcttttatcactgtcatccgtccactgtctgcccaggcttggttccctgaagtttctcctcccatcaccgccctccttgccacctctcccaagcctacatatttcgcagatcctgctggtctagaacactaattagtgactgtgtccttacaaattatgttaaataatcaattcctagaactaaaatgtactccctggctccccaaactggtcccacaccacctcccaaaaccccccaagcatctgagtctgaagcccccaacctggggatgaatgctcctaagagcatttatctcgccatggagaatgtaattgagggtggcacggggcaggggaggaaagccacacaaatcaaaagctcttgtctgtctcgccagtcaggctgacgcggcttcctgtgccccagcattcagccatgcaaattacagcgtgtacccagctgcctgcagccactgctgtctgaggaggcccactctgcccaggctcctctgagagaggcctcagaggaagggtggggactcccgacccagccaactccattcataatattgacagtaaagggcctctctggctgctgtttagtgtgcatgcagtcgaatcatttctcgagttcaaatttccagatacttcccctccatggtacaccaaccaggttcccactgttaccccccaagtaactcagagcagctctcttcagaaagggggttcacatattagcaggcacagaagccctcagccctgcatggcattgtctgctcagctgccttccctctgggcatgaccctggcacccccaggaagacacaagggctgggacaagcatggaacagaaagtctgtcgtgtccaagagaaactaccaagtcaagtctcttacctcacccacctacccacctgccaccctgagagtgtaggagattccccaaattccctatctggattcccaactgggcagctggcactgaatgctgattcattctctctctctctctctcaatctctttctctctttctctctctctctctctctcactcacacacacacacacacacacacacgttaaagcatcatgaaaatcttaatacaaaccactgcatcattaagccaattttccaaaaggacaaaacccctagaaggacaggacagtttttccctggttttgcaggtggtgggggggctctgtgtgtgcaagaaaccaagctacttttgctgtgggcctcgttttaataaagccccaggctaccaggacccctagtccttggaaggcatcacaggacccaaaggcagacccttctcccaccctatcccccacagatccaactccactccagtttctagagggtaggaaaactgtccgaagacatggaaaaatacagtgagaaacaaaagtccttttcattcctcccctcccccggctccccttgttccataacaattatgaaaactgttggatgggatggcattttgaacatttactgcattccggccaataaattccaatgcaggatccgatggaaaagctccttcttctcctgcgagctccctccctggcccccctccccgtgcactcccagccctcattccatctctcactttacaacccaataccagggcctggccaggccagggccgcactgtacttagagggaaaaacaacagtacgacagcctggagacagcgtgcagactggaaaagttaatcattacttctgtctgcctccgtaatctaatctctcccgcttggacacactcactgttcagccatcccagccctttcacccctaaagcacccaggacctcccagacccaagcccccactccctctggcgggtcctcccactcctaacctccagttaggaggtcaagggaataaaagaagaatgaaagggtcccccacccagaagctgctgtcacaaggccctggagtccaacatacacggccagctgctctgtgctgggtgccccacctttcagagcctccaggcctcccataaacatgggctcccataaatgtgagctccaatctggctggtgactgcagcagcccagcactgcccctcccccaccgcgcagggacagactgtcccctccccgctttctcactccctctgccccaggattcgccctcaagcccaccccggtgggtagggctcccccaccgcatgcgatcggtgtgtgccgacacatgaggcacaagtcaaggaggccctaccgttggcgatgccttaaaaaattaaacacagaatgacagtgtaatttagcaattccacctctgggtatatacccagaagaactgaaagcggcgactccagtggtatttgcacatccatgttcacagcagcattattcacaatagccaaaaggtagaagcaagccaagtgtccatcaagcaataaatcaaccagacatggaatattcatacaataaaatattattcagccttaaaaaagaaggaaattctgacatacgctagagtatggatgaaccctgagggcattatgttaagtgaaataagccgatcacaaaaggacaaacactgtctgattccactattctatgaagtacctagaggaggaggcaaattcatagacagaaagaatggtgggtgccaagtgctgggggaggggagaagggaagttagtgtttcatgggaacaaagtttcagctagggaagatgaaaaagttctggatgtggacggtggggataatagcacaatatgaatgtacttaatgccacagaactatacacttaaaaattgttaatatggtatattttatgtatattttaccacaataaaagaaaaaggcctcagctctcttaaggctctcctttgcacccccataactagtcctcataagcatagatttcctgaactggggattccacgggtgggactgggcttcagcaaagatatcggccccctgcagatgtatacaaattgtggtatagcatgcatttttctgaacagagtcctcagctttcacccatacttggaagagtttgcgagccaagagacagaaagaactacaacctttttattttaaaatggaagcagtctttggcttccatagggatatctcatcaatagggggatcattcccacacccctcaaatccaagagacaaagatcacagatcaccgaagggacttggcagccaagcccaagcccttattttgcagatgagaaaactgaggcccagaacacagaaatggctcctgcaaggccatgtggccagccaggggctgagacactcggcctcaacccaggagagcaggccagcctctagtgacaggaaagtggaggatgctggccccgacattgtaattctctcccagccccctcctgggactagggcatcctggacaccctggggggaaggtgggggggcttctgagtttttgcaggccccacgatcctgggctcttccccagaaaacagcccccccagcagggttttgattgtgcccccactgagcaggagatggggcccatctatttgtaagaacggtatggtgcactcagatcacactgataactaactttttaattttccctcttggttactgattcatgagggggtggggcagggctggctcagaggctgcagtgaggctgacaaggtccccaggcccagctcttgatgatcctcacttagcctgcaggggaaggagacacttaacagcttcatgaggtgactggaaggtgggacaggggacagggacaatcatttaacctccgagtgagccaccccagaaaatgcagacagctaatctgccaacggcacagtcatatcttggcgtcttattgtttttgttcctgttgagtgacagtcgcagatcaaaacgtaagaaagcaatactgaaatgagcacacagtcgctggcctggttatctgagttgtcttctggctgaaagaaagtcccgactttgcaagatgaaattggaattgagaccagatcttccctttctgctctgatcaaaccccccagcaaaagcagctctccccgccttttcttcctggtggggcttcacggaggagcgagaagagtaattcaattagtgaactccacagagcttggaagccatcggttggccccgggggaacagacagagaaggatgaatgtgaaaaggaaacaccctggtaactgcatcttagattatttcatccaaacccaaccccagacaggccagggcctcacacacagggctgacacctcagaaacgggcttaaccctcagatttaaaattaaaaagcaagaatttccttcatcccccagatggtcttcgttgcgaatcaagtcctctggagttacaaagggaaagtcactcctgggctttgaaaacatcccacttctcctctggctgtcaagacattagatactgtctttccagatgtttccccaccccttggccgtggtccactgaggagcctggcgctaggctggtcacttccactctgtgctgtgccccaggtactaccagggtctggagggtggattataaccacagctcctgttcttcctgctgtcatcttacaatcagcaagaagcggggtggggaggcgggctggaaccaaaacccgggagacctacctctgtttatccacaagctttgctttatctcaattctcaacagaccacacaaccaaagcagaagtagaagtggatgactcaagagctaggcccatcccagggggcccaccctgcacctcccccacctatggcctggcttcatggagggaccaggctcctctgtcctacagaagctgcccctgcctgcctccaggtagaggcaactcctagtcaatcccccctcccgccggctccatccccatggattcaacatcaccttcggacaagccattccaactgccaattcttaattctaacccagcccaggaactggtcctctgcacagcacacagcctggcacataataggtgtcaatacatatttgctccataaacaaaccacagggacacactggcttcttccaaagcagcgggcccacctagcttcacacccggcagagggaggcacatgtgaacccacctgagaggggagcacaccttccaagcacggagtcagccagaaggaccaagtccctctcctggactccccacggaggacacaagagggaagccctgttctgcgctaggtcacactcagccgccgcggcatatgccactgagaggtgtttccaaggccggcgccggcccaccaacctctgtgggcacaccacctgcccacagcattctgctttggcgtcctgctctgtttggacaagttgccctcaccaagtgttcaacaatgcttttacacaccccagggcccttgttgtgttatgaaaacaaaacaaagcacgctaaggaaaaagctgggagggtgggggtgagcgtgagtggagagcgggccagccacacacacaggtctctttctttctggtctctgtcctaaagacggctccttggcagcacgggccggggcactgtcccatgccctgtgtcattagaacaatgacatcaacaaagaggggatttagaaacccagagacaaaaaatggaactggaccttatctgcaccactgtagggctgtgataagccccctctctgggagatgcttctaggtgaaccatatcactccttcctccaaagcacagcaccgttactggacacagctgtaccagggcagctccgagacccatttcccctccactcctcactagcaccctagaaatagtctcaggaaagttacagaactcctgcaggatgagggggacacggtggcttgaaaacacgaaggcagccctgagttcccggcggctaagtgccaggtgcctctgttaggggaaggcagtaccgggggtgggtaaaaaggctaaaggcgtgagtaaattcttacgtaccccccatcaaaaaaaaaaatacaatcttttttttgcaagttaaaactgagctaatgacactgggtggggctcagtgttgaggactccccagccaaaccaaaattagcttccagccaagagctgcttggccttaccatttggggaaggaagctgaaaaagtcatgaaagattctttagtaaaatgggaaataaggcggcagttaacatttcaactgaaggtgacccttctggtaaaatatttttttaaataataaaaataacataaagttctcaaacagcctctttcttaaagaaaatggcctacatgttctcgtgggagtggaagggaagaaaaaaaaaacacaaaacagaaaacaggctagccgtttctcagccactacctttcacgaaccacttttctctggagttattctcaaaaaaaaagatgatgcaatttcctgtcttgtcccaatatttcctgttaacttacaaggtgaaagttatcaccctgttttaaataactgtcctcaacaccgctgaaagtcccttttcccagccagtgcccacccctatcaaaaaatgtccccatcttagagtataaatacgatcattttctacaccttttaagagttggcttcgtaagaagcctggttctctctctagcagatactgaatccacggggcaccttccacgggagtggaagcccacatctcccaggtgaacccacagagagaaacagagaggctggggggcagccgagtcccccaagtgagccaacaggtttaggtagagtggccgggatcaggtgagtgttgctttcttggtgtgttaaccactaaattgagaactgtgcctcagcagttaataatatcttcccgctgaaaatagcccggagaggaagcctctgtgtgacagtaggcaggcagccaggcttggggctagccattcaataccgagcgagaggtggtagggccagtggtgacctccctgtggctgtgcttacagtatcctttcacgaggctcccgcaaagggagggtgcccgggccagtcacctacggccactgcagccctagaacttgggcaaggacatcacagggactggggtctccaggggcccaggaagggtctggatcaccagcttttggagccaaccctggcaccatcctggttcgcagtcactgggatgggcaggccagggggaccccgcagagtgagaacaagcatattcacttcccccagcagaaaagtcaggccgggaatcaaaccagagggaactttcctgtctctcatttctggaacccacgaagaaaaaaggaaggtcgaaggatcagcacagatgtgtctgcttgctcaggtaacacacagcagaaggccaggcgtggtggtacacgcctataatcccagcactttgggaggctaagtcgggaggatcacttgaggttaggagttcgagaccagtctggccaacatggtgaaacgccctttctactagaaaaaaattagccaggcatggtgtggcacgcctgtaatcccagctgctagggatactgacgcatgagaatggcttgaacccaggaggtggaggttgtagtgagccgagatcacgccactgccctccagccagggtgacagagtgagactccatctcaaaacacacacacacacacacacacacacacacacacacacaccacacacacacacacgagatcccaggcaggctaccagccttgctccctggtccatcaatgtacttcccatgtgacctcagggctgccaccaaaacaagtgtctaccatcatcaggtcctaggcaactaacagaagtctctccaattttactctccacaatcactgttccttatagattatccaagtatctacatgtatttaaaacctaccgctggccattttttggtcaaacttgtggtaaaatacacataacttaaaatgtgccaccaatggcattgaatacattcggtgaactgtgcaaccatcaccactctacagttccagaacattttcatcgtcccaaaaggaaacccggtcccatgggtcccttttacaatcccattcatgacagcaaagcaaaacagtggaccatgtatagttaataatagttttctctcaaatgtctctacaaagaagcaagaaagttatctgggaagctgaatcccgagggattttagtgtgcgagcaagtccaggaaccagcactttacaccttttttttcttctgccaggtgaagacaactgctttgagagtgctgctccgagttcaaggcctggaccgaaggaagtaaagaccagcctggccatcataattctgcaaggaattatgacacagtaacaacaataataaaggagcaaagaggccgggcgcagtggctcatgcctggaatcccagcactttgggaggccaaggcgggcggatcacctgaggtcaggagttcaagaccagcctgaccaacatggcaaaaccctctctctacaaaaaagtacacaaattagccgggcgtggtggtgcacgcctgcaatccaactactcagaggctgaggcaggagagtcccttgaatccaggaggcagaggttgcagtgactcgagatcctgccattgcactccagcctgggcgacagagcaaaactccatctcgaattaaaaaaaaaaaaaattaaaacattaaaaaattttaaaaagaagcaaaggaagccaaacttgatcatgaattcttcggcatttcctcccttttcactgctccaccggctctgagcttgccacggaggtcccataggtgtacaagtctacgcagctacagtcaggctttgctaagtaaaggcatgtgtgtgtgtgtgtgtgtgtgtgtgtgtgtgtgtgtgtgtgtaggaagtgaggggcaatcagcatgctacagtgtcaccaaaagtgacaccacccaaagcctggccttcacctggccctctccctttgctggcccagttcagcctggggacaggatgcgtgaggcggcagcagaccatcttgtctggccggcagagcagcccaaatttgctccagagattttaaatgctgtcaccctgtatttaacccctgccggactgcctcattctttccaggacaaaaggggttttatcagtaagcccttctccagggggaagtgcatgacctggggcactgcagaagaggcggggtccaggactggtcttcaccagggtgtgggtgtgcaccaggtgagcccgccccagccctgactcatcctgttggcaggtgtttaaggagaggcagaaggtgtcccctgagttctaggccgtcatttctcacagtggcctgcagggtactaaggggatgggaaggaaggagcttgctcatggtcacaagcacctgtccacctgagtcccccaaagtccacgctcatgagcatttggatgaaaggcccacatgcctgtgagctcaacctgtgccccctgccctcactccacaatggcattagagacctcagtgaaaccatgagctgttttgtagccaggcagggggaggtgacttaatttaaaagcagagcaacaggcgcccaggcccaggttcccagttcatgatcacaattccaagccagacaatgaataattgttcacgtgcagctgattaactttccttaaaacaggatggagcaatgtttcctaagctacttggtttgagcccaagtcaactgtggactgagccaggggtgcattttcagattatataggtatttttgaaggctctcctctgagactatgacagatgccagcaaggatcaaagagaaggagacagaaacatccttggatgctgaatggatactgactcaaggacgctcccatcccccagacttggggactagtagccacatatgaatctcaagcaaagagttggccacccttgggttggaggcatggtgccgggtctctccaacaagcatgacttcgcacagccaagagatggagtttcccaggacacgtgagcacttctgtctccactgcctcctacctccctccttgagatccatgggagcacttcttttgaagtttaaataactacaagtggttgctggcttccaatccctaccctaactgggcaggtccatatggctgaggcccagccagctccagacattcatatataaaggaggaggctagaagatgagtctgcagctgaataacctacaactcacaagggagatgctgctccctcaacccactcaaaccaggacagcagacaggcaaaatgaaagcccccagacagaaactccagatggaggctgcaaagatgatagcttccaacacatgctctgcattcccagtgatccccggaaagctctgggagcaaatcctttccatctccacgacggagctgagcctagaggcttcccagctacatcagacctctcccaggtgatcttcctgagccatgacacatccatgtccaagcagcagcaaggacctgttctggagttgcatgcctttcaaaagacacccatcccagagagtcaggcacagactgccaaatcacaaagcagaatcaatccacaaactccaccccacaagtccacaacctcttggagaggccgccctgacatcaacccaccccagcgacagggacccaccctatcccagagcctgcctgtgggcatccgcacgctctcatgtgtttgcgcacgggattgtctatctgtacgtctgcggcaaaacccacccacccacacacccacccccacaacacacacacacgcatacacacacaagcttgcacccagcaatccatctgtctcagagagccagctgtcaaaaatgaaagtacaatctcctggaagcaagtcactgccttctaaaaatgtcccattttcccagaccgaggaaacttgcaagggtggggtgtgtttcactgcaagtccctaacgaccaggcctgtcgtctacccacccccccacacccccccaaaacaaagctgcaatgctggaattccaacctgcagccagcagccccgcccccgggctcctacccgcccactccccttcctcccgggcagtttgcaagggcgcaggaaagggaagggccagccttggagtcacccctgcatttcaggagaggaccggcctttgagcacaccccacccccacctccgaggcaccacattttcacattcggctgttttttctttcccttcttcccttgccaagagaatcaagccctggctcctgctgccgaccttcctcccaccctaaactgagccccattcattaagcccgctctcagccagggcaggacaggaaggaaaacagcacacagggcctgtgaaagaggctcagagaggttatttcaaggaggaggagggagaaactcctcagttttcactgctccccaccttgctgccaggctcccaccccccaacctcagtgtctgctatgccccttcccccatccagccctgccacatccagtcactggcctcatccacagcaaggcagacacacccaggccaccccccatggaacgatcaacttcttgaaaaggaggaggtttgggctttctccatttacaaaactctctgccctggacaggggccaataaagttcccttttggaaggcattctcgctacaaagaggacagccctaggttttctccgtgcccatcacctcccctccagacgcccccaagccggtgacatcaacccccaaaacagtgtaccctccccaccatggcccattatgaatacactgcaccaactctgaacggaaagaagaaggagctcaaactttgaagcctttggaattagtaaatcaagagctgaaattcaaaacaaatgctcttgccatgtggaaggccccctcttctctctgcagtcttctgaagccacactgcccttcagagagtcactgcttcttcctggcagctccttattaatatctgtgtctacaattacctggaggggtgaggggaaggagttaatgattgttttacccccagtttctttctaggactggaagagctttggggaaaaaaagcccacccatcggccaggcgcagtggctcacacctgtaatctcagcacttggggaggaaagggtgggtggatcatccgaggtcaggagttcaagaccagcctggccaacatggcgaaaccccatctctactaaaaatacaaaaaattagctgggcacagtggtggatgcctgtaatcccagctacttgggaggctgaggcaggagaattgcttgaacctgggaggtggaggttgcagtgagccgaaatcgggccactgcactccagcctggtgacagagcgagactccgtctgtgtgagccgaaatcgcgccactgcactccagcctgggcgacagagcgagactttgtcaaaaaagaaaaaaaaaaaaaagcccacccatctcctgagggcttcacaggtcacatggcacgggcgggtgaggaggcactcaggctggtatctcagcctggtgtcgtcatttcctccggcaggggagacagacaagatgttatcaagaagacaaaccttccgaaaggaccctttcaaaagctgccacttcccttgcttatttcatgtggtttggaggggccggggctcctccctgcacattcagggtttaaaaaataaaaccatctaacaacatcctgagcgtgttattctgctgagaccctttcctctcattggccttctttctttcaagaactctctcagccttagaaagcagaaaagatgcagttcacacactgctgccttttctccctcctcaactcctctgtccactcccaccgtactgcctgaagccccctcccttctctaggtccctctttttcctgctcaattctcattagaagctttgagtaaacaataccctcagtctcagataacagagtatatattgcattgaaatgaaaacaaacaagggtctccctaaagacgttctcagcaagctcagttcctgaagaggagagccggggagggagccgtccgggaatgaactttgcctgagccagccatggaagacacaccaccaagtagtcagagcaggtaccccacaaaaaagggtgcccctcacacaagaggatacaccacaacagggcacagcttctattcgagctgctaccacgtgatcctacaggcaaggaaatgccaaatgcccaaaactctgctggaatttctgtttttaaggtcgttttccctcttgcttcagccagttcttagaaaatctagtgatgacatggtggggatggaaaaacaggtagaaataggatttcttcagaacaacatgaaatgcgtcccatgtacataaccagtgagtttctctaagtactgccctcttttcgcatcctcaggaacaacaatgctctggctaccccgtgcctgtcagccagccccgtgaccccccagcactggcattccaggccttcacgcatacctgtgagccctgaggaaaacctgccccgctagggaacaattacagctcctactgttggcagtgctcccaccctggtgctcccagccccagacatgtgctgcaaaatcctgcagcaggctgggctgggaatcagaacttgggagggaagcctcagatctactctgaaatcccatcgtatgcttgggatctgtcttcaacaagttccctaaaggtgggtccattccctttacatcccccatgcgcaaagagcaaaagcaaaaaaagagctcaaatgcatgagttaatgacaccaaagtcaccaagctgaagccccccaagccaggagctgcttaaaaataaccgggcaacacttcacacaccaaagcaatccccagctcgctcttgtctccccgtccacggaacggatccagtgtccagagcgtaaaggactgcaggatgaggagctgaagggcaccacaatgtcaccaccgatgcatccaacttaaggcatataaaaatgagaatgaagtccagaccagctggggtggcagaaggccacccccattcctccagtctttagcaatttcaaaaaaggttggaattgccaggaaaataagagaaagcatcttacctgaaagccccccaggggccagataattcgttccccctgtttcagcggaggaaggcacagcatctggacagtctgctgtggatttgaaaaggggagagaaagaaataaatacacaaataaaaacaccaagatccatctttaagcacgctctaaacagcatgaaagacaaaccacacattccaaaaggctgactcgcggccttgatgctgattattaatggtctgctcaggcttcactgcccatcgtaagacagaccacagcaccttgtcacccgtctgggctccgggcagccagttaatcattactcgagtcaggctcaatgagactggctggaatttctcttgcattaccagtcccccattacggataccaggtggttcccaaggtcaaaggaggtttgggttggactttctcaaccctggttgctctgtcatccctcatcaagggcagaaggctctctccttggagcccatgtcctctctgccttcatccttttaaagacaggtttcccagttcttgaaaacattctcaagattgatgttgggctgccgggacttctttccccttttttaattgaggactaacttaagtagagcaaagtatacaaaatcccaagtagacgcaatgaatgttactcatgtatacatctgtgtaaccaccaccagatcaagacagagaacattctcagcaaggctccgagccggaggggaaatgttctacctctcccaggctagtccaaacccctcatctctggaaaccttcccaggcaaccccagacctgctaaggctctctgccctcagttcctataaaacatttggcacccaacactcggagtttcctcactgatttttacctttagattgcatctgcccttaactagacttctcttcaacttctgtcaccctcaggtactctgcacagtgacctcaccgttaatgaggataatgacaattccagctgagaaacagtctccacaaccgccctccaagcaattaaagcaaaacctaatgtccatgaaccacaactcattagtcccatgaaacacaaatacacaagaccctgtaagcttgtcatgcaccactggcagcgccaaactccctgaagtcctagcggagagcccggctaaggaaaggtgctgcccaggtccgcagcaaacacaacaggttggatcgtgcagacaccaggcctcctaccccaggccaccaggacaatgtccctgtgggtttccagttggaaccacttggccatgctggcaaataggaaagccaaaaaaaaagagcagacgggcaagtagcccatgggaatcctttagtggcctacacatagccccaaaccatctctgggtttctgctgtctgccctcttaatgctaagtttctctctctaactcagggtcactccctctcccacattctcaaggctggaaggacaacttttcaagaactctcctaagcgggcgaggggcagaagtggaggcaggcgtgggggtgaggtggctgcggtgggtagggggaaagaagactgtgtgtgtaatctcattttatcagggtaaagtctaattcctaacaggaatatacagttttacaggatacacttaatcaaacagaaaacaatagaggcaggcaggaaatggagttacttgttaaatggtgtataccctgcactttctaaaccattttgatggccttcatcattttctagagataggcttctcaaccctctcctccacccactcctcccagatggaagacacccccacattaaacataatgacttatccacagccactccccgccacctttggctggcagaatcccaggggcaaggtgtgtttcaaaggaaaagccgggcatctcagagcagagctgagaccacattcagggtgtcagcccatctcagatcaaaggtaagccagctccacacaggcaaccacaagcatttttgtgaaatggtgctctgcccttctgcagtggctttgatctcaagagggatttacaaacgttaattaagcctccctaccacccctgtgaagaagcaaagtatacctgttccataggcagccaggtaaactgaggcgtcactgactagctcaaagggccacccagtgagctgggctattcccaagagtccagccctatcccatggctctcactccccaggcaggctatggagtccctaccctctttcctggaggtggccaggccatccagactggcctcaaggttaaaggagccatacctccatctctcacccacagaaaagctccgcatagacagatctctgaagtcagggtctcaccttaggcctgtgtcgcctgttccccagagcccaggctggctggcagacagaagctctaggccactcctgactcacgcaacactaagtgttatcaagcacttggtaagcactaggttctgcgagagaaaaagactcattcctttctccgagcagctccaacagagtctttgaaaacccaaccctggggagcagccaaggagcgaactattgagaatgagtacaaggtaaaggagctgggagtcccacgatagtctcagcaactgcgttctgagcttcctaagtactgttaaagacagaggagcccctactcaccactgtaccccaagggtcccagctctgccccaggtagttcaaccaacccagaactcaaatgaaccctggttataaaagaacacagcactgccaggtgcagtggctcacgcctgtaatcccagcactttgggaagcagaggtgggcagatcacacgaggtcaggagatcgagaccatcctggctaactcggtgaaaccccgtctctactaaaaatacaaaaaattagctgggcatggtgacgggcacctgtagtcccagctgctcgggaggctgaggcaggacaatggtgtgaacccaggaggtggagcttgcagtgagccgagatcgggccactgcactccagcctgggcacagaatgagactgtctcggaaaaaaaaagaacacagcactgcatcggaatcctcaaatttctaggtaggcacatcatcatgcctgtaaaatgaatgactgaaccaatgaatgaataaatgaatgaatgacctaatctctttcatcatgctgattttaaaagaggcctagaaaagttaagagggacctcggttaagagagaaacgcagtgccagatctcaggtcaagacaccagacttccgatctggatttgcaggctggatctgcccatggatactggccacctgggtccctcaagagctcacccagcaaccccccaaggccagccattcctcaaacctttcagaccatcagatacaatgaaacacgggaagcagagcccacacagctatccccgagatccagctttaaacagcaaattctgacttcttgtgggatgtggaggtgggggtgtctttctgacttctgacagccacaagtcacaactggcctcccctaggttcagtcatgtgaacactctttcaaagaaggctctcctggttggaccacacagtacctaggtgtctaaagtccaggcctcccagatgctgagtggagtggcttaaattatagcaaaatggagttcctagctttgagccctctgtgtctccaaaggctgcagggtaccaggccccagccccattcccaccaccttttcctaagatggagacttcacaggatgtattcctttagttgtgcaactggttaagattttaacagttgtccactgtaaaactttgtgcctgtttcatctagtaacccaagaccaaaaattcaacctaagggacatagaaactgaagaatgtaaatggtccatgtagattcccgggccaaacattctcccatacgcaaaatggggatgaagacctgggtcagcgcccatctgtggtctgacctcaatgcccccggccacagcagctggcaaaaccagccccagacctgtgaggggggcggggggggtgtgctccagctccagacctggctgtcctccaatgtggcaggacaattcccttcgtgggggctttgtctattactgatgctaaattcttacacagcagcgccttttctcatttctttttttgttctattttcaacaaaacgttttgggtgagtaaccagctgtcttagtttccgattggcaggttaatcacttcctattggctgatctggagaacttttctcccccttggaaatggcacattcctgtctttgtggcttctctgtttacacacattttgctacctaatgtcaacacttgctaatgaataaatatatcactccactcaccgaaaatgaggccctggcctggcagaatgactgcttaaatcctgagaacagatttatcccagtgtctctgcaggaaacccaagggaacatggcctttcttttctatggtttttggaggtttctgggaacatttacccctgctggtctttatccctggggctaaggtcactgttctctctcttttaaggaaaacctccaaatttgaagaatatggaaggacaaaaaaaacaggtcagaggtggccccttggaaaatgaacttcataaaagaattcttgattctttaagccaaaacccagtcaagttacagtctttaggaaaacagagcttggtaattccagttaacgtttgttacaaatacagagagctgggtatctccttattaataaccatttatctggtgttttgtaaatcgaaagcaaaatatcacatgctttgcgggccacttattagaccggcaccaggcaagcaggaacgccttcccaacttgagggagctggtagagtcccaggaggactggctgcagagtatgggcttcggttacacgttcattaaagtatttaatttatgacaacgccccagcaaaacttttaattagtggggggaaaggcccaacagccaaaacgcaggaggcggaaggacttgcagaattccaggagctaaatggtgcccaacccttcacttttccttctcccagaaccttggcaaaataaaaatgtcccaagtattaatgtttttttcaggcaccagtatacaggcacaaaaaccaaggttacatacaacctgtacttttagcaaacagatctatctcctactgtaagagggagctccaggaatttgggtttgtccttgttgtcacccccaagttcattttgctgaccctgtccccagcactgtgatgtccagaggatggacccctgtgctgctgccggccagaagttgaatgcagacaaccacaacagggctggtgccagtctcaaatgggcttctgccatggcttcatgccagccagtgacaaagcagcagacaggcagagctatgcttcaaactttgatagtccctatggcgaatactgagaaaaccccgggagaggactgacttgcaggtgactggagcaggaggaacctaccccccccccccttttactggctgttgcctatacttctgaaaagttctagtgtctactccagaccaaagtcttctttgcacctttttaaaccgtcttcccatctatcgaatcaccctttccattattcccactgatgctcctggcactcactaagtctccgagttatccccatcaaccagtcctatttggttcccaagacacttctctctggactaaagcttccacgtgttaaagctgagcccaccggctacacagcacaaatacatgaaaaaggaacaaaatgtaaagcatatcaagggaacgtctttgcaaaaacagcaaaaaacccagccacaacagaaaaattcaccaaacttccaacagaggaaacctagaaccaacgtgaagcccagcacctccccaagcctttgcctacacacaaaaagccacgttctagaggctctatttctaacttaagataagcaggatattttaaaaatcatctactcaccagttggtttgagaaaatccatcgggtatctggagtaaggaggggggggagactctgaaattaaaaaagcaagagaaaataaaggcccagccatgagaagagagatagaaacttatgataacagaggcattcttttagcccaactgtttgtcttagctgtgggggttggaggcagggccgcgaggcggtgattgccttgatatttagctgtcagataaacaaaagaggccgcctggcgccagcctcggcgctccgctcctccacgtctgcggccgcagccgccgcgctcggctggcccggctggaaaccaccggctcggccggagccgcgcacttcacagttcacagggcggggggcgaccatgccccctccccgtcctcggactccagacccagctcccagcaacctcggctccccgccccggcccgccccccaggcgtgcaattcacctctgcccccgccggtccgctcggcactcgcgcgggggacacggggctgcccattcctagcgcactcgggagatgcatcccaagcgtgctggggaacgtgggggatctgcgggcgcccggggtgaaccctcacatcacactctgtgtacagagacgtagagtaaaggaaggaatggagaaagctgagaggataaaaggaaaggagtttcagggtctcagccgagaagcccaggccccagcgcagtaagaggcgacaacgtcactgaggcgccggggccccactaatctacagacttatctgtgcggaaggaaggaaaaagtaggggacacccaacttctcctgcctgtttgttcctctgcaccctggggctggcagagttgaaaggagacagatacccagttcggccttccatccaactctctttgccccaaaactccaaaggtgcgcggccacgacagtatctgggccactggtgttcgacgtgattctccgtatttactaaaggagtaaatacggagaccttccagcctttatagcacgcctctcccagccttccttggcgggcctggaccaaatccaactcggccacacacctcaacgtctttccgggtgcggggaggcgtgacccccccacctccctctgcacccccttgttgatccggaaatgaaggcgtctaatttttaaccgcagactgcaggagcagtgcccgtagaccccttcggggcaacacaggagaaaacctggaagggaacccccagggaatgccctttgagtttccccttgtcccttctctactttcagcccccagtctcttcccaggagggtatgcacactctcccaggagggtatgcacactctcccaggagggtatgcacactccccctggagggatggctgcacaaacgcactgccctaggggcttttcttccagcactggcgctccggaaaatgttgggggtagggggacaacttctcacctagttcgcagagtcggctaaggtgatgggggttgcagcacaccagctcggggttgatcttcccgtaagattcacagcaacacagcctcttgacttccgaggaatgcctgagatccggccacctgaacactttgcacagcaggagggggagcgagtaggacgagggcggctgcgcaggctgcgcgccggcgggcgcccccgggcccagcctgcagtccaggcggccgggcagcaggaggcacgcggtgcgcgtcccgccgcgggactccacggcctggagcagcagctccagctgccgctccttcagtttcttgagcaccgagtgcgtgagcgccttcagatccgcctcggcgcccccggccgcgccggcgcccgcggctggcgggtggggatggtggtgacctttggcacctcgcaccgccttgcccaggcagcatccagccctgcccgggccgccgccaccggccccatgcgctcggctgtccgtcgccccttctccccgcagctcgcctcctcctccacctccccctgcgccctcctcctcgtcctcgccgccgggcgcacggctcctccagagacgccggacgagcgcagatcgtttggtcctgaacatgcggggcgaggaggcgaggagaaaagtcgtttgcctgctaaggagcgaacatgacctccgcacaccatgaagaagtcgggcgccgagttggggcagcaggcgcaggcgacagcagcagcagcaggggcccgggcaggagcggcggcggcccgaggggcgctccgtggcatgcgccagtctcccggaggccggggcgcgcgcgggggcccgggggcgcccgccggggatcgggggcctgcgctccggctgccccaccccgcgcggcccgcgccctgcgcggctctccggccccggcgcgccccggaggaacccggccgccgcttccctggggacggccgagcctgcccccgtcggcgcctccccaaaaagaggcccccccgcagtggctcccgaatgtcgggctcgccagcctcggcttcctacatggaaggtccgcgggggcaaaaaacgaaaggcgttcggctgggctgttggaagaaggaaaaagcctctttcccccttgctaagcaacttaatttgggggtggggagaagcaggcaattaaaaaaaaaaaagcaagcgatttatttttttcctctatatccttagtaaccggatctcctcgaattccgcgcacacgaagactcaggggagggggccgagtggacttcaccccgcatgagacgtctggcaaaataagaaggctctcgcaaaacctaacaaccaaatatgcaaagccccaaatgaaaaccaccacctcctcgaacctcagaggtctgggggcgtccggctggaactggggtttaaaaaaagaaaatgtttacaaagtataacaagatgtttgatgggtggaaaaatgtatccacgagttacatccccccgtttccttgcaaagccccgctggtcttcctctccttttcttctgccaaaaaaaaaaaaaaaaatcgtgtatttttttaatccacagaaagctttggctagaccgcttcaatcctgcgcatctgggtggtttaggggagtctctggtctttccccctgcgctcctgggggcccaggtcctcggcggggacttcctcgaggctggcgcgggcgcaggggcagaagatgctgcggcggcggctgagcccggcggggctgacagcgcgggggagggtggcgcggcggcggcggagggccccagacgggtcgcgcgttctcgccccccccgggcacaagctgcttgctagtgcaggggccgccgatgtcccttcccctggccgcggctggccgccgaggctccccgcatgggctgctcgcctcgacccagctgcggcggcaggaggccccggtgtcctctcggcgcctcctcctccgagactctcctcgtcgcgcccgggagcctccttgtccccggtccgccctctcctggcgctccggtccttctgccgccgccaggggctcgccgcgccgcactcaggggctcaggggccgggcgctcggcggctcggcgccgacggactggctctgtctcgggcagctctctcccgcgcggcgagcggaccgagcacggcgcccggctggctcggctggcgcggctcggggacaggatcttccgtgcgccgagcagcaagcgagtgtgcccggggctcaccgcctcccgcaaggcctcccgcccccgcccccttccctcccccttcctcccccttccctcccccgcccccagccgccgcagccgcgccgcctcctccccgcccccccgcaccccccctccggccctctgctcggctggttccactgcgcagtggcgcgcccggctccggcctcgtcacgtggccgtctagacaccctgtcgctttaaaaaaaaaaaaaaagcgattgtgtttcgcaaacaacagatcgggtttctaaaagctatttctccccccaaccccccgccaccgccaccccctcccgggtctgtagagggggtaccgatggaggggagagagataggtggggggcagagaagctcccagaatggattgagccccggccggagccatggagaaattggaaaagcagggagcaccgagcgggcttcgccgcgagttttggagctgagcgagcgggtcggtggcccgatttcgacccggctgggtttcgcggtggccatctcgcgcgcgctcgccctagcgcttcattcattggttttgttttaaaggccctggcggtggatcccttggccgcgcccgagggcaaggggaggagagcgctgtctcggtttaaaagacatttataccggactggaccgaggccctgggaagtgtgcgctgaggggaacagccgccgagggcggggaggcggcgtgaatatgacctcagcggcggccgcgcgctccctcccgccctctcagctccgggctccggtttctaggactgcctggagaagtgtgtcttgtgcacagctctggaatgcatttggccggctgacgagctgtgaggggcagcatcccggcgggagaaggggagcgggggtgggggctcgcctgcgcgccgcgggcaggtttcctcccgggcccggaagacctccgccacccgccaccctgcctcccggcgcgggaaggttacccagcgagcagacctgcctagggcattcatttgcatgcaggccctgtttctgggcctcgtagctttcaaggtgcttagagtcagagagtttattccttgaccccaggtcccgaagaaacatatacccaagctggcgggttactgcatagaaacgggcatggcattgctagggcataaacgcatttacagcgtgaaagctgatggctccgagaaacgtaatgatttaaatacacacacatcagtattgatgaggccactagttggcatggtgatctaacctcacttcatattcagtgaaatacgatttttttaaaaagccattgagaattgtgagatcaggccagcagtgaaactcgttgggggctttaaagaatctttttttctttctttctttctttttttttttttttttagagtctcactcttcacccgggctagagtccagtggctcgatttcggctcactgcagcctctgcctccccagatcaaacgattctcccacctcagcctccggagtagctgggactacaggcgcgcgccaccacatctggctaatttttgtattttttggtagtgacgcggtttaaccatgttggccaggctgatgtggaactcctgacctcaagtgatctacctgcctcagcctctcaaagtactgggagtacaggcgtgagccactgcacctggccttaaaataatctttagaaaaggtgaaatgtgcccaggtgcgatggctcacgcttgtaatcccagcactttgggaggctgaggcaggtggatcacctgaggtcaagagtttgagaccagcctggccaacatggtgaaacccgtctctactaaaaatacaaaaattagccaggcgggtggcgcgcgccagtaatcccagctgagacaggagaattgcttgaacccgggagacggaggttgcagtgagctgagatcgcgccactgcactccatcctgggcaacagagtgagactctgtctcaaaaaaagaaaagaaaaaaagaaaagtaaagatgaaatgtacatcttgccggctaaattatatgttcttaaaaggaaaaggcaggaatgaatcttagccgcctttagagctcaagtcctctccccctctagcaattaaaaagatttctaacatattagtacaatagtagatgcttaataaatatttagaaatcaacacttagggcttaaggggcatttggacccttcctccaccccaccaaaagtacctttggtaatataaattcaagaggaaatcagcaacattgcttacatgatcatttccaggcaaggagatcctaacacttattgacttggaagatagtaggatgccaagcagtgcagaaccctactggacggacagaagctgccattctgaacatttactgtgtaaggccacataagctgcagttgtataacatcataattttgttgtaaattaaaatatggcttgtataaaagggcattgaaaccttgtgtgtgtattaaaaaaacattctaagaagcaacctgtgaagacagcagctgagaaagcacaggagagaatggagaaggagtgtaatcccagcactttgggaggcctatcatgataggcaagggaagacgaaagagacagaagtgggatttttttttttttttttttttttgagatggagccttgctttgtcacccagcctagagggcagtggcatgatctcagctcactgcaacctccgcctcctgggttcaagcaattctcctgcctcagcctccctagtagctggaactacacgtgcactccacacctcgctaatttttttgtattttagcagagacaaggtttcaccgtgttgcccaggctagtctcgaactcctgagctcaggcgatccacccgcctcagcctcccaaagtgtgggataacaggcatgagccacagcgcccggcccagaaatgggatttttaaggtgtctgggaaatgtatcatattttcaccttagaaaggcttagaaagagtaccagactagaggtcagaaaacctgattccaggctggggcgttgccgctcactggttaagcaactagggccaacagcaatccccacgttaggcgagcacttggcagagtttataagattttctgggcaagtttccgctctctagggtcccattccctctctgttctggatctccctaaaagatcttcacttattgagagtggtcagaccaggcttcatagcaacagaaaggacttaaataagcagagaaagtagaggtcataattctaattcagtttcttggctaaatggagaatctgaagaatcttttggagatctggccagtagtgctaaggctctgtaatgagaggccggagcacacacagggcaggtaggtttcatgggtgtttcaagagtggagtctgacgtcacggtttgtctgggtggaacatgcatgtacttgcagagatatgttcccgtatagtgtaattgtaggtgtattaattcaggtgtcacccctctctacacggctttcctcttccattttgctaccctaggtagaagctgggtgcggtgctgagcaagtagctacaatgattggtgctgctttatagctccctggcatcccctgaatcagttaacatcccagctttcctgatagccccaccccatcacattcttatccctctcctctccaagaaagaagccagaagcctggcagtagaggaattcccagcaggctggtgtgcctagaaaggtagtttctttctttcccttccacaggcacaaaggaggccaacaaacacgcagtttcagactattctgacccttaagaaaaaagtttaagagttcaccaaactattgtgaatgagtttgattctaatcatttgctggcagggaatatggaataaaatagctcatttgcagttgtttatttcctgttgtggcttctattttcatcttttagtcgctttggtgatagtaatcaaaccctaatcatggtgccgccacaagtcacagagaccaaaataacttgcagcagagttatgacaaacaaggatggaatcagctaaagacctggctacttaatcaccggccactgccgcccagaggactgtggggctgcctcttgaccggctgctggctaggaatctagaggagagaggaagtcgagggaagttgctccaaggcccatgttttctgagcagccagggaaggcagtagagtgcacaggaagtgaccgaaaaagcaggtgaattctccacacctgccaaggggagaggcaggcttctggaggggcctgacttgagagagaaagaggaggggaaaaaaatctccaaaactcttgacacctcaaaacaatgataagtaaaagctgaaaagtgcctgtctagagaagacaggattctgcctttcagttctttgctcattgtcagtggattccagaagagaagggcagagagaggccccaaagcatgtatggatgtgtgttgatgggagtgaggacaggggtaaagatttttttcttgcacaagccaaaagaagaaaccattgaggagaccaaaaaagtactggaaaacatcaacatttcttgcacaatcatcccctgaaaaatgtgtgagtgagccctaaaccatgcacaactggcaacaatacaaatggaagtgatggcttatgaaaagaagacagtacaaggaaggctgatgggacaatcaacgcttcttggcttctcttggaagaacaggaacataagtgaatgaaaatgcatctaattcactatcaaacaaaaatactataagcccggactccacaaatattcttggattacagacaagctgtcagctgatccccaacatttgccaggtgcctatccagagcatgcaactaggtatcagggattggaatgggggcaggatgaaatgaatgttgctatggaggagatgagaaacatccagaaaaggtaaagagtgaggacaatagagacattcaaatctacagtcacatttagatgccgtttcctccaaggagggcccctggacagctgaagaacagaactgggaggggaattttactctgtataattttgtaccttttgaattgtgaaccgtgtgaatgtgttacttattcaaaaataaacagatttaaattgttttcaaatctctgcttgcttttctcatttcctgaaattcgttgttctgatgtccttgtagaaaaggacaagttggcaaggtcccacgtggaaatgatgctatagacagcttctctctctgtgaggcagttgctacaggaagaggctggtaacaacagaggccaatgtctcatcccagacagcaagggtggaggctgcttcgtcatgagcctggccagagtcagcgaggaaacatgcccatcctaatcaaaagtcattccagatatcagtcaggtgcaagtcctaacctgggatggacagcctaataaatactgctgtcagggccgggcgcagtggctcacgcctgtaatcccaggactttgggaggccaaggcgggcagatcacttgaggtcaggagtttgagaccagcctggccaacatggtgaaactccatttctactaaaaatacaaaaaaattagccaggcgtggtggcatgctcctgtaatcccagctacttgggaggctgaggcaggagaatcacttgaacccaggaggccgagggtgcagtgagctgagatcaccacactgcactctagcctgggcgacagagtgagactccatctcaaaaaaaaaaagataaatacggctgtcaggatgacacaggcacaggaaggagcctgcccaatctgagaaaatgagagctttgctttttggaacagaaacgtgttcacatgattttcaattcatttagccagcactgattcagagctgattggagtcaggatccaggagagacctctgagggttataaatgtgaggattaatcagcctttgccctcaagaagtccacagtctaggagagccacaaactctcatgaaatgggatcagtgttaccccagcagcaagaatggaggcactggctctaagaacagaaagtcaagggactcattctgtctgggagaggcctcaaaaggtttcccaaaggaagaaatattttagactagattagctgagttgactagccaggcaaaggtgatcagagtcctaattgtcctatcaaaaagaaaaaaaaaaaagaaaggattacaaatatgagccaccacacctggaacaatgcctggtgtgatggctcacgcctgtaatcccagcactttggacagctgaggtgggaggactgcctgagcccaggagttggagaccagcctgggcaacatagtgggaactcgtccctacaaaaaatacaaaaattatggccaagcgtggtggctcacgcctgtaatcccagcactttgggaggctgaggcaggtggatcacctgaggtcaagagttcgagaccagcctgaccaacatggtgaaaccctgtctctactaaatatacaaaaattagctgggcgtggtggctggcacctgtaattccagctactcaggaggctgaggcaggagaatcgcttgaacccgggaggcagaggttgcagtgagcccagactgcgccactgcactccagcctgggtgacagagagagattctatctcaataataataataataataataataataataatacaaaaattagctgggggtggtggtgcgtgcctgtagtcccagctactctggaggctgaggtgggaggatcacttgagaccctgaggtagaggctgcagtgagctaagactgcaccactgctctccagcctaagtgacagaaaaaaaaggaacgaaattttgttttctttgagctaacttttcaatacccaagccacacttatcacttaagtgtataactttataaacactcccaagccataggaagtcagtgatgaaagtgaggtccctgcagtgggtggtctgggagggcatctccctcagaaggcagttttctctgtagaaaacattggaggaaaaacactagatcgtctacggttacagagaagtttctcctcaaataactatagagatcgccacgatctccacccctcagatcaagagcaggccttacttgagtcaaactggttcatgttaggaagttgtgccagttttaagacaagtggaagggaagtaccctcagcagggaagttggctgagatgcctcagtaatgggggtacttaaataatgctctcaaatgccaacaacaaaaaattattatttgccattatcgtatagacggtgagacatacagttggctgatccctacaggtactaaaaaattgattttaaagacagcaaagcaaggaaatcagtgttgagcctaacccagatggaccctgatgggtcctggtgttatttctcactggccatgttgcagacaagttcttcattccagcttccagccactcaactgggcagctccaagttcctggtcacattgggctaccaaattatccttttctgttttctgatttttttcctatttttatctttcccattcctctgccaaaagtccttaatgggtcacttaagtgctgaattctgcctagtaagtgctggttaggatctgagctatgagacatgctggtaatcgtgattcagaacagaaagcctgcggaggggtgaatgatgttttatctgtagtagggaattgggactagagcaaaggggtcatacaggtgaccgcacatgctgcccctggcacgtgctgggacccaccgaaggagtgagggccaaggcatcttgctcattctcccaacgcagacctaggagaatagaaaggccctcagctcggctttaggattcaatagacttttctgccattgctagctataagaccttagggaagtctgtttccagtctgtctaccttcctcatacaacaaacactgaattaacaatgtcttgtgtcttctgtgtgccagactcagcgtgaggctccaagaacaaagtcctcacggtggggttgctgggaggagacgttcacaccacaagagccccagtgctatgtaaaccaagtggtatacagatgctaattatcatattatcatggattctgaggtcctagctgcccaataagcacattttgcctaatcttccgtgcctaggaaatgaatttttagaggagataattgtccaagtgatagggtaatgaagaaggaagctactttttctagtggctgggattttgtttgtgtgggggttttttgttttcagttttttgagacagagtctcgctctgtcacgcaggctggagtgctgtggcaggatcgtgactcaccgcaacctccgcctcccagattcaagcgattctcctgcctcagcctcctgagtggctgggattacagtgtgcaccaccacacttggctaatttttgtatttttagtagaaacggggtttcaccatgctggtcaagttggtctcgaacctcaagtgacctcaagtgatccgcccgcctcggtctcccaaagtgatgggattacagccatgagccaccatgcccggccccttgtgtgggttttataaggaccagttagaactctgtcaaagaggtaaggctagcgtctgagtttaaaaacaaacaaataaacctagggaaatcttttccctgttggaataagagagggataagtgaggaaacaatgtaagtgtttttagttcttttctagtactactatgagtcatacatattttcctgtgtcctggagatatctcccctggtaattatgagatacaaggaggaagtgaagagggattcattttcatggagaggagttacccagtgggcaggattctgctgtgcccaatttagttttgatccccctctatcccataaacatttcttttgaaggctttcaaagttgggggaagatgatgttatttagcattgttagagtctggtagaccataaaggaaaaatctggagaaatgcagtaaaatgaggttcaagccagaagggattataaacgttacatagcccagagagtctccatcttcagtccatcttatttggtactttttctttgctttttctattttattgatttttgaataggcaatgcatgcacaatggtacacaattccaagaatacaaaaggggaggaagaaaaagataaggcttccttctacctgggctgccagccacccatgcctctcataggcagccaccattacagccaaagaggcagaacatgaacaggcctcggctcggcgcgatggctcacgcctgtaatcccagcactttgggaggccgaggcaggagcatcacagggtcaggagatcgagaccatcctggccaacatggtgaaacgccatctctactaaaaatacaacaaattagctgggtgtggtagcacgtgcctgtagtcccagctacttgggaggctgaggcaggagaatcgcttgaacctgggaggcggaggttgcagtgagccgagatcgcgccactgcactccagcctgggtgacagagtgagactccatctcaaaaaaaaaaaaaaaaaattaggtctctgctttgctctccagtcccacttgcctggtcaatatctcaaaggcaccctgagctcattaggtcccagataggccatcttcctcctgttacaagaaagtggtcccgagccagaccacaagagagagttctttggatctcgcataagaaagaattcagggcaagtccacagtgcaaagtgaaagcaagtttattaagaaagtaaagaaatggcagggcacgatgactcacgtctgttatcccagcactttgggaggcggaggcgggcggatcaccaggtcaggagatggagaccatcctagctaacacggtgacaccctgtctctactaaaaagaaaatgaaaaactaggcgggcatggtggcacacgcctgcagtcccagctactcgggaggctgaggcaggagaatcgcttgaacctgggtggcagaggttgcagtgagctgagatcgcgccactgcactccagcctgggtgacagagcaagactccatctcaaaaaaaaaaaaaaaaaaaagtaagtaaaggaataaaagaacagctactccatagacagagcagccccaagggctgctggttgcccatttttatggttatttcttaatgacatgctaaacaaggcgtggattattcatgtgtcccctttttttagaccatatagggtaatttcctgacattacctggaatctgcaaactgtcatggcgctggtgggagtgtaacagtgaggatgaccagaggtcactcttgtcgccatcttggtggattttggccagcttctctactgcaacctgttttatcagcaaggtatttttgacctgtatcttgtgccgacctcctatctcatcctgtgacttagaatgccttaaccctctgggaatgcagccagtaggtctcagcctcattttacccagcccctattcaagatggagttgctctggttcaaactcctctaacactcccaaacaggcttttcctccagagctccacgctcagaaagctcactcctcaccatccagtgatcacaaccagaaaccaaggacaacaaacctctcccttaccccttatcctaccagccccaaagcctatccattttatctccaaaatgcctctccacttatctgcttttctccagtctcacccaccacaaccacccagcatctgtccgggactggtccacac

SEQ ID NO: 87 - DNA, 52570 bp, Mus musculus
agccattgtttttaactgctaagccatctctccagccctgatggttgtaaatctcactgtttagcttaatttactcatggactttactatattctcagtaaaaattgcaaaaggacttccttccttccttccttccttccttccttccttccttccttccttccctgtgtacacatgagtgtaagactcatgcaacagaagatgaatatcttgggtctttctgagggataaaggagcttggaacaggttgtttcagagcctttgactctaaacccacgctacaaaaggcactgactaggtttggacctcctaaaagcccagtcttcactctttttgttttccttgagacaggatttcactgtgtagccccggctgtcctggaaataattgtcgactaggctggccttgaaggcactgagatctgcctgctgctgcctccagagtgctgggattaaaggtttgtgctaccactgtccagtgtttgtatggatctttaaacaaatggccagtttcacattgttatcaaagggtctcttcagcatctttctcctcatacgttgcttagcatgcatctgtccataaaaggaaaacaggaagggacgtgagatcctagcaagttactatacacctcatccagtcagaggggatactggtcaaccatctcgagaaggaagacctctcaggacttaggtactagagcatcacaaaacccattggtgtctgaggaggtttcgtcaaggacccccatccccaagttcaaggttacttcagtaaaacgggacagatttgttcttagcctacatatagcctccagcctgctttgtcattcatccgcttgctcgagacagagtctcaggtagtccaggctggccttgagctttccttaatagtcgaggatagatagctgagtttatggtccttgtgcctctccctcgcaagagccggattacaaatctgaatgaccattccctggtttttattaattcaggaccttatgtaacccagggccttgaactctcaggtctgcctacgtggtttttgtttgtttgtttgttgttatttgtagtcctggctcaaactcagagattcgcctgtctctgcctccctcccaggtgctggaattaaaggtgtgcatcgccacgccgggcttttacacctgtcctttaattccgggttagggactggccgctgggtcctgcgcttgttacacaagcattccactaattagttatgtgcccagcagactccatttatggttttggtgatttgttttgttttgtttgcttatttatttattatttatttattgtgtgtgtgtgtgtgtgtgtacatgtgtgtgcatgtgtacatgtgtgtgcatgtgtgtgttggagcaccatagtcaatgcattgagatcagaggacaagtatgggaggaattagatctcctcttctaccttgttttgagttcaaggccagccaaggctacatagcagggcccgtgtctcagcctcccaactctacctaacacaccatacaagatggttcagctgtgaaaggtgcttaccacctaacgatgtaagtctgatgagctgagttttatttgaagaacccacagaagggtgaagcagagccccggctctgagagccacactgtggcatctctgcgggtgcgtacacatacacttgctgttgtgtgacaagacctttcctgggagatgaaacatgctacagaccaaagtgtggataccactgaaggccaacctggtgagtttcattgcggttatctataggactagaaataactcaaagtccactccagcatgagtgacaactcacaaagcagggagcctggagcacagtgcacagcctgcagacagctcagcaggttggagagcgttctttccaggtgcctcagtgttggtccaatgggcttggtgtgtgtgtgtgtgtatttactctggcagggaattgcctacagaatctggtcagtttcagggaattacttttccttctttctttcttttacaaagatttatttatgtatatgagtacactctagctgtcttcagacacaccggaagagagcatccgatctcattatggatggttgtgagccaccatgtggttgctgggatttgaactcaggacctctggaagggcagtcagcgctcttaaccacggatccatctctccagcccagtttcagggaatccttgaagctattttcctctggttgttcacctcactgcttaaggtgctccccagacaggatgagatggtttaaagtaacactagaatggaccggaatggctgcagtgccatcctgaagcggaatgcacagtggttggaggggccccgcccactgtgtgctgaggttcagggtgccttccgcctgctctgcatcttcctgtatcatgatttgacagcagcttctcttcccccccttctcatccatgatctcatcaaactcccagcccactctccactagagggatgactgcccttgttttatggatgggaagttgaggtgacacagcgactggggacagaggggatacctgatgtcctgtatgctctgggctatccctgatatcacagttgtctgacttggtagcactttccatctcacggaatgagtgctccaaggtgttgcacaatccagtcactaaggccttctccatgctccacagctccctgcagctgacacacccagtcgtgatggcctccaggcgaggccagtgggctgcaagccagctcacctgttggctcacccacacagcagccaggacctggctctctcattcctggaagactctttcctggacctcgttcttcccactctggtattccagatgctactcctgacgtcattctcacctttactctgcctctcccactcaactccctcagtctactcaaagctcttgccactgaggctaactgtcatttataaaacatcaagcttgccctggctgtacaggaaccctgaagatttgaatgttcaagaccagcctggacaacttagtgagactcaccaaaccaaagcaaacaagaaaaagtaaaagaaggctgggtatagtgactgtaatcttagccacttggaaggcagagacaggaggatcaaaagttaaaggcctggattacatatacagaggaaaccctgcacacacacacacacacacacacacacacacacacatacacacccccacacacatgcatacacaccaaagggttattttcaatcttctctgtaggatagactgtaaattccccaaaggagagaccaagaacttgatccagtgtttatttagcatatactgagtctcatcaaatattttcagagtgcgaacctgccaaacacccgccatgtccccagatccttggttgctggggccctgggtgcaggagaacagaagatgcatgtcctcacctggtcacagtacatgactctgggggctgcaatacattctggaaacacagctcaaggcaaggtgtcctctttttgcagagctctggagccaagctctctgagacagctgttcattcttcagtgtggcagtggacagacgaatcaggtgagtttggggccagaaaaaaagctatcccaagagttggagtccgccaaactaggtaaggaaaaggaagctggaagattttgagttaatttccctcagcttttggagttatcattgttctcatcatcgacatatctagattcttctactgtctttggtcattctgaaatagtgcctcaacttctcagttttggatcaagagaccccctcattgggttgccagcatttaaccttgctgaatagctcctgtaaataatcaccatcaaagacacaccaagcggcttggctcagtggataaaggcactggccaacaagcctgatgacttgggtttgccccgtggaacccacatggtagatggagaggggtgggactggggaggtggcaggcattaatccctgacacttgagaggcagaggcagagaggcagaggcagagaggcagaggcagaaaggcagagaggcagaggcagaggcagaaaggcaggggcaggggcaggggcaggggcaggggcaggggcaggggcagaggcaaaggcaggtggatctctgcaagttcaaggccaggctggtttacataagttccaggacagccagggctgcataatactgtcttaaaaagaggcggggcaaggagagggagcacaagggcagctgtgcagaggcatagtgaaagaggggtgattcagtctcagagactggggacctgtgcagatggagagaatactgcagggtgagtcaacacacacacacacacacacacacacacacacacacacactcacccccaaccctgctcccccagttctggagctgcagcaggaaccctaaggtgtctgggaaagggggcaaactccaggccactaggacttcacagggtggccaaagaccccttgggtggggacacagtgagatctttgataagcagtcattgggacagaggagctctgggcatctgagaaagaccagaaatggggagaggaaagcagaccggtgctgaggttgtgttccgtaccctggctgtgttccacgtaggccaggggaataaacatggcttgagaaatgcttcaaagatgacagactcagtgttgtgtgaaggagggtgaggcagaggttgtcctttgtgtctggttcttacatcaggagaagtagcttctggaataaggttggcttggccatctgggacagcagagctaaggtgcctttgcagtgtcatgtcggctgatggttacgtgggcctgaagttcagagcgaaggccaagtgttcctcctgagccctgtatcttcagctacagtggtagctcacagagaagtgcgtgctggaatctggggagctatgtctttcttctcagggtgtctgtgttcttcaagcatgtaccaccagacgtgcatcaacaacaatcaataagatagaaaacgtaagtttagtcacatcttgttagaaccccaagccctatgtgaacttgaccatgaatagtggagtttggattggagccagttcgcaggtgctgagacccttcgagaccctttgcagcaagcgccactcccattttcttccatcctcctcatccttcaccctcgggtctgcaaaacaccaagacagctcgataacatcatttcctataaccatgagatccttcagaacaaatgtccgtgggatggagagacagggctcagagcggcagaatcctgggtgcctcctctgtgaaggggaacccttccctcctccgctgtctgtcattacaaatggagctattgccaaggtgcagggaaatactggctcgcaccaggaaagaagtaaacccgcacttgttttctcagttaatgttctctctttgcaacaggaaaagatttcccagtcctatttgtttttaaactcaaacaccaggctttcccttaggatgagctataaccggtctttgtaaaaccccatggagactggtataaaaacccccacacccaaacaaaattctagtcaccaaagagtggtttccttcagttagttaccctattgcttggacaattaccaatgcatttcctaggctccgcaaggttagaccagaggctcagacctcaggattcatgataataacagagattagcatctgtatgccaccgggtttacataaacttgggctcccacagtggcagcacatcttccaagcagccctgtggggcgcactttgttttcggagggatgctcagagtctggcacacaagactttgttaattcggaggactcggaggaggaaggcaggcagacaacggaaactgcttctccaaaggcctctgaggagttagcaatgaccgcaaagtctgcttaattccagaattgggtcgggggcgggggtccttcctgtccctctggtgaagatgtcctcagccttcttaatgctgcaaccctttaatacagttcctcatgttaagattacccccagccataacaatgttttcatcactactttataactgtcatgttactactttatgaattgtaattcgcatgtctgatttgcagaatatttgatatgcattcccaaaggggttgcagcccataggttaagaactacttctctaggtcttctgggaccgacttctagagtctgggctcggggctggagagatggctcagcggttaagagcactgactgctcttccagaggacctgagttcaaatcccagcaaccacatggtggctcacaaccatttgtaatggggtctgatgcactcttctggtgtgtgccttaagacagctacagtgtactcatatacataaaataaataaataatctttaaagaagagagagagagagagagagagagagagagactgggctcttctggtgaactggtgagttctatgataagccaggaccattagatgtggccaacctcagaaagtgacactgtactaaaggggaatagtccctgtcctacaggctgctggctacaattccccactatcaggctaccccactcagatcttaaccagcacccagcgcctatgtgacactttgaaagtttacaggcaatggaaagatagaaaccaggcacaaattagacagtaacaaagaccacttaatagccccacatgactagaatcttgaagtagatctgtgtcttggggttctagataggaacctggacagtactcagaatagcatgagggtagaccagggttcttctgggttaggatctactttatcttttcccattcttgccatgttggggtgcgggggggcttatatatcccagggcgtcctctctttctgaactccagcctggccttgtttttgcctctgctaggaccatcagtaccatcagaagcttctcactcagctcagtcctcccagccctcaaaccttctcccttcgaggaaccacgcgagatgcccctacgcagaataaacctgctattctctgttctccagtcagagtccatttggtgaggatagggtatccccccaactcccaccccccttcttcctcactccctccttggggacagaagctgttttaatatggccgctgacatcccccagaaggtctctcccagcgcctgggacatcagctctgaatcagtgactgctaagtgaacagagagtcacgtgcgtccattttggtctccccaagcaaagctctccttttctcggacggggcagtctcctccctgagcctccatcatcataccagcctttgtcaggcctctggccctgggttatagactcgcccctgactggtatctagaatgtctttggattgtgactctttctgactcttgccagggtcagagagggagcaggctctctgcccttccttgctctctgagatgagataccggcttctgttgtcactggccttcctatagcaactgctccacagagagacatgctagctatagcatcacctctgcatgggacctggccaacctgtctttggacacaagactgtcagcagtgattttcaggaaatgagaaacgcaggcaaggcttaaaacaattgacagctccgcgtttgtggatgagtaacgtgctccctggctccggaattcaagcagtccaaaaagctacgtgcctggactcccctcccaaccctgcccattagctatccatggcccttgtttggggttagaggaatttcaacatgattatatatttaaatatctatccctacgccactatttctggatgttgctgtcttcgttgttacaacaagcatccatttcgcgtgtcctcaccccacgctcagcacctaacttgagtgctctggacagatacctggcagccactctggatcagctgacagcttgcctgtaacgctacagtatttgatgagtcaggacttatggcgtctttatttgattgtgaatcagatgcgttttcattcactaagttcgagttcttctcgagataaggcaagaagtgctgagtgccccgccagccttactcacgcccgccttgctttcgtaacctcacttccgtttgtaaagctgccagttgaggatggtttagggctcactcacacattcttggggggggggcgattgtgcaagaaatgttgatattttccaattgtttctcctttcggcttttgcaagaaaaactgtccctgcctcaccctgaccccgtccccaggggcactgtgagcttcttgctcttccatcttggaacctcaaaaaacaaaaccaaaaaaccaaaaaacaaacaaacaaacaaacggagaaaggaaccaatagccagaatctcgtcctcctagggaggcgatttctctgcttttgcttgtggtcattttgagctggcaagagttttgggagactcctcttggccttgatttggctcaaaacaggtctttctgtgaaccacctctccttgacacatgcagagaacttaactttcttggaggccatttcctgttcactgtgttgttctgggacctaggggccttggctgctcagaggcctggggcacaggctgataaccctttgcttcagctcttctccagacacctacccaatgggctgtgagcagagggactggtgattaatagccagttccttagctgtctccatccttgtctgtcataagtctgctatttcggtctctgtgacttgtggctgcaccgtgattagggtttgattactatcaccaaagtgactgaaagatgaaaatagaagccacaacaggaaataaacaactgcaaatgagatattttattccatattctctgaaacaattagaatcaaattcactcacagtagcctggactcctaactttctttttgaagggatcagaatagtctgaaatcggcgctcgtgggtcccatttgtgcccgtgaggcgaaagaagagcccttcctttctaggcatacaagccagtcagagctctactgctggcttcgggcttctggcttctttcttggaaagggaaggagtaagaatgtgatggggtggggctggctgtcaagaaggttgggatgttaacagattcaggggatgccagggaaccataaagcaccagccattgcagctacttgcctagtatcccacccactgctccctcaagtagtaaaatggaggaggaaagctgtggagagaggacaaaatagaggtgacgcctgaattaaaacacccacaattacactagatgggaacatagctctgcaagtagatgcacgtcccatccagacaagctgtgacatcagattcaagctcctgaaatacccattacacctacttgccccatctgtttttacccgggcctttcattacaaaggggattagcaccactcacgtttccagacttctccaggttgtccacatagccacgaagcgtaattagaaggctgccctttgctttcagtttattcaattcttcctgtcacctgcagcctggtttagcctctcttgtctactgagagaaatgggaccctgcaagaacatgatccttctctggaaagccttagactagcagagcagtggtggcacaccctttaatcccagcatttaggaggcagaggcaggtgggtttctgagtttgaggccagactggtttagagtgggttccaggacagccagggctacacagagaaaccctgtctcaaaaaaaaaaaaaaaaaaaaaaaagccttagacagtctttcaaggcagcatcttacctgaggtccactgtttagtcaagccctgagccgccgcagaactcctccatggaatcacttcttaaaacaggcttccttgtcgggtgtggtggtgcacacctttaatctcagcactcgggagtcagaggcaggcggatttctgagttcaaggccagcctggtctacaagttccaggacagccagggctatacagagaaaccctgtctcaaaaacaaaacaaaacaaacaaaaaaaaaaccccaaaacaaacaaacaaacaaaaaatcaggcttcctatgcttttctaagattaatttgtgtgtgtgtgtgtgtgtgtgtgtgtgtgcgcgcgcgcgtgcgcgtgaacgcagtgccgtggagaccagaagaatccagaatctcccggagctggagttacatgcagttaggaggtacctgaagacattaggaggccaactcaggtcccctgaaagagcatccactgctctttacttctgagccacctctccagccccttcccgttcctttctaagatgacacatttcctagactacatttctgtctctttggtcagtccttccctgcctgtaatggtggggtcatccctcctccatttccttccttggtcttcttgactgctgtcttcttcccgggttgctttagagtgttcacacaccattccaataagtggcattttaatttttagtagaattactatgccatccagtaattactgcttacgtgcccctctctgtccggtcctgctgatggtcctatactgttgtcttccttccacaacgtagggctccctagggagagaatcatgtgatagaacttgttggttttcttttctagttgtaagagtttagtgtggaaggggaatggtcagagaacctaattcaaaatgatgattcctagttagtgttgctagtcactgaatccagggtctctaaggaattatacccccagccctctaaatgtgtgtcaattatctatcaggttagaaacaaacgttactggaaagaaagggtatttataatttatcttttccagaacatatcattccagtggcaagaaataaatattatattccacatctggtaaaaaaaaattcttttacccccccccccccccgtaagtttcatgactgtcctaatgttacaatttcaagcaacttttcaaaaacctactaaatatgtcaggttggatcaccatgccaactagttgtctcagtaacatttaacactctagtactatcctcagacctgctccacggacttttgcttgacaaataccttttctacttcctagcaatcacttgcatctggggatagctttctctggaacctatggtgaaggaataaactctctgaccctaagcaggccccgcatgcgattggatgctctaagcaggtctgctggctgggcaaggttagcgcgccgggaggccgagtggcgggtgccggaggtcttccaggccgggaggaaacctgccggcggcgcgcgggcgagctgcacccctcctccctccaggatgctgcccctcgctgctcgtcagcctgccaaatgcattccagagctgtgcacaagacacacttctccaggcagtcctagaaacccgagcccggagcgggagagggcgggagggagcgcggcggccgctgaggtcacattcgcgccgcctctccgccctcggccgcccggctgttccctctagcgcacacttcccagggcctccgtcctggccggtgtaaatgtctttgaaacagacagcgatctcctcccctttccaagggatccgccgccagggccttaaaacaaaacgaatgaatgaagcgcccgggcgagctctgctggtctaaatcgggccactaaccggctcattccgctccaaactcgcccgctccatgcccccagctcttccgatttccccctgctcccgctgggtctccgccgacccccggggccgtctcggcctcccacctccctccaccgtgggtacccctctctagacctgggagagggtggcagtaactgggaggggggttgaaatagcttttagaaacccgatctgttgtttgcgaaacacaatcgcttttttttttttttaaagcgacagggtgtctagacggccacgtgacgaggccggagccgggcgcgccactgcgcagtggaaccagccgagcagagggacgggtgggggggcgggaaggaggcggcggcggctgggggcgggggagggaggggtagaggggggagggaagggggcggaggcgggaggccttgcgggaggcggcgagccctgggcacattcgctcgctgatcggcgcacagaggatcttgtccccgagctgcgccagcagagccagccgggcgcctcgctcggtccgctcgccgcgccggagagagctgcctgagacgcagccagccagccagccggcgccacgccgccgagcgctcggccccggagtccctgagtgcggcgcggcgagcccccagcggcggcagaaggactcgagcgccaggagagggcggacgggggacgaggaggctccggggcgcgacgaagagagtctccgaggaagaggctgcgagaggacacccgggcctcctgccgccactgtcgggtcggggccagcagctcatgagagcagccccggcggccacccgcggccaggagaaggagcaccggaggcccccacactagcctgtgccctcgggggcgagagcttgcgacccgccggagcccgccgccgcgccgccctcccccgcgctgacagccccccggggcgcagccgccgccgcagcatcttctgtccctgcttccccagcgcggaggaagtccccgccgaggacctgggcccccgggaacgcaggaggaaagaccagagactctaaaacacccagatacgcaagattgaagcagcctagccagacctttctgtggattaaaagaaatacgattttttttttttttttggcagaagaaaaggaaaggaagaccggctgggttcagcaaggaaaaaaagggggatgtaactcgtggatacggtttttttcccccacccttccaacatcttgttttactttgtaaacattttctcttttaaacccgggctccatccggtgccctccagacctccgaggtgcgaggaggtggtgtgttttttcattgggggctttgcatattttggttttgggggttttgagagaccctccagacatctcacgaggggtgaagtctactcggtcccctccctcaagtcttcgcgtgcacagaattcgaggagatccggttactaaggatatagaagaaaaaaaataaatcgtgcctgccttttttttttaattgcctgcttctccccacccccaaattaagttgcttagcaagggggaaagaggctttttcctccctttagtagctcagcctaacgtctttcgtttttttttttttttttttgcccccgaggatcttccatgtaggaagccgaggctggcgagcccgacactcgggagccactgtaggggggccttttttgggggaggcgtctaccggggttgcctcggccgcccccagggaagcggcggccgcgttcctccagggcacgccggggcccgaaagccgcgcagggcgcgggccgcgccgggtggggcagccgaagcgcagccccccgatccccggcaggcgcccctgggcccccgcgcgcgccccggcctctgggagactggcgcatgccacggagcgcccctcgggccgccgccgcttctgcccgggcccctgctgttgctgctgtcgcctgcgcctgctgccccaactcggcgcccgacttcttcatggtgtgcggaggtcatgttcgctccttagccggcaaacgacttttctcctcgcctcctcgccccgcatgttcaggaccaaacgatctgcgctcgtccggcgtctctggaggagccgtgcgcccggcggcgaggacgaggaggagggcgtggggggtggcggcggaggaggcgagctgcggggagaaggggcgacggacggccgggcttatggggctggtggcggcggtgcgggcagggctggctgctgcctgggcaaggcagtccgaggtgccaaaggtcaccaccatccccatcccccaacctcgggtgccggggcggccgggggcgccgaggcggatctgaaggcgctcacgcactcggtgctcaagaaactcaaggagcggcagctggagctgctgcttcaggccgtggagtcccgcggcggtacgcgcaccgcgtgcctcctgctgcccggccgcctggactgcaggctgggcccgggggcgcccgccagcgcgcagcccgcgcagccgccctcgtcctactcgctccccctcctgctgtgcaaagtgttcaggtggccggatctcaggcattcctcggaagtcaagaggctgtgttgctgtgaatcttacgggaagatcaaccccgagctggtgtgctgcaacccccatcaccttagtcgactctgtgaactaggtaagaagttgttctgagtccacctttcgttccctctggcgtggaaatgctcgaggatgtgtgtataacctcctggaggagacaaggaatctaagtcagagaagggaccaggggaagcttggggttccctctaagatttttctctattgcaccccacccccccaccccccgcctccagaggaggggacccagggttactactgcttatccttctactgaatagacatgctgcagaaaatgagacagtctaatttccgggtctgcaagggggtacagagtaaagtggggaatccggcttcccccgcacccggaaaggcgatgaggtgtgtggccgagttggattcgacccaagcccgccaaggaaggctgggagaaactagctttaaaggctggaaagtctctcctttagtaaataaggacagtcacgtgggacacgagtggcccagatactgtcctggcctcacagctttggagtttgggggcagtggtaggatggagactgaactgggtatccagtctcagctgtgcgagcttcggggtgagaaggaacagcttggagaagttgggtggcctcgacttttaatctttatttcgcacagaaaagcatacagttagtggtccttagggtgtccgacactcccaccccctgagtttcggtgatgttcttccctgctccataattggcctgggcttcatggctgggaccctgagcaggttcctccccgtgctatcctgatagctaggttgcccatgccttctgcttgctccttgtctttgtgctcagggtagaggagcataccctactccttgaaaatcttccaagttcaccagcggcacacttgtgtgtgtgtttctcaggtgggctgggtaggattccctagttgagtgcgtgggtgccaagctcagcagcgggggtggaggtgactggtgctcctagaggaggggagggccggggaagcggcatctgtagttgtgggacactaagcagccccaggcgccccccaccctagagactgttccgtgcgcggcccagccgctggagccctggcccagccggtggtttccagcccggcccgccgagcgcggcggcggcggcggtggcggcggccgcagacgtggaggagcagagcgccgaggctggcgccaggcggcctcttttgtttatctgacagctaaatatcaaggcaatcaccgcctcgcggccctgccttcaacccccacagctaagacaaacagttgggctaaaagaatgcctgagttatcataagtttctatctctgtttctcatggctcagcctttatatccttttacttttttaatttcagagtctccccctcctccttactccagatacccaatggattttctcaaaccaactggtgagtagatggttttcaagtctttcgattcttagaaccttggtttttgtgtctaggttggggcctagagtggtgtttgggttgctcaaagcaattttcctctgttgttaagtttggatttttgtcttgttgtgattggatttttttttcccccataaagtatctgactccccccctccccagatacgttttacagtttgttccttttttttatttattttttttaatgcatttgaactgtgtgacggaagttagttcagttttaacacatggaggcttttaatccactgaatgttttgggagccaaataggacaggttgatggaaacaattctgaagctttgtaagtgccagtcggatctgtgggtagggatgggtacatggatgaggagcgattccgaaggcaagcttccttccgtttggaggaacacactaggttaggcagtgcagcgagtttagcgaggattatgttcccgcctgctcagtcacccacaagtctgctttctcctggggttttctcagaattcttggtagagagaccataaaagttttccgcacagctctgcctgcctgttgctctcttgccggatggcagagggccagggcagaagcccatttgagactggcaccagccctgttgtggttgtctgcattcagcttctggctggcagtcctagggcccatcccttagagctgacagtgccaggggacagggtcagcaaaacagatgggggtgggggggatggccgcagggacaagtcctgcttccttcttacagtggaagaattacagaatcgtttgctgcaaggccaggtttcagcttttgtcttttgtgtctgttctgtggtgctttacagcagaaaactgcaacacttgtgatgtctttgctttgccaaggagaggcgaaagtaaagggctggccaccgtttagctcttggaaccttttgcttcatgagttttggctgttgtagggcttccccccctccccccatttttgggaactttgtcataaattaaatgcttaatgaatgtgtaagcaaagccccagctagccctcccttcacgtgcctcgccagttccctcaagttgggaaggcgttgctgcttgcctggtgtctgtctaataggtggcctgcagagtctgatattttgctttcgatttacaaaacaccagataaatggtcattaatgacaagataactggctctctgtgtttgcaacaaacttgaaacgggcattagcaaactctgagggctataacttgtcttgagtttatggcttaaaggatccagaattgttccatgaggtcacgtctcccagggtgtccacctcagttctttcttttggctttgtgtttcctcattcgtctttcaaagcgaaggccctgtggctccagaggtgaagacagctctggttgaggttcccctaaagtccaaactccatagcaaagaaggaccatgtgttcttggatttgccaaaaagatactggggtaaatctgttcgcaagatttcagcagtccttctggcaggccaggacctcattttcggggagtagagtgatatatttattcattagcaagtgttgacattaggtagcaaaatgtgtgtaaacagagaagccacaaagacaggaatgtgccatttccaaggaggggagcaaccttctcccatcacccaataggaagtgattaacctgccaatcggaaacccgagcagctggctgctcaccccaaatgttttgcttcaaacaaaacaagaaaaagaacccacactcaggcaccacacggtgtggaacacgggaaaggagccgaaaggccccattgagaagagctattgatccggacagcagagctgggctcaggactggcccaagggactggtctagggcctgattgctggttgtggtgatcaggggtgtagtagctagaaatgcaggggacgctctcaagtcccacacccctccttcccacccagtgtgtgggaaagtgttgacctgcggatgtagatgttctttcccgggttgaggttgaggagtttggtgttgggttaggtaggtgaaacagaaaatagggttttccagtggacaactgttaaaatcttaatgagccagcactactgagggaatccctttagcgagatctcctgcttcagatgaggcagagggaaaggttctggggcctgggatagttgagctgagggatcctttggaggttgaacttggaaaccggaagggcccggatttagatctgcacccggttctgtatgtcccagaccagttgtgtgcaaggactcttgcctggacctcagggcaggagtggctctgacttgggtggcttttgcaaggcacgaaggtactcccactctgccatcccgaaaggaaaaaggatttgctgtttgtgtacccacgtctcgcctgtagacagatgcaggagggggaggggagcctgagtggggctctgtcccttctcagctctgtgtccgctgctgaaaggcaaggagactggctgctgcagggatggcctctcatggtacaaccttcaaatcctaccagaacggctggcatcttgatctgccatctggcccctcttaatttaggtctctttaacttttccgagtcccttttaatgaatgattaggtcattcattcatttatttggtggttgttgtttccatcagtcattatacaaagtagtaccagggacactcagaagagcgatgtgggaaagaaccttacacgttcctcgggctcctggaactgctgggagaagggggtgtgcgtctttgttccacagaacccagggcttaattaggtgtttggtaatgtgcggtggtagaggagagccaagaacagctcagctctgctgtctgccaggctgggctctggggagcaggagacggtggtggaaggtgagagatttctgacttgagagttatctttgcagagtcttgggtaggtggaaatctagacaccagagaccaggttcatcctggccaactccagggaaggaggtttgggaatggaagcaagccctggggtagaaactggacttgggggtggctcagctagctgcttgggtggcccctggcctagtggagtggcacctcagtttccctgggtgcctctcaaatgccttgctgcctcccaggggtggtaggggaggcctaattaacgtgtgtaaagccctcctaagatcaaaggcgatgcagagggcagagcgcatttcataaaaatcacttgtggttgcatcttggagctggctcacctttgatgtgagacaggctgacaggctgactgaggtctctaggctctgccctggagaggccaggctctgcctttgaaatacaccttgcccctggcacacggccagccagagttgggggagtggctgcggggtgtcttccatctgggggagcgtgagggggaggggaatgagaagccaatctctagaaaatggtggggccagaaagtacagacttgcatcctactcctttgtgtgccctccctccaacccccccccccccattgttttccattcgatgaagcatgggtcctgtaaagctgcatattcctggcaggaattatcctcttcattgaagaaatgagacataaacgttctcttatccccttgctggctcctccgtgttccctcccgtttagaagaagaggtttttcttaaaaatttaaacacacactgggcaggcgctgcctatacctgagtaacccccaccaatctttccaacccactgcagccttggggagggaagtgtaagagggaggggagggatcctcagcagtgacttctgggcaggtcaccttcccttggtcaggaactagaaggccatccctaagctgtcctgcttgtctctatctaggctgctcttttcttcgagtagctagcattcatacctctatggccagagagacatctgctaatgcctggtagccagggtgggaggactggatggagtctgtacaaaccagtagtgcgtttgcttttccggagccaaactgtctatggggacttaggaagacgtttgacattggcagtggtgcagaagaaacttacaggggcctctgcgtttgcggtccaggggactgattagttgtggttcgtgggcattatttttttttgttgttgcttggaggctgttccttccatagggtctgtctcttactcagctggaattgtcattatccttgttaacattgaggtcactggtcattgagcacctgggagttgggagaggggtagaggatatgaaatctgctggttaaggtctagtagagaaaatggaagaatatcgtgccagaaagattgtgggggtactgaggcaggcagccttgtagaatctaggtgtctgagcagggtttccagatgtgggtttggaccagcttggaagtaggtagaaaggtttctctctggctgggtccttgctgagaagtcttgaccctgaatccatgataagactggtggaagttggtgagcctgtgcgatttctttctaaaggcagggattgagacccttgtctctgggagtgggaggcaggaggctttgtgctcgatgggagaagagagcaggattgagaaagtacacctcgacccctccttgaccttgggagttacctgagctcaatgggagacttctaatggaagagaaattccaggcagtctgtgattgagcctgacctgactaatgattaactggccggccgcctggagcctagacggggtgacaaggtgctgtggtctgtcttaggctggaccatgaagccgagtagaccattaataatctgcatcgcggctgtgagtcagccctttggaatgtgtggtctcttctttcatgcgtctctcagtgtttcatcaggatgagtgagcgctgatagttcttctttgtgaattgactttttctctcttctctgactgcagcaggctgtccagatgctgtaccttcctccgcggaaaccgggggaacgaattatctggcccctggggggctttcaggtaagagactttctcttttcctagagatcgatggatgctaataaaagcatgggggtggccttcagccacccccgttggtctggaattgttgtcatttacatatactttaaaccgaacccatccggtgactggcctccttcagcttgtcattctagggtccttttttgtgccagaaccttgcccattcccaggaatgggggatctggagtcacctgggaactgtgttgtgtgtgtgccgagcttcggggctatctttcttttcttttttttttaatatttatttattattatacataagtacactatagctgtcttcagacacaccagaagagggcgtcagatctcattatggatggttgtgagccaccatgtggtttctgggatttgaactcaggacctctggacgagcagtcagtgctcttacccgctgagccatctcacatccccagggctatctttcaagttgagtgtgtgtgtgttcctcagaggtcagaggacaacctgtaggtgttgttttctctcctcccaccctgtgggcttcagggacagagcacagatatctagagcttggtggcgggcacgtttattctatgagctatttcctatgggatccacctcgccctccctcgtgttttttaaagcaacccctgacttaagttacttccatttgttaacgttggcatgatctcatgtgcttaaactctttattttgctcttgcacacgtgccttgaaggaggcagacccagcaggtttgcgaggcatagcccaggtgcaagaaggagctcagtggactgtggggttctggagtcacagggcagggcttgctataggtacatagttaccgaagctgccctcagctagacaggctttctctgggccctggagagatggtgctggaggaggtatcctggggaaagccagtggattattatcccagaggacaaaagaggataatatggcaactttgctctgggagcgaagttctttctttcctaagaatgttttcttcccttcctctccatccacgtcatcctttttttttttttcctaagaactagttaaagcaagagaagagaaccaagggtggcgaaattccaggacagttctgggctctcatcagagctggtcttcaggccattggtggacgtcctgttttagcatctcttagtggaagttacgggacctcccttagacctgttgcagggtaggtgggtcctggcgactgactgttgaagagcttcccctatgtgttggagatacagttcattttggactcatggcccactctctcccctgcaggagtggagcctgctggggaatggctgtatggggaccctgtttgttttgattccagtgcagtgtactctgactgttatctgagaccgagggtattgtttattcaaagcttctaatgagaactgagcaggaaaagcagggcctccgggggaggagggagtgggccctagtcactgaggagagggagccagtatgcccagggaaggcttcgcggctttgctttctaaggctgaaatgaggtgagagttcttgagagaacgaagaaacaagagaggaagagtctgaacagaataacacactcaggatgttgttggcttgttacgatttttaagccctgggtgtgcagggaggagccccaggttctccaaaccacataaaataagcaagggaagtggagcctttcggaaggtttgtcttattgataacatcttgtctgtctcctctactagaggaaatgacgacaccaggctgagaaccagcggcccccgagagttcctcgccccgcccgaggagccaggcagcctgacctggtcagccaaccttgtttcccaaaattcccagagtccatccagttctagagaggagctgagaagcagcattctcgttccccactccccactccccacacccccctccctgggtaactgcagcccctgactgagatgggtgaggttctgctagggtgcaggagtgtgtcttgcaagggacggcatgatataacaaaactgcagaaaggaaaaaagggggttgggcggggaggccgccacatgaaagagcatttgttttgaatttcagctcttggtttactaattcccaaggcttcgaagttggagcgctttcttctttctgtacgtagttggagccgtgtagttgcaatgtgcttgggatggggttgtaggaagagctttttgggttgatgccagtgctttgggggtatctggagttgaggtgaaggagcacagagagaaaccacctatactctttgtcccgcgaatgccctcaaagggtggtttcttgagctttggcagaagtttttataccttctggaaggccaagcctcctttttacagaggtggtgctgtgtgtgtgtgtgtgtgtgtgtgtgtgtgtgtgtgtgtgtgtgtgtgtgtgtgtgtaggggactagatgtgtattctttgggtaggctgagctcctaatagacaggggtggctgagtgaggccagagaagatgggaagggggctcctgtggtggacgctggggtgaggcagcgctagaacaggtcgggcatcaatcaaggtggggggtagtgaccccccccctccgaaataacctctgggagtctctttcacaggccctgtgtgccgctttccttcctgtcctgccctggctgagagcgggcttaatgaatggggctcagtttagggtgggaggaaggtcggcagtgtgagccagggcttgattctcttggcaggggaagaagggaaagagaaagcagccgaatgtgaaaatgtggtgccttggagatgggggtggggtgtgctcacaggcccagcccctcctgaaatgcaggggtgactccaaggctggcccttccctttcctgcgcccttgcagagggccagctagaggaaggggagtgggtgtggactgagagcagcaccctggctggcttcaggttggaattccagccttgcagtgtgtggggagggcagggggacgacaggccaaggtccttggggacctgcagtgaaacacaccccacccttgtgagtttcctcagtctgggaaaacgggacatttttagaaggcaataatttggttccaggggattgtactttcatttcttgacagccggctctctgagacagatgggttgctctgtgcaggcttgtgagtgtgtgtgtgtgtgtgtgtgtgtgtgtgcgtgtgctcacacactgcagtcagatagacagacagacagacaagctcatgtgttgacacttgagcagagagatgctgtgcctacaggcagggtcttgagagaatctggggtcctgctctggtcgggtgtcccttacatgaagttttgtatactgtgtggggactggtatttggatgggttcggaactgcagtttgggtttagcctgggtttagctctgtctttgggcaccggtgtcttttggaaggcatgcaaaatccaggtcaggccgttgctaatgctgcttggactcgaatgaggccgggagacccaccttggcaaggactgtcatagctggggaacttctctgcagcccagtggaggagaaggcatgagtaccggtccgggccctccaccacggggaagaactgctctcaactctgcatctttgtagcccctgtctagagagtgagaggggggaggaactccctcggactggggtggaggtggagttgagggatggacactggggacttgaagcaggcaggggtcttaggggcattgaagaaactccatctcccgtctatatctatgtagtcatgtttgtgaggaggggcaggggctatgaggggctggctagttcctttgctttaaggacttagcttttggtggccaggtttggagaggacagattttgagtcagtaccaagtcaactacaaggacaagtctgtctcctctttgctccctgctggcatctgccttagtgtctgaggagagacttcaaaacacatatatataatctgaaatgctgccctggcttagtccacagtgacttgggctcaaaccaagcagttcccagggaagatggctccattctgatgtaagaaagccattcagctaaatgtgaagacgtattttaattgtatggcatgagactgtgatactgaactagagagtctgggccttaggtatgtgctgtttccagggtctcttcctcatgcctaggaacaggtaacctctggtttccaatacgcttggaagtgagggtgggtctgtcacacactgagctcacagctgttagaaaggacaggccttggggagtccgctagcagtgttctctccaggtcacttgagaaatgacttgtctggaactccaagaatacagtctgcatctcttttaaaccaagtcagtctgatggctctaggcctgggcggctcacctgatgcacacccacaccctggtgtagaccagtcctgggcagcatggggctgttggctggcctcttctgtagggcctgaggtcatgggccccgcccctggagagcgactccctgataaacctcttttgtcctggaaagaatgaggtagtcaggcaggggttaaatgcagggtgacagcatttaaaaatctctggagcaaatttgggccgctctgccggctagacgagatggctgctgcctctgcatcctgtccccaggcagaacccagtcaggccagcgagggggtggagtggcggggggggggggcccaaaaaggccatgctaggatggcagttgactttggctgtggtcctgcaacagctcccccacacccattcccaccccaactcccatttggttaggtctctcagagcccactgtagacggctcatgctcagacttggagagtttcagggccagcagcagagaaagggggacgagtcacagactcatgacagggtttggctttcttggcttctttccatattaactccataataattctttagatggtatgctgtgtgataacagggtgttcttctcttctttaaagtgcttagggataagtgtggtgacccctctagcacagtgagcaggcgctcaactgtgagcaaagaccccctactgtgagctaaggcccccatcctgttccctaggttggccttttctttactctagtgtgtgctttgaactttgagcagcacttaagtctttttatttattccatgcacttgcgaggcagaagcagtccgttctctctgagtttggggccagcctggtctacagagtggattcctgtcctgtcagggctgcacgatgagtccctatctcaaagaagaagaaaaaaaaaaaaaagaaagaaagacttctttttgaaatattagacaaccaatatgacaaaatacgaatgccaaacatcctgctgtaccgtacgatctatttttgtttttttttttggttgttgttcttgaccaaaataaatgattaccggaggcaatcacttggaaccggagttacagacagacaagctgtgagctgccatgtgggtgctgggaactgaacccagatcctcggccatcgcagccagtgtgatcttaactgctgctatgatgtgcttacggtgagatgtagttctttgaatggactctgtcactgacggcacatttcatgctacgtggattttacgacaatttttacagatgtagcttttaagtgtattgggggtgggggttgttgttctatcagtgaggagcagtgactggtgaggagaggcgagacttctggcaggggctggatctattgacgggttatgcaggtttccatagcacctagaggtctctgggactattggtccactgatggccctgcctggaacagatctcagcctagcttgctgggagtgaacaatgcatttcaggattgagcttccttccttgtttgtttgtttggtttttggagacagagttctctgtgtagcccaggctggtctcagactcagagctccacctgcctctgcctctgcctcccgagggctgggacaaaaggaccatcaccttcctcggccttcccatttccaatcaagttgcaaaaaccttaattaggaaatttcttatagtttgttccccaagtctgaccttcccgtcttgggtggggtgggggggggagtacacttattcttacttctccccagatgtcgtgtcctcagaaggtacaggggctagcttccatgcgacatccctcctgtatttccaggcaggcaggtgcccctttgtgggagtctgagagaggatactgtaagcgtagccactgggaggtcaccattggccctcgcatctttctcgatgaggattgaatggcccagcatctggccgcctgcctactgtcacacggaggcttcctctctgggctattttcagagggaagatattattaactgctgaggcaccatcctcagtggagtggctaacaccaagaaagctgtattctctgattgcagttgcccagcgtatacccgttggtaggaggtggatatcacctctcctgtctctcctgcttctccccatgaggtcaccttgggcatcccagcccttggccctgttcctggaggaaactgtcaccatagaaggattgcctgcctgactgctcctaaagatgtagaaaacaatactgttgatgtgccaagatggagacaggttgtagtgaagtcaagaactgggcagggaaaggtttgatggagtttaggacagccatttaaaccagtgataactttcaccttgtcagctaacaggaaatatcgggataagacaggaaattgcgtcaccgtgcttttttgttttgttttgttttgtgttttaagaacttctggggggaaaagtttaatgaaaagtagtgtacctgaggagtctgtcagacattgcccctgtccctcttcccttccaggcccgtgaagacatttagaccgttttctttaagaaagaggctgtttgagaacttttatgttattttttattatttaaaaaaatattttaccagaggggtcacccttaattgaactgttcactgcagccttatttcccagttttctgaagaatctttcatgacttttttttttcccagctcccttccccaaatggagaggccaggcaatgcttggctgggaactaattttggtttagctttggcatcccgaaccctgagccccacccagtgtcattagctcagttttaacttgcaaaaaaaaaattttttttttttttttgtggaagtgtaggtaggaatttactccactccttagctgtttcacaccgtagctgtctttttggagcgatagctggcatcatacggtttggacctcgatgctgtcataacgccttctcacagtccccgaggatggggcaagggggttcacaccccatcgatacaactattgaaataggtcatgtgtccatcagtgcttcaagaagcataagcatccctcaagggaggcgtgcagataagatacagcttctatgtattcatccctggggatccgggtcctctcttttgatgcccttgttctgatggctcaggatgtgagacagtgctgcccagagctggagaggagaccagaaagaaagagactgtgtgtggctgcctgctctgccctccctctcacccccaccctcccagctttttttttttccttagcgtgctttgttctgttttcataacacaacaagagccctggggtgtgtaaaagcattgttgaacacttgctgagggtaacttgtctaaacagagcaggacgccagagcagaacgctgtgggcaggtggtgtacccgcagaggttgcctggccggcgcctaccttggaaacacctctcagcctgtgccagccactggctgggcatcctttcagccccagagcaggggagtctcttcccaactgtgcagggtccaagacaagccatggtccttctggctggctctgctggagaggcccttcgtcctctccttctccctggtgggagtatttacgcccaggtgtgaagctgagtgggccatttgtgttgggagaagccagtggtgtctgctttattaattcatcagctatttcctgagaagttaccatgtatcaggccccgtgtagtgtggaggatcagggtctaggttcccagaggatggagttagataaaaagcctccttgaaggcaggggcagtatcttatatagttggcttgtgcagcagagattctactgggatggctctctgggagatggggcaggcagggcttattttattttattttattttattttattttattttattttattttattttttggtcatgtgccctgcctctgcttctgtgaaaaactgaaccacagcaaagtctatagataaatagaggtctccccccggtctggtttcagccctctctgcttgttgcttgatcatagcaagaattcaaggcacgatgtccactcattcttgcagaccccctcgtagcacctggggccacaggctgctagaagtgaccggggagctgggttcttagtgataccattgatgggggacacggcttatgcaacattgggcagcagccaataattggcagctagaggagagatgggatattttcagagcctacgactatttctgaggtctacctcttgattgagaagccatgattgatctggggttcctggcacatagcaatctaagaatgtgtttatcaaggttcttcattcatttctacactgctcctgccctgtgggttccctgggggactaacccgggcttctgtgagctctgagggcccgctaattgaattatcctagaagtctctctggtgcttctcccccccccccccccggggggggctggggagaaggctgggagagctggtttgacttggagccgaaaaggaaggactggtcccaactccagtttcaccgtgtggagctgggaacttctcttagccaaaagacacacaggtaaccaggccagtaactgtcgctgttggctcctggattggtgaatttctctatagcctttttgctttttttgatctgggatctttgcccaaccgacacaaatgaatacagtgccaagataatgacggttggtggctaccttttttttgtgtgtggggggtgagatcattgccctctagctcctgggaagagtgagggccatctgagctgtttgtgagctctgctgtactgtgtgggaattcttgtcagcccagtggcaggctgcctgttagacagggctggccctcccctcattaatcagtaaccaagagggaaaagaaaaagttctccctgaactgggtgtgtgcctactgcttaaggatagattggccccatctccagttctggggtgtgtgtgtgggggtatttcctgaaagagtcagaagtctcagcaggctcccctcccccacacatttgctgttcccacattgtaggtcctagagactgacagtgtggcccgagagaggggagcatggccatggaaggagccatttttgtgttctggacctcgggtggctttagagaaaaggacctaggcttggtcaccaaatcccctctcacccttagatctgtgaagcttcctggatttgtggtttggcgggagtaggggggatgctgggggggggagtgtctagggagccatcaacagcctctttatgctaaaaataagattataattctttctatgtcttgcaaactcttctacgtttctgtgaaagtggaggatcctccctccgctcagggtgcacacacgctgctgttggtcggtcaggggagctttttttcttcctgttaatccgcagtctaaaaccctatgtgtaggagaacaggctcacggtgatacctagaggctttggaaaatggggattccctttccatcctgtgctgggcctcgaacccaggatcattagcacagtgcagacattctacccgcgagcagtctgcctgcttaccctttctttctgtggtaaaacaacacttaatttaaccaccgatttttttttttaaagtgtatatcccacacagagaaagcagcagagtaagggggggggggcgacgctaatgtactagccagattggaacccacatcatgtgaggctaggaaatatttagaaccctggagcatcccacagaagggggcagccatgcacgcacggtggactcccgacccctgtggtaccactctggcttataagaggactctccggagccttccattcccacgggctcccacactggggggaggggaggggttgggggtgtaggccgggaggctcaggtctaggaggtcctgggtgctttgggggtgaagggccaggatggctgagcagtgagtgtgtccaagctggggagattagattacagaggcagacagaagtaatgattaacttttccagtctgcacacagtctccaggctgtctctcggttgtttttcccctgtaagtacagtgcagccctggcctggctaaccctgggcctgggttgtaaagaaaagaggaatgagggctgggactgaacaggggaggagggagcagggagggagctcgctggagagggaggcctttcttccatcagcttctgcgctggaatttattggctggaatgctgtaaatattcaaaatgccttcccgtccggcagtttttcataatccttgtggaacaaggggagcccggggaagagaggggtgcgaaggacgcttgcttctcccggcttttcctgtcatctgacagttcttcttaccgtctagaaaaatactgaatggatggagagttggcagcttctggggatgggggtcagcatggcctgggacttcattaaagcgaagtctagggagaaagcaggcaagatggttttgggttctacgggcctgagaatctttgcccttttgggaaactgattcaatgtatccgtttatgttagaaaggagctttttaaaagttagcacacaaaggaatgagtttcattgtggcactctgggacctgtgtatactatgctgtttcaagggtcttattgaacttctagcatgcagctaacatacttacttagaatggttagtgaaagaagcaaaggggacgactctggtggcgcctttacggttctttctgccagattcttgggtgtacatttatccgtatccagagctggctttgcagttgacaatccaggtctggaattaggagctcttcagaggagctgggtttagcagggctgtctttcttgggcctacaagtggactttgtcagagtattcacccacttcttatgttttctggggcctgactgggttcatatcaagacataaagtaggcaaagtagaggatactatctagatctgggggctccagatgttcagttgccaaaagtaaatgaataaataaacaatgacaaaaaaccctctcacaggagatggctgctgagttattctcggggtggggggtcattgtgggagcttgggggaggggaagagccttgtaggcaaaccccagaggtaattaggctggatatacactcaccagcagccagagaggccatttactgtaaatattatgaatggagttggctgggttgggaggccccacccttcctctgagccactcggagttgggcagagcccgtctcctcagacagcagcaacagcagcagcagcagccgggtacatgttataatttgcatggctgaacacagggccacaggaagccgcgtcagcccaactggcgagacagaaaggagcttttgatttctgtggcttccctcctgggccctgctaccctgttctaggctctgatggctaaatgtgctctaagaagagaccccagagttgtgggcttcagccttggaccctaagggtgggggcagtgcagggtagcacaccttagagctaatcgttgtgattcatcatggctggtccaaggaccgagttactaatcacccttctagaccagaaggctgtgtggaagctcggggcactgtacaggagggcagtaggagagaggctgcagggtggaaataggaagctgataagagaccttgttttgggggcaccactctttctaaaggagacgaatgagtgacaagagaaagaactcctttggaaataaaagaaacaaccaaaacattgctttagaggtgggcatggcgaggtttttttgacgccctttttttctccttagctgtttagttttttttacaagttaaatgcaaaactgcccaactccttcctgagatttttcttcctctctagaaggtggtggggatgtatggaggcaagcgcttgtgggaactgctgatagctcgggtcacgtccatgctctccataaagtgagtccaggggcctgttttgcccaaactgctttcctctaatttatagacagatcaaagtgatacctcccagggaagcaagctacggagtgacttactggcaagaaagctatcgcacttccctctccttggcttaaagcaactggacccttaactcaagttttcccttggaacaataggagaggactttcagaacgaggcatttagtggcccggggtagctcaccttttgatagcctgggcttggatcccagctttattcttaggcctgtgagttgggcctccttgcttttgaagtcataaaatggtgatgccacacagtctcaggcggataatctgggccttttggaacacagtaaggcttactggatgttagcactgaccttgaactatcctctcacctgtgtgattggcaggtgcgggtcagcatcttctcagtagttgaggtttagattagagttgagggttctgggtgtgtctagcataccacgtgggatgggctacccacggtcacgttcgtgttgagttgtcatagtaactctgaggctggcccagattctggtttaggatgaatttaagcatcccgccagagttggaatgtgccataattgggggcagggacctaaggaaggactcatttagggatccagctggattggacccaggaatttgactgagcaccctagccttgaaggagattccaacacgctctgaccattcctcccagtccagcaaccgtcagtgaggtattgtgtgtgtgtgtgtgtgtgtgtgtgtgtgtgtgtgtgtgtgtgtgtgagtgtgagagagagagagagatctttctcagtgtagtctgtggtcctcagacttcactctgctcggcttgctgaaggggaggccgagtctcatcaccttcattggtggagagttaacttgaagcatttcagctttcttaagttgctccccaagttcagagttatcccgagctgctgtgggaccttctggaagttgtatttctacccgagttctccgtgatttctacgcatggccagtccaagtcaataaaccacgtagctttccctgttggctgtgggatttgatcgtttgcctcacgagaaggaagctgagtgtccttatcatgatgctgggtgatcctagattaggggttgggcccctcttcttttttatcctttgtcctgggatggtttgagcacactcagtttctcagtggggaggtgctgggcggcagtgctgttaacctttgagatgtctgctgtagaatgggacaagggctggtggctctcgggttctgaggagggaggacccttgacctgtggcaggtgaggtgtggtagtcagtgtttgtgctccaggttgctggcccagcctttgtgtctactggtctgccctttgtttgccttgaccctttgtttgccctgacgttggtgattgactgcaggaggagcttgcatgccagcctaccctcaggttttggcagaaaaataggactttacagtccaagtgcctcacagaggtgagagtgggtgagaccctcctccttggccatctcctactccagccagccaccccatgtctttcttggcagttggggacagttaaccttgtgagtgcccattctgtgactctgtctattctggcttcattttgcaatcttgttttctgtcacaagagatctaaacaccaggactctgccatgagtacctgtatgtgagcccccaactgttgggggtgtatttgtctagtcggaatcccgttgtttgtgggtgacctcagtcttcctcatttctcttcacacctttaagttttagttatttacttattgtgtgatttttgttttttattgtggggggagcacaagggtacatacagtgtttacgtgtggaggtcagctagttctctccttccaccatctgggcttcagggtggaaggagtccagcgtgtcaggcttggttgttggcacctcggcctactgggccatctcgacagctctatatacctttaaatggtgggatttcttctgtacctaacgggtggccttgggtgcagttgaggtccaaagtataagaggcattcgtgagtctagtctataagtgtctgttccttggtgaccggggtgctagctcttcttgctcagtggtcttccctatgaacagtgcagacaccatgaaaccctccctctcaggtctctactgctcccttccccttaaagggaagattttatgcattaggaaaatgtggagggggaggggcgaacaccttaatggaattttagatctattcagcactttttctggtattgcttcaaaaaaaaaaatcccctcagctgtaataaaaaaaaaattgtgagcaggcatctgattacggagctttttacaatgtagtttttcttctggatgcttttgaatgagtacgcgccgtttaaacgcaagcccctgtacactttctggggtggaaaagttgcagaagaacaccagaaagcttataatgctgggagaatcgatgagcagtagtcggtttgcgctggggatgcaagcggtaaagccagagttggacttcctgtcctcttcccgtcccttttaaggtgaccaagacttcgctggccctgcccgtgtgtcctgtgaaactctaggagagaaatccctaccctaacctttgttggaagactgtgggctgcgggcccagcttaggtatttgttccgcagaaaaacgatgttgggtatttcccataagtgagcccagccatttttcagtccaaggtggggcatttgggtgatgtctcatagtgcccggctgccctgcgttctcagaaggtgtgggacttctgcgttgggaatgcgtgcactgaggggtttgctggagtgttttgggcctcagaaatagtctggtcaagaagcaagggggcttgtgaagctgacttgtgtggggctggagacagggaggtgcaagcaggggtcttcctggagctcgttgaggggacgacacccacacactaccatttatctgggctgggccattaacctcaacagaaaagggctttttcctcgggaggtagcctggcggcaaattgctgggtagactggctgtgtagatgaaagagaaacccaggcaggcgtcttcccctccatactctctccccacgggcctcaggctccagcattgcccagtttgttctgtcccagaggcttgcctggcagacaggaccctcaccccttgctaaggaggccaacaggcctggcatggggagcaacttgatcccaaactcctcctccctcctccttcctccttcacattcccttccccctacccttggtgtctggtgccaggtttcagtggggctgggctgcatgaaacaggcattgtaaggcccctcttaaagagtctccccaacctccccccttcagctgctccccaagtcttcctttccctgtccgggtttcttgacccaagttccacacactttgggtgagcactcttgtgtccagaagtgtctttcttactttcttggactaactaactttaggggtcgttggtgtggccttcagagctgagctccctctctgcaagaaagaaagttcagagcttgccagcgctcacgagtttattagcagttgatggatactttgcagaaacaagttaatgcctgatgagtcaccttctgctctgagccctcgtccctctcttgtttttcgtcctttctagtatgtgcgggcacagacattccaccatcataaacgcacactcagacacatgcggtcttatatgcttgggttgtgggtccatggcactgggggcaggggacagtgcaggtctgtgatgttttttttttttccccagtggcgtggggattcaggaaaggaatccaacactatcttggcatcctctttgtgtgtagctgggcatgggtcggggaggccagctagagggggtgtctgtaagtaggggacagtcactcaggatttgtgtgtatgtggctacctttgtggaaaaaaaagaaaaagaagcaagcaagcaagcaagcaagcaacgatctgactggttcccaggtcctaacatgcctataaaacttggactggattgatgtaccaggctgccctgggttaccagcaagctgagttttctcagtcctgcccctgcatggggacagccctctgagcccagaaacaacaaaggcctcgaggactagacacattcccggtacagctccatcttcagggcccaccagacttactggagtgggagagaggcaggaggaggctttcaattttgcccttggtgctccccccccccatatacactccttccccctcttgccttcccccatttttgttagcaaatacaagacttccgctctccaccctgccgccacaaaccacagcgttcctgcagcccagcggggctgggagatttataggcctcagtctggggcctgttctctcaagtctgctgcccactcgagggggaggggctttcttaaacatggcctccccccccccccccccccccgcaaagttcacagaactcttgtttaggaaagtcaccttaccagtgtcacttccaggttgttgtggggcgggggcagggggtggcttacaggaggggcgggcagacaggtcggtgaaaatgtcacagagggcagcatgggctgtgcagggtcaaactggaggagaagggggcacgccagcgagatagactggcaggagtatacaaggatggtcacgtttattttagacgtggcctcttctgtctgggctggccatgtggtctaggctgatgtccccctgcatgtcgtaatttggcacttggccttgaactaataaccttctttgtacaggctgctgctgtcatacagagagagagagagagagagagagagagagagagagagagagagagagagcgcgtttctgtcgggaagatggctttaaaaaaataacatcctcagagtcaccctcatctttatttttaccgtctgatgttcccttgggagcagggcatcgatgtggatgtgagaatcgaacaagctggtacagaggccgcaggtggaccacctggcttctcattctgactgggtcaccacccagtaggccagcatctctcatccaggtcttgggggagtagagaaactgtccctccaggttccacacccgtgggaagcaactcttaatttaggctatttctgaggccttatcccgctcgaaacagcaggaccaggttatcaacggtcccagagtctgtgcttctggggacaagtagacactggggctgaggctgcaggctcagatgagacgagaagggaagatgacagcagtaagcctcgtaattaaaggtggattaagatgtcttccctccattagcactgtagaccctacagctagcccaggcttaccctacagctagcccaggcttaccctacagctagcccaggcttaccctacagctagcccaggcttaccctcactccctcttttgtttttatactgcttatggggacactccacatgaatgcaccgtgtacaaatgtgtctatgtatattcgagaaggagaaaaagaacccggtctctgtcaccaccaacggttgtctgccatttttgtcttgcagattcccaacttcttctggagcctggggatcggtcacactggtgcgtggtggcatactgggaggagaagactcgcgtggggaggctctactgtgtccaagagccctccctggatatcttctatgatctacctcaggggaatggcttttgcctcggacagctcaattcggacaacaagagtcagctggtacagaaagtgcggagcaagatcggctgtggcatccagctgacgcgggaagtggatggcgtgtgggtttacaaccgcagcagttaccccatcttcatcaagtccgccacactggacaacccggactccaggacgctgttggtgcacaaagtgttccctggtttctccatcaaggcttttgactatgagaaagcctacagcctgcagcggcccaatgaccacgagttcatgcagcaaccatggacgggtttcaccgtgcagatcagctttgtgaagggctggggccagtgctacacccgccagttcatcagcagctgcccgtgctggctggaggtcatcttcaacagccggtagtcggtcgtgtggtggggagaagaggacagggcggatcgtgagccgagcaggccaccgttcaaactacttgctgctaacctttcccgagtgattgcttttcatgcaaactctttggttggtgttgttattgccattcattgttggttttgttttgttctgttctggtttgtttttttttttttttcctcctcctttctcgtcatccgtgtgtcccgcttgtcttgttctttgagaaattagcttatggtgcggatttttgttgggttgtgtgtgtgtgttttgtttttgttttgaggtggtgggtgtggttggcaggacaccccctccccccatatacgaagacaggaaacgagagtcagcactgccaagcatggtgtgtgaaagtgggcaccaccttccctttggatcagcgtttcggttgtccgtgcgtaggggtgtacccgagcgacagatgggggaagtgcttttttgtgtgtgtgttctttatggatgcccccggctgagaggctcatagtgccaagctgtgtgtctctctagccttttggacacgctcggtggggcagaggcagtacctgggcagactggcagcaggtgccaagctctgctccagcctgccgaagctgccccgccccgccccgcccccgcccccacaggacacgggcctatccacaggcttctgagaagccagcctgctagaaggctgaaccagaaccaattgttttcatccctgtcttactgccgcctgtcacccgctgccattgtcgagtctgtcttttttggccatctgctcctggatctctctcttgagatgggcttcccaagggctgccgggacagccccagtcacagtattgctaccccagtaccctctcaggcccttccaccgggtcccagccgtggtggttttttcatcaggtttctcccagatgtggaaagtcagctcagcaccccatcccccatcctgtgtgctgagctctgtagaccagcgaggggcatcagggagggacctgcgcagtgcccccccttcctgctgagaagggtgtagccccgtcacaacaaaggtaccatcccttggctggctcccagcccttctctcagctcatacgctcgctcgtatgatactttgacactgttcttagctcaatgagcatgtttagaatttaacataagctatttttctaactacaaaggtttaaatgaacaagagaagcattctcattggaaatttagcattgtagtgctttgagagaggaaaggactccttaaaagaaaaaaaaagctgagatttattaaagaaaaatgtattttatgttatatataaatatattattacttgtaaatataaagacgttttataagcatcattatttatgtattgtgcaatgtgtataaacgagaagaataaagaaaagatgcactttgctttaatataaatgcaaataacatgccaaattaaaaaaaaaaagataaacacaagattggtgtttttttctatgggtgttatcacctagctgaatgtttttctaaaggagtttatgttccattaaacaatttttaaaatgtatactgcatcccttgttgttcagagctttgtcttggcttggagggaggctgggaggtctatcagtggagacaaaggtgaatcggcccggactttggcttagttcccaggtctggaggaccccctcccctagatacccttctgttaggtgtgacccaggtcttctcattgtatattgggaagtgactagagggagccctgtggctgacttcaggaggaaaagtatccctgggagactggggtggggggaggattgggtcagggacagaagagcagggacatcctcaagaaccaggatccattggcccttgctccttccacaccgtcctgattcatcctcctcaggggaggggactgtggcacccgggaaatggaggcttccacctcctcacccctccagtgatgacggagggagttcaggcttcattcttccgtcgctgggatgttcatgactgacggcttcaccagtcccgtggttctgttcaccctggggctctgtgaggtccctcttaagttctctgcctgcacgagctgagctgggacttcccattcatgttttagattgatgctcattatacacatatcaataatactacatgtgtacctgatgcctggggatgtcagatcccctggaacttgagttacagatagctgccatgtgggtgggagctgacagtccaacccagaaccctctgtaagagcaacgagtgctctctccaacctttgatactaaaggcacatcactgggtgccaggagtgatgttaatctttcttaggatccccaccccccaccccgcgcgcaagaatggaggcctttggaggctaaggaagtcaactggcaactatgacctgagctgtaatcctgtgtggccggtgtcccataactcacttccttgcccctgctgtgggagcagagcctctggatttggaaggcacagagttctagaaggaggccagatttgggtatggagtgtgagttctggtggggtggctgtcagaccactctgaagtctggcatcttcagatcatctggcgttaggtggaagttgataactctgctgcagaagacaccatccactgcctgtgcccagggctgttctgtagacatctcttccagcctcccttggaggttcggtctgcctctgaagaggaaaggggatagttgggggtgggggtgggggcagagttgtgttaggtttaatgtagcctgaaaaaaaaaatcacttggttaggctctgacctttttattcttattttttagtatagagtagattttatttagggcatgggggggggggggcggagttaagaaggtagtagaggcagagagaaggagagtagataaatggaggcggccatgatcacgtggaaagaaggggaaaggtaatgggaaggcggggcacaagggagcgagaagcaagagtgtaagccgttctgacctttttagtgtcctgataattctcttgaggactgcccaaacagtctcgataatggacctccctgtgggtacacgagccgtcaccccctgttgctggtcaggcaatttcttgaggttcctccacaggaagttttaggtctgatttgatcacttagctgtgtaatcactgggtagggcagggttaaggtgagcaaggcaggtgcctgtgttttcttaagtaaattctagtttgaaaggtcagaagccttttgacctctaaacccagttcccaggatttgcaatgtttgtttacaccaaggactctcccaagatcatgctatcctgcagaggatgctggcggatcttcctgaaacagtctattcttcagagggtaaatgattagccccagaagacccaaccctacacagcttgtagctgaggcagacatgcacccagagacacagcccagagtgacagggacctctttgttggtttgtattcccaacagttcaaagaaagcggactcaagtccactgctattccagatgtgtcaatggcaagcagggtgcctagaatatggcaaacaataaatggctcacagttactggctagggaattgggcacagttgggttggagtgctcactttggtgagtcacccaacacttttggccctccatttatgaaacacaaataggtattcgacctgccctgtggggccagaatggggattattgagaaaatacacccagagagctagctgagccatgtgggatcgctaattttgaccctacagatgcaacaatttcattcggttaaatcaatgaaatgatcagtttgagggagtggagattaggagtctccgaccttcatcattctctagacatgtctagacattctctagacagggctgacagtgtcctcggggtggtatgcacagcaaagtgggctggagagaagatagcgaatggattgtgggggatggtcgacaccggggtgagagcccttctgtttaggatgccatcaaactgttgaacacaggccagtcaggaggcaaggccaccagaagccatggctccaaagccagggtggcctgccttcgggcagtgtggacacaggcttttcagggaacagcctgcacggtacagtcccggtttcctggcgctggagctgcaggcctcaagctgccaactcagcacttttccctcagccagaagtagcccccctctctttctgaaagtaatgattttctaaaaatggattccctcccctcccccagctgcaattaatctactgaacacaaagtggccgctggaggaggctcctggagagttcgaaccaatgcacgctcattgattaattcagggatgatttaggggtggggaggggttggggggtgcacacagcctctgtggggacaggctgggtccactttggaatctctgaggtgactgttagacccacacagactcattcaggagcctccttccagcgaggccataaccagccgctctgggtatttgagaagctgggcccaggccccaggtttgacatcctttcaatgaaccccagaagatgaagatagacctggggctgacattttcagagaagctttggcggaagggataccagacacatggaggacgcttcctcctttctgagggttacagtaaatggtggcttcagacctgccagtttctcttcttctgtgggcactttggtttcaagtacgagcagagagagctctggccctgttgagcacaatgattgaaattgtcaccaggtgtcccagcacctctcctatcttatcctgccagagttttcttcacagtgtcgttgtactgtgcgtatgattgtctctatttgttgttttggttgctgttgtactcctgtggcacagggtcagctctgtgactgtacagcctagctccctggcatctagaatgatacccagcaacatagtagacactgcaggggctgcttggatgaatctatgctcagtgactgagtttccgggagtgtggggggatgcattcatatttctaccaaatttccctcccaaacagtgggcatcttcttactttcagatacctcatgaaaacaaagaggtggttcttgttattttcttcccaaaaagtgaatgagaacctgtccctcttagggtggtaataacaaccacaaacaccagagtagtcacaattagaacagcctaggggctggcaagatggcccagccggtgaaagtgcttggattcctaagactgtgggactttttaaagtaagtctgtaaaatgttttatgctgtgatgtttatattaacgtgtgatcttggggtatgaacaagaaagggaaggttgtggctttacattgatgtgtttgtgtgtccatcagtggcactgaatagttttatgctaacttgatataagctttagtcatttgagaggacagaacctcgattaagataatgcctccataaaattcagctgtaggcagacctatagggcattttcttaattagtgaatgatgggggagggtgccactgagggctggtgaccctgggttctataaaaaagcaagccgagctgggcagtggcggcacacacctttaatcccagcacttgggaggcagaggcaggtggatttctgagttcgaggccagcctggtctacagagtgagttccaggacagccaaggctacacagagaaaccctgtctcgaaacaaagcaaaacaacaaaacaaaacaaaacaaaacgcaggctgagcaagccatgaggacaagctagtaaagccagcagagaacagccctccatggcctccgcatcagctcctgtcttcaggttcctgcgctatttgagttctggcccgactcccttcaatgataaacagtgatatggaagtgtaagacccaagttgccttggtcctggtgtttcactgtagcaatagtacccctacctaggacaccacccaaacctcatgctctgaacttgatcctagaacccatgccgagatagattgagagactcgtctttagagagctatcctcttctctccaacacccgtatattcgcatcacggacacacgtacagtagttataaaaagtacaacaaagcaagcccactgtgtgtgggagagattctcacaagttgtgttgtgtggtcctgaagggaatgctgtcactttagcccattttacagatgaggatgtggaggctcatgagtgaccccctagggagagaatggaagtctgtggcattccaagccttgctgtgggtcttaacaggaggctggagatgccagtggctacgggaagggagaagctctgcagggagggctgttccagggctagactgtcctgtctcgtccgagcaggggctgtaatctttgcttcacacggggcgtcgcgtcatcagcaccaagtctaatgacatactgcagccagggaaattacagtgcccaggaggtttgtcccagaggccctgcccagggtaattccagagcagggatggatgctgggaagtaatgaggaccgggcgggctgctggcctcaggtgatggaagggtatgtgagggaaatggaggattttacttttcattgaaaatagtgaagaacaagccaggtgtgctctcgactgtctctgatttgggagaagctagagtccaagacagccagggctatagaacaaggctctgtcttaaagaacaaagcagcaatacccaaaaggtgtaaaatgaaaaatgaaaagtcaaagtgacccagagtctcacaacttaagccatctctgcagcactgctcttcagaggggactggacaggagaactttgagcgccgcctttctgaatttggcccatgctcatgaatctgtacagctttttacaagtggagttgtattggcctgcaacctgctttcctcctctaacgacacatctcggacatttttttttttgtaggtcattcattttcatagttacctagtactggagctgaagtgtaagaggccagcacgcacttcaaagatagtgtcgcttagaattgtataagagttgccagtgtgaacctggcactctctcctgatggtggtgggcatggacctggcctaaccgcttttggaaaacatttggcaggcaggctctgccaaagctaaaataacactggcatctgaagtgtatttccatatttttcgaaagacatgtagaagtatcttcatagcaacgctattccaaggagccccaaccttggagcgacttaaaatgcccatcaaaaaaaaaaaaaaaaagtgcaacagttgtgttgcgtacgatgctcactgggaatgagagagtgagggacccgtgaccactgtgctcacctaacgggtgatgcggagaaggtgtctgacttccagaaggagggaacctcgatgataatcaccagagtaattctaacaatctccatgctgtgttaaagccaccacacgccagctggggatagcagtcagctgcagaaggcttgcctagtgtgctcaatgccctaggtttcctgcgcagtaaagcagaaaacaagaaacaaaacaccaaaacaaccccatcgcatgggacagtctcatttacataaagctcaaaaccaggtgaaactaatttttgctgttaagacggcaggcagggggcatggggatggggtgggagggggggcggagcttcggctcctcggattctgtttctctgtctggggttggttacatgtggcgcagtttgtaaaaatgatttgtagtacagttctacacacgtataataattcagttagtctgctctttacgcaacagcagcagagagggctagggagacggcttaggggttaaaacttttgcagtgtggaagcaaatgaacgagaactcagatcctcagaggcgcagaaatgtcggctgaatgtggctgcccgcctgtaactctagccctcagaaggtcgggcctggggatccccagagcaaaccggctgttcaggactagccactctgtgcttgattgagagaccctgcctcgatgaatacggtggaaacatgactgaggatggtgtctgacatcaacttcaggcctccacgtatacccacatacatgtgcctccacacatgcaaacatgcacacacaaatggacatatgcacaacacacacacacacaaatggacaaaaataaaaataaagacagtggaattgttcagtcccctccaaagaagtcagtcttgtttccctaagctcaccgtttctcttgtcttcccccaccttgccagctgtacccacaagagaacctccatttacacctggggcagggacagaacaacactgacacttctcatttgggactccctgggccctggggaccagcctctaatgggggtgagaaggcactgactggaactttttagggtagggtaaggagccttgttatggaggtggacagtgtgcatctgcgtgggggaggggagaagacaggagcggaagaggcacagtggcggtgactgttcacagaactttggagggcactgacaaggcatccttggtgcacagctctgtagatggtagcttctaagtcccaggtattacaaggacagacatacaggcagcaacagctgctagcagctaaagggtgcttacctgtgttagaatctgtttctttgtgtcacttccttgccactttaaacacaaggcgctccagttgatagtcaggtacctgttggagaaccccaggtacccaggaagcctctacccttacagtagacacacagacacacatagatacactcacactcataaacacacacagacacaatcacacagacacacactcagacacacttacacacagacacacacggagacacacacaaagcacacacagacatgctcatatgcacacaaacacacagacagacacacactcagacacactcacacagacacacatagacacagacacacatagacacagacacacacacacacacagacacacatacacagacacatacacacaaacacacatactgaattttgattggcatttgctcttttgtggactctgggacgctggcacacaaagaaaatgtggtggcctccacagtgtctcagatgaagtgcaaccacacttataggcactgttttatttattatttggaggatgctcaaaatagtcacttgtttactatttatttgactttaattcactatttaacaatcaggtaagaggcaggaggggatgtagtaagagcatgcgtgcatgcagtgcgctggatcccagcccccagaacacaaaggcaaattcacaaaaggaaaggagaaagagttcaaatgtcacctcgaaacggatgaaatgtcacctccagtcccagccgtcacttagacactcacctcattcctttctccagtccttcttacattccctccacaagctatgggctcacaggaaacttggtgagggaatatttgttataacatgatacaagagtgtgctttaaattcttgccatttattttatgtgtctagatggttttccttcatgtatatctgtgtattacatgcatgcagtgcccatggaggtcagaagaggggggtcagatcccctggaactggagttacagttgcttgtgagccgtcaaacgggtgctgggaatggagtccggggttctttgaaagaacaacagtgttcctaacagcttagctctctctctagccccagagtgtgattttttttaagtgcctcgctctacccctgagcttcatattctctgtcagtaaactgagtaactttgtctcggccctacatgtccacagctgcacactgcacacccaagcccccctcccccaacactccactgtctcgtgaaatcctttcattgacttatacaaatgactttgttttaaccaacactctcatctgccatggaagagggtgctgccccagctagctgagccccttgtcctactgctcacggagaggaaccctgtgagggccggtgcctgacccatggcctggggtagattccatgcttagtgcaaggacacacggcattcgaggtatatttgttcactctagtctgggtggaaaaaatcggaaccgtgagggttttgaggcaggccaggatgcagtcaacaggatgtgcatttttgttaatctgcctgggaaacttgcccttgctgggttttctggaaagggcagagatcagtttcttgcttttcccagcttccccctggccagcaactggcccatcagatgcccctgccattttggagtcaggatatggcaacagaaacacaatcctgcagaatcattggaactgtgggcaacagccatacacactgcttcgaggggaacagcagggaccacagagaaacaacagaatcaggttagtgcccactgctgatgtcagtgggcagagaagagccgcccgaggttctgtaaggggtcggtagtgttctttagaggcccgtgtgaggtatgacttgacagtcatcctcgctgtggagtaactttgtaacttgcatctgtgactccctcaggtcccttttccttctttgcttaactcaactgtaagaatgtcattttataaccaggaagactgaccatggatagagttcggggtggatatagggtactggacaaggctggttaaaaaggcattccccttgggacaggagggcggggattgtctgggcctcaccatggtgttgtaaccatggcatcctcctacacgggccactccacaccgacagattggtaaagttatttctgcctctgggactatttcaggaggacccagcctggactaaagccatcctaggcgaaagcctcattcacgaggactctgctgcttccaagggcagggcactgctgagttcagcaggacggggaagcctggtttcttcctttccttattctcctgccattgaccccttatgagcttgggtaagtcctagtccccaaggcaagatccttcgacgtgtgcaggaaggccttttctggtccgcaagcttcctattggaatagcaccagggccccgccccgcccccaatacctctgctctgctttgcctccttgacagcctgtctctctccatctccacaggtacaagtgaagaaagtgcggttggtgggaccagggagcgactgattgtatcagtgggtgtgaggtgggggttgaggaccttgtaccgcgcttctccttgggtcctggaccatgccctgtttttctccctgtctcatcttctgaaaaactcagtttatctccttggcctttgaggagcaggctaaaaaaatggggggagtgagaaagagcccaggaccaggggataaggaaggagagcagaaggcagggccctgaggcagctggcagccaccttctggaaagcccccctcaactgagccccgtgaaggccaaggaggccccgtctccagtccatttcccttgaactggagccagcggtcctcacgcattactcattggcggggcggccctggctccaagccaaggaaaacaagcctccagcctgcctgggggctggttggcctgggcttgggaggggagggaggtgcccgcattacatccagcttgcttggtcctcctgcggctcaacccaacctgactctaggctcaagctctctctctctctctctctctctctctctctctctctctctctctaggctcaagctctctctctctctctctctctctctctctctctctctctgaggctggttttgaactcatagaggtacaccatttctgcctcctgattaaagggattaaaggcatgcagcgtggtcgtctgacttctttcctttcctttcctttctttttgttctttctgtattttagagaatattttaaattttatttttttaaaaagatttatttattttatgtatatgagtacactgtagctgtcttcagacacaccagaagaggtcatcagatcccactatagatggttgtgagccaccatgtggctgctgggaattgaactcaggaccccagtcagtgctcttaatcactgagccatctctccagccctgattttaaatgattttattttatgtatatgagtattttacatgcatgtatgtgtagcacgtgtgtgtattgtctacggagtccaggaaaagggctttggattctcctggaactggtgctacagactgttgtgagccactctgtgctgctaggaacggaacgtgggtcctctgcaatagaagttcgtgctcttaatctctgggccatctctctgccctaagactttttttgtttgtttaaaattttttgaattgtgtgtgtgtgtatgtgtgtttgtatgtgtgtgtgtgtgtgtgtgtatgtgtgtgtgtatgtgtgtgatgtgtgtatgtgtgtgtgtgtatgtgtgtgtatgtgtgtgtgtgtatgtgtgtatgtgtgtatccctggatatagaactcaagtaattagatgtaaccttttttctctcccttgatgttctttttttttcccctggttttcgagacagggtttctttgtgtagtcttggctgtcctgaaacctgttctgtagaccaggctggccttgaactcagaaatctacctgcctctgcctcccaagtgctgggattaaaggtgtgtaccaccataccaggcccttgtctaagttttaaagattcatttatttcattttattttatgtacatgaacattttggcagcatgtatgtttgtgcaccacatttatgcctggtgcccgaggaggccagaatgaggtgccagatcctcttgaactggaattaaggatggtgatgagccacctgtggcgctgggacctgaaccctggtgttctgcaaggatgacaagaatttcttcactgagccgtctgttcagtctttgtccatttctggctgggttgtttgtcttgttcttgagcaatgaagcatcctgggtttttttttttaatatgtatttgtttatttttagttcagatatgtgagtgtttggtctgcaccgatgtaagtgcgccaagtgtagacggtggtcatggtgatgttggattccccacggagctggagttacacaaaggattgtggcccacaatttgtgtgggtgctgggaatcaaagccaggttttctgcaagagcactgagtgctgtcagctgctgagccacttctccagtcccttgtgcctcttccaagagtcttctaatcatcttgttggcttctccatacaggagtcagctggaattttgacagcaaccccactgaattggtaggtcagttaggggtgtcgaccttgagatgtgaaatatcctctaccctgattaatggctgtctctctttctctttttgtttgatttttgttttgttttgtttgtttgttttgaggcagggtttctctgtgtagtcttggctatcctagaattcactatgtgcctcctgggtgcttggataaaagttgtgcaccaccacccccagctgtttttccaattctttaaattttccttcccttcttcaaatgttttctagttttcagagcataacttctcttgtgaaattttgaagtagtttgttcttttttttttgacgctatcatctttttttaaaaa

SEQ ID NO: 88 - DNA, 52570 bp, Mus musculus
tttttaaaaaaagatgatagcgtcaaaaaaaaaagaacaaactacttcaaaatttcacaagagaagttatgctctgaaaactagaaaacatttgaagaagggaaggaaaatttaaagaattggaaaaacagctgggggtggtggtgcacaacttttatccaagcacccaggaggcacatagtgaattctaggatagccaagactacacagagaaaccctgcctcaaaacaaacaaacaaaacaaaacaaaaatcaaacaaaaagagaaagagagacagccattaatcagggtagaggatatttcacatctcaaggtcgacacccctaactgacctaccaattcagtggggttgctgtcaaaattccagctgactcctgtatggagaagccaacaagatgattagaagactcttggaagaggcacaagggactggagaagtggctcagcagctgacagcactcagtgctcttgcagaaaacctggctttgattcccagcacccacacaaattgtgggccacaatcctttgtgtaactccagctccgtggggaatccaacatcaccatgaccaccgtctacacttggcgcacttacatcggtgcagaccaaacactcacatatctgaactaaaaataaacaaatacatattaaaaaaaaaaacccaggatgcttcattgctcaagaacaagacaaacaacccagccagaaatggacaaagactgaacagacggctcagtgaagaaattcttgtcatccttgcagaacaccagggttcaggtcccagcgccacaggtggctcatcaccatccttaattccagttcaagaggatctggcacctcattctggcctcctcgggcaccaggcataaatgtggtgcacaaacatacatgctgccaaaatgttcatgtacataaaataaaatgaaataaatgaatctttaaaacttagacaagggcctggtatggtggtacacacctttaatcccagcacttgggaggcagaggcaggtagatttctgagttcaaggccagcctggtctacagaacaggtttcaggacagccaagactacacaaagaaaccctgtctcgaaaaccaggggaaaaaaaaagaacatcaagggagagaaaaaaggttacatctaattacttgagttctatatccagggatacacacatacacacatacacacacacacatacacacacatacacacacacacatacacacatcacacacatacacacacacatacacacacacacacacacacatacaaacacacatacacacacacacaattcaaaaaattttaaacaaacaaaaaaagtcttagggcagagagatggcccagagattaagagcacgaacttctattgcagaggacccacgttccgttcctagcagcacagagtggctcacaacagtctgtagcaccagttccaggagaatccaaagcccttttcctggactccgtagacaatacacacacgtgctacacatacatgcatgtaaaatactcatatacataaaataaaatcatttaaaatcagggctggagagatggctcagtgattaagagcactgactggggtcctgagttcaattcccagcagccacatggtggctcacaaccatctatagtgggatctgatgacctcttctggtgtgtctgaagacagctacagtgtactcatatacataaaataaataaatctttttaaaaaaataaaatttaaaatattctctaaaatacagaaagaacaaaaagaaaggaaaggaaaggaaagaagtcagacgaccacgctgcatgcctttaatccctttaatcaggaggcagaaatggtgtacctctatgagttcaaaaccagcctcagagagagagagagagagagagagagagagagagagagagcttgagcctagagagagagagagagagagagagagagagagagagagagagagagcttgagcctagagtcaggttgggttgagccgcaggaggaccaagcaagctggatgtaatgcgggcacctccctcccctcccaagcccaggccaaccagcccccaggcaggctggaggcttgttttccttggcttggagccagggccgccccgccaatgagtaatgcgtgaggaccgctggctccagttcaagggaaatggactggagacggggcctccttggccttcacggggctcagttgaggggggctttccagaaggtggctgccagctgcctcagggccctgccttctgctctccttccttatcccctggtcctgggctctttctcactccccccatttttttagcctgctcctcaaaggccaaggagataaactgagtttttcagaagatgagacagggagaaaaacagggcatggtccaggacccaaggagaagcgcggtacaaggtcctcaacccccacctcacacccactgatacaatcagtcgctccctggtcccaccaaccgcactttcttcacttgtacctgtggagatggagagagacaggctgtcaaggaggcaaagcagagcagaggtattgggggcggggcggggccctggtgctattccaataggaagcttgcggaccagaaaaggccttcctgcacacgtcgaaggatcttgccttggggactaggacttacccaagctcataaggggtcaatggcaggagaataaggaaaggaagaaaccaggcttccccgtcctgctgaactcagcagtgccctgcccttggaagcagcagagtcctcgtgaatgaggctttcgcctaggatggctttagtccaggctgggtcctcctgaaatagtcccagaggcagaaataactttaccaatctgtcggtgtggagtggcccgtgtaggaggatgccatggttacaacaccatggtgaggcccagacaatccccgccctcctgtcccaaggggaatgcctttttaaccagccttgtccagtaccctatatccaccccgaactctatccatggtcagtcttcctggttataaaatgacattcttacagttgagttaagcaaagaaggaaaagggacctgagggagtcacagatgcaagttacaaagttactccacagcgaggatgactgtcaagtcatacctcacacgggcctctaaagaacactaccgaccccttacagaacctcgggcggctcttctctgcccactgacatcagcagtgggcactaacctgattctgttgtttctctgtggtccctgctgttcccctcgaagcagtgtgtatggctgttgcccacagttccaatgattctgcaggattgtgtttctgttgccatatcctgactccaaaatggcaggggcatctgatgggccagttgctggccagggggaagctgggaaaagcaagaaactgatctctgccctttccagaaaacccagcaagggcaagtttcccaggcagattaacaaaaatgcacatcctgttgactgcatcctggcctgcctcaaaaccctcacggttccgattttttccacccagactagagtgaacaaatatacctcgaatgccgtgtgtccttgcactaagcatggaatctaccccaggccatgggtcaggcaccggccctcacagggttcctctccgtgagcagtaggacaaggggctcagctagctggggcagcaccctcttccatggcagatgagagtgttggttaaaacaaagtcatttgtataagtcaatgaaaggatttcacgagacagtggagtgttgggggaggggggcttgggtgtgcagtgtgcagctgtggacatgtagggccgagacaaagttactcagtttactgacagagaatatgaagctcaggggtagagcgaggcacttaaaaaaaatcacactctggggctagagagagagctaagctgttaggaacactgttgttctttcaaagaaccccggactccattcccagcacccgtttgacggctcacaagcaactgtaactccagttccaggggatctgacccccctcttctgacctccatgggcactgcatgcatgtaatacacagatatacatgaaggaaaaccatctagacacataaaataaatggcaagaatttaaagcacactcttgtatcatgttataacaaatattccctcaccaagtttcctgtgagcccatagcttgtggagggaatgtaagaaggactggagaaaggaatgaggtgagtgtctaagtgacggctgggactggaggtgacatttcatccgtttcgaggtgacatttgaactctttctcctttccttttgtgaatttgcctttgtgttctgggggctgggatccagcgcactgcatgcacgcatgctcttactacatcccctcctgcctcttacctgattgttaaatagtgaattaaagtcaaataaatagtaaacaagtgactattttgagcatcctccaaataataaataaaacagtgcctataagtgtggttgcacttcatctgagacactgtggaggccaccacattttctttgtgtgccagcgtcccagagtccacaaaagagcaaatgccaatcaaaattcagtatgtgtgtttgtgtgtatgtgtctgtgtatgtgtgtctgtgtgtgtgtgtgtgtctgtgtctatgtgtgtctgtgtctatgtgtgtctgtgtgagtgtgtctgagtgtgtgtctgtctgtgtgtttgtgtgcatatgagcatgtctgtgtgtgctttgtgtgtgtctccgtgtgtgtctgtgtgtaagtgtgtctgagtgtgtgtctgtgtgattgtgtctgtgtgtgtttatgagtgtgagtgtatctatgtgtgtctgtgtgtctactgtaagggtagaggcttcctgggtacctggggttctccaacaggtacctgactatcaactggagcgccttgtgtttaaagtggcaaggaagtgacacaaagaaacagattctaacacaggtaagcaccctttagctgctagcagctgttgctgcctgtatgtctgtccttgtaatacctgggacttagaagctaccatctacagagctgtgcaccaaggatgccttgtcagtgccctccaaagttctgtgaacagtcaccgccactgtgcctcttccgctcctgtcttctcccctcccccacgcagatgcacactgtccacctccataacaaggctccttaccctaccctaaaaagttccagtcagtgccttctcacccccattagaggctggtccccagggcccagggagtcccaaatgagaagtgtcagtgttgttctgtccctgccccaggtgtaaatggaggttctcttgtgggtacagctggcaaggtgggggaagacaagagaaacggtgagcttagggaaacaagactgacttctttggaggggactgaacaattccactgtctttatttttatttttgtccatttgtgtgtgtgtgtgttgtgcatatgtccatttgtgtgtgcatgtttgcatgtgtggaggcacatgtatgtgggtatacgtggaggcctgaagttgatgtcagacaccatcctcagtcatgtttccaccgtattcatcgaggcagggtctctcaatcaagcacagagtggctagtcctgaacagccggtttgctctggggatccccaggcccgaccttctgagggctagagttacaggcgggcagccacattcagccgacatttctgcgcctctgaggatctgagttctcgttcatttgcttccacactgcaaaagttttaacccctaagccgtctccctagccctctctgctgctgttgcgtaaagagcagactaactgaattattatacgtgtgtagaactgtactacaaatcatttttacaaactgcgccacatgtaaccaaccccagacagagaaacagaatccgaggagccgaagctccgccccccctcccaccccatccccatgccccctgcctgccgtcttaacagcaaaaattagtttcacctggttttgagctttatgtaaatgagactgtcccatgcgatggggttgttttggtgttttgtttcttgttttctgctttactgcgcaggaaacctagggcattgagcacactaggcaagccttctgcagctgactgctatccccagctggcgtgtggtggctttaacacagcatggagattgttagaattactctggtgattatcatcgaggttccctccttctggaagtcagacaccttctccgcatcacccgttaggtgagcacagtggtcacgggtccctcactctctcattcccagtgagcatcgtacgcaacacaactgttgcactttttttttttttttttgatgggcattttaagtcgctccaaggttggggctccttggaatagcgttgctatgaagatacttctacatgtctttcgaaaaatatggaaatacacttcagatgccagtgttattttagctttggcagagcctgcctgccaaatgttttccaaaagcggttaggccaggtccatgcccaccaccatcaggagagagtgccaggttcacactggcaactcttatacaattctaagcgacactatctttgaagtgcgtgctggcctcttacacttcagctccagtactaggtaactatgaaaatgaatgacctacaaaaaaaaaaatgtccgagatgtgtcgttagaggaggaaagcaggttgcaggccaatacaactccacttgtaaaaagctgtacagattcatgagcatgggccaaattcagaaaggcggcgctcaaagttctcctgtccagtcccctctgaagagcagtgctgcagagatggcttaagttgtgagactctgggtcactttgacttttcatttttcattttacaccttttgggtattgctgctttgttctttaagacagagccttgttctatagccctggctgtcttggactctagcttctcccaaatcagagacagtcgagagcacacctggcttgttcttcactattttcaatgaaaagtaaaatcctccatttccctcacatacccttccatcacctgaggccagcagcccgcccggtcctcattacttcccagcatccatccctgctctggaattaccctgggcagggcctctgggacaaacctcctgggcactgtaatttccctggctgcagtatgtcattagacttggtgctgatgacgcgacgccccgtgtgaagcaaagattacagcccctgctcggacgagacaggacagtctagccctggaacagccctccctgcagagcttctcccttcccgtagccactggcatctccagcctcctgttaagacccacagcaaggcttggaatgccacagacttccattctctccctagggggtcactcatgagcctccacatcctcatctgtaaaatgggctaaagtgacagcattcccttcaggaccacacaacacaacttgtgagaatctctcccacacacagtgggcttgctttgttgtactttttataactactgtacgtgtgtccgtgatgcgaatatacgggtgttggagagaagaggatagctctctaaagacgagtctctcaatctatctcggcatgggttctaggatcaagttcagagcatgaggtttgggtggtgtcctaggtaggggtactattgctacagtgaaacaccaggaccaaggcaacttgggtcttacacttccatatcactgtttatcattgaagggagtcgggccagaactcaaatagcgcaggaacctgaagacaggagctgatgcggaggccatggagggctgttctctgctggctttactagcttgtcctcatggcttgctcagcctgcgttttgttttgttttgttttgttgttttgctttgtttcgagacagggtttctctgtgtagccttggctgtcctggaactcactctgtagaccaggctggcctcgaactcagaaatccacctgcctctgcctcccaagtgctgggattaaaggtgtgtgccgccactgcccagctcggcttgcttttttatagaacccagggtcaccagccctcagtggcaccctcccccatcattcactaattaagaaaatgccctataggtctgcctacagctgaattttatggaggcattatcttaatcgaggttctgtcctctcaaatgactaaagcttatatcaagttagcataaaactattcagtgccactgatggacacacaaacacatcaatgtaaagccacaaccttccctttcttgttcataccccaagatcacacgttaatataaacatcacagcataaaacattttacagacttactttaaaaagtcccacagtcttaggaatccaagcactttcaccggctgggccatcttgccagcccctaggctgttctaattgtgactactctggtgtttgtggttgttattaccaccctaagagggacaggttctcattcactttttgggaagaaaataacaagaaccacctctttgttttcatgaggtatctgaaagtaagaagatgcccactgtttgggagggaaatttggtagaaatatgaatgcatccccccacactcccggaaactcagtcactgagcatagattcatccaagcagcccctgcagtgtctactatgttgctgggtatcattctagatgccagggagctaggctgtacagtcacagagctgaccctgtgccacaggagtacaacagcaaccaaaacaacaaatagagacaatcatacgcacagtacaacgacactgtgaagaaaactctggcaggataagataggagaggtgctgggacacctggtgacaatttcaatcattgtgctcaacagggccagagctctctctgctcgtacttgaaaccaaagtgcccacagaagaagagaaactggcaggtctgaagccaccatttactgtaaccctcagaaaggaggaagcgtcctccatgtgtctggtatcccttccgccaaagcttctctgaaaatgtcagccccaggtctatcttcatcttctggggttcattgaaaggatgtcaaacctggggcctgggcccagcttctcaaatacccagagcggctggttatggcctcgctggaaggaggctcctgaatgagtctgtgtgggtctaacagtcacctcagagattccaaagtggacccagcctgtccccacagaggctgtgtgcaccccccaacccctccccacccctaaatcatccctgaattaatcaatgagcgtgcattggttcgaactctccaggagcctcctccagcggccactttgtgttcagtagattaattgcagctgggggaggggagggaatccatttttagaaaatcattactttcagaaagagaggggggctacttctggctgagggaaaagtgctgagttggcagcttgaggcctgcagctccagcgccaggaaaccgggactgtaccgtgcaggctgttccctgaaaagcctgtgtccacactgcccgaaggcaggccaccctggctttggagccatggcttctggtggccttgcctcctgactggcctgtgttcaacagtttgatggcatcctaaacagaagggctctcaccccggtgtcgaccatcccccacaatccattcgctatcttctctccagcccactttgctgtgcataccaccccgaggacactgtcagccctgtctagagaatgtctagacatgtctagagaatgatgaaggtcggagactcctaatctccactccctcaaactgatcatttcattgatttaaccgaatgaaattgttgcatctgtagggtcaaaattagcgatcccacatggctcagctagctctctgggtgtattttctcaataatccccattctggccccacagggcaggtcgaatacctatttgtgtttcataaatggagggccaaaagtgttgggtgactcaccaaagtgagcactccaacccaactgtgcccaattccctagccagtaactgtgagccatttattgtttgccatattctaggcaccctgcttgccattgacacatctggaatagcagtggacttgagtccgctttctttgaactgttgggaatacaaaccaacaaagaggtccctgtcactctgggctgtgtctctgggtgcatgtctgcctcagctacaagctgtgtagggttgggtcttctggggctaatcatttaccctctgaagaatagactgtttcaggaagatccgccagcatcctctgcaggatagcatgatcttgggagagtccttggtgtaaacaaacattgcaaatcctgggaactgggtttagaggtcaaaaggcttctgacctttcaaactagaatttacttaagaaaacacaggcacctgccttgctcaccttaaccctgccctacccagtgattacacagctaagtgatcaaatcagacctaaaacttcctgtggaggaacctcaagaaattgcctgaccagcaacagggggtgacggctcgtgtacccacagggaggtccattatcgagactgtttgggcagtcctcaagagaattatcaggacactaaaaaggtcagaacggcttacactcttgcttctcgctcccttgtgccccgccttcccattacctttccccttctttccacgtgatcatggccgcctccatttatctactctccttctctctgcctctactaccttcttaactccgcccccccccccccatgccctaaataaaatctactctatactaaaaaataagaataaaaaggtcagagcctaaccaagtgattttttttttcaggctacattaaacctaacacaactctgcccccacccccacccccaactatcccctttcctcttcagaggcagaccgaacctccaagggaggctggaagagatgtctacagaacagccctgggcacaggcagtggatggtgtcttctgcagcagagttatcaacttccacctaacgccagatgatctgaagatgccagacttcagagtggtctgacagccaccccaccagaactcacactccatacccaaatctggcctccttctagaactctgtgccttccaaatccagaggctctgctcccacagcaggggcaaggaagtgagttatgggacaccggccacacaggattacagctcaggtcatagttgccagttgacttccttagcctccaaaggcctccattcttgcgcgcggggtggggggtggggatcctaagaaagattaacatcactcctggcacccagtgatgtgcctttagtatcaaaggttggagagagcactcgttgctcttacagagggttctgggttggactgtcagctcccacccacatggcagctatctgtaactcaagttccaggggatctgacatccccaggcatcaggtacacatgtagtattattgatatgtgtataatgagcatcaatctaaaacatgaatgggaagtcccagctcagctcgtgcaggcagagaacttaagagggacctcacagagccccagggtgaacagaaccacgggactggtgaagccgtcagtcatgaacatcccagcgacggaagaatgaagcctgaactccctccgtcatcactggaggggtgaggaggtggaagcctccatttcccgggtgccacagtcccctcccctgaggaggatgaatcaggacggtgtggaaggagcaagggccaatggatcctggttcttgaggatgtccctgctcttctgtccctgacccaatcctccccccaccccagtctcccagggatacttttcctcctgaagtcagccacagggctccctctagtcacttcccaatatacaatgagaagacctgggtcacacctaacagaagggtatctaggggagggggtcctccagacctgggaactaagccaaagtccgggccgattcacctttgtctccactgatagacctcccagcctccctccaagccaagacaaagctctgaacaacaagggatgcagtatacattttaaaaattgtttaatggaacataaactcctttagaaaaacattcagctaggtgataacacccatagaaaaaaacaccaatcttgtgtttatctttttttttttaatttggcatgttatttgcatttatattaaagcaaagtgcatcttttctttattcttctcgtttatacacattgcacaatacataaataatgatgcttataaaacgtctttatatttacaagtaataatatatttatatataacataaaatacatttttctttaataaatctcagctttttttttcttttaaggagtcctttcctctctcaaagcactacaatgctaaatttccaatgagaatgcttctcttgttcatttaaacctttgtagttagaaaaatagcttatgttaaattctaaacatgctcattgagctaagaacagtgtcaaagtatcatacgagcgagcgtatgagctgagagaagggctgggagccagccaagggatggtacctttgttgtgacggggctacacccttctcagcaggaagggggggcactgcgcaggtccctccctgatgcccctcgctggtctacagagctcagcacacaggatgggggatggggtgctgagctgactttccacatctgggagaaacctgatgaaaaaaccaccacggctgggacccggtggaagggcctgagagggtactggggtagcaatactgtgactggggctgtcccggcagcccttgggaagcccatctcaagagagagatccaggagcagatggccaaaaaagacagactcgacaatggcagcgggtgacaggcggcagtaagacagggatgaaaacaattggttctggttcagccttctagcaggctggcttctcagaagcctgtggataggcccgtgtcctgtgggggcgggggcggggcggggcggggcagcttcggcaggctggagcagagcttggcacctgctgccagtctgcccaggtactgcctctgccccaccgagcgtgtccaaaaggctagagagacacacagcttggcactatgagcctctcagccgggggcatccataaagaacacacacacaaaaaagcacttcccccatctgtcgctcgggtacacccctacgcacggacaaccgaaacgctgatccaaagggaaggtggtgcccactttcacacaccatgcttggcagtgctgactctcgtttcctgtcttcgtatatggggggagggggtgtcctgccaaccacacccaccacctcaaaacaaaaacaaaacacacacacacaacccaacaaaaatccgcaccataagctaatttctcaaagaacaagacaagcgggacacacggatgacgagaaaggaggaggaaaaaaaaaaaaaaacaaaccagaacagaacaaaacaaaaccaacaatgaatggcaataacaacaccaaccaaagagtttgcatgaaaagcaatcactcgggaaaggttagcagcaagtagtttgaacggtggcctgctcggctcacgatccgccctgtcctcttctccccaccacacgaccgactaccggctgttgaagatgacctccagccagcacgggcagctgctgatgaactggcgggtgtagcactggccccagcccttcacaaagctgatctgcacggtgaaacccgtccatggttgctgcatgaactcgtggtcattgggccgctgcaggctgtaggctttctcatagtcaaaagccttgatggagaaaccagggaacactttgtgcaccaacagcgtcctggagtccgggttgtccagtgtggcggacttgatgaagatggggtaactgctgcggttgtaaacccacacgccatccacttcccgcgtcagctggatgccacagccgatcttgctccgcactttctgtaccagctgactcttgttgtccgaattgagctgtccgaggcaaaagccattcccctgaggtagatcatagaagatatccagggagggctcttggacacagtagagcctccccacgcgagtcttctcctcccagtatgccaccacgcaccagtgtgaccgatccccaggctccagaagaagttgggaatctgcaagacaaaaatggcagacaaccgttggtggtgacagagaccgggttctttttctccttctcgaatatacatagacacatttgtacacggtgcattcatgtggagtgtccccataagcagtataaaaacaaaagagggagtgagggtaagcctgggctagctgtagggtaagcctgggctagctgtagggtaagcctgggctagctgtagggtaagcctgggctagctgtagggtctacagtgctaatggagggaagacatcttaatccacctttaattacgaggcttactgctgtcatcttcccttctcgtctcatctgagcctgcagcctcagccccagtgtctacttgtccccagaagcacagactctgggaccgttgataacctggtcctgctgtttcgagcgggataaggcctcagaaatagcctaaattaagagttgcttcccacgggtgtggaacctggagggacagtttctctactcccccaagacctggatgagagatgctggcctactgggtggtgacccagtcagaatgagaagccaggtggtccacctgcggcctctgtaccagcttgttcgattctcacatccacatcgatgccctgctcccaagggaacatcagacggtaaaaataaagatgagggtgactctgaggatgttatttttttaaagccatcttcccgacagaaacgcgctctctctctctctctctctctctctctctctctctctctctctctctctgtatgacagcagcagcctgtacaaagaaggttattagttcaaggccaagtgccaaattacgacatgcagggggacatcagcctagaccacatggccagcccagacagaagaggccacgtctaaaataaacgtgaccatccttgtatactcctgccagtctatctcgctggcgtgcccccttctcctccagtttgaccctgcacagcccatgctgccctctgtgacattttcaccgacctgtctgcccgcccctcctgtaagccaccccctgcccccgccccacaacaacctggaagtgacactggtaaggtgactttcctaaacaagagttctgtgaactttgcggggggggggggggggggggaggccatgtttaagaaagcccctccccctcgagtgggcagcagacttgagagaacaggccccagactgaggcctataaatctcccagccccgctgggctgcaggaacgctgtggtttgtggcggcagggtggagagcggaagtcttgtatttgctaacaaaaatgggggaaggcaagagggggaaggagtgtatatggggggggggagcaccaagggcaaaattgaaagcctcctcctgcctctctcccactccagtaagtctggtgggccctgaagatggagctgtaccgggaatgtgtctagtcctcgaggcctttgttgtttctgggctcagagggctgtccccatgcaggggcaggactgagaaaactcagcttgctggtaacccagggcagcctggtacatcaatccagtccaagttttataggcatgttaggacctgggaaccagtcagatcgttgcttgcttgcttgcttgcttgcttctttttcttttttttccacaaaggtagccacatacacacaaatcctgagtgactgtcccctacttacagacaccccctctagctggcctccccgacccatgcccagctacacacaaagaggatgccaagatagtgttggattcctttcctgaatccccacgccactggggaaaaaaaaaaaacatcacagacctgcactgtcccctgcccccagtgccatggacccacaacccaagcatataagaccgcatgtgtctgagtgtgcgtttatgatggtggaatgtctgtgcccgcacatactagaaaggacgaaaaacaagagagggacgagggctcagagcagaaggtgactcatcaggcattaacttgtttctgcaaagtatccatcaactgctaataaactcgtgagcgctggcaagctctgaactttctttcttgcagagagggagctcagctctgaaggccacaccaacgacccctaaagttagttagtccaagaaagtaagaaagacacttctggacacaagagtgctcacccaaagtgtgtggaacttgggtcaagaaacccggacagggaaaggaagacttggggagcagctgaaggggggaggttggggagactctttaagaggggccttacaatgcctgtttcatgcagcccagccccactgaaacctggcaccagacaccaagggtagggggaagggaatgtgaaggaggaaggaggagggaggaggagtttgggatcaagttgctccccatgccaggcctgttggcctccttagcaaggggtgagggtcctgtctgccaggcaagcctctgggacagaacaaactgggcaatgctggagcctgaggcccgtggggagagagtatggaggggaagacgcctgcctgggtttctctttcatctacacagccagtctacccagcaatttgccgccaggctacctcccgaggaaaaagcccttttctgttgaggttaatggcccagcccagataaatggtagtgtgtgggtgtcgtcccctcaacgagctccaggaagacccctgcttgcacctccctgtctccagccccacacaagtcagcttcacaagcccccttgcttcttgaccagactatttctgaggcccaaaacactccagcaaacccctcagtgcacgcattcccaacgcagaagtcccacaccttctgagaacgcagggcagccgggcactatgagacatcacccaaatgccccaccttggactgaaaaatggctgggctcacttatgggaaatacccaacatcgtttttctgcggaacaaatacctaagctgggcccgcagcccacagtcttccaacaaaggttagggtagggatttctctcctagagtttcacaggacacacgggcagggccagcgaagtcttggtcaccttaaaagggacgggaagaggacaggaagtccaactctggctttaccgcttgcatccccagcgcaaaccgactactgctcatcgattctcccagcattataagctttctggtgttcttctgcaacttttccaccccagaaagtgtacaggggcttgcgtttaaacggcgcgtactcattcaaaagcatccagaagaaaaactacattgtaaaaagctccgtaatcagatgcctgctcacaattttttttttattacagctgaggggatttttttttttgaagcaataccagaaaaagtgctgaatagatctaaaattccattaaggtgttcgcccctccccctccacattttcctaatgcataaaatcttccctttaaggggaagggagcagtagagacctgagagggagggtttcatggtgtctgcactgttcatagggaagaccactgagcaagaagagctagcaccccggtcaccaaggaacagacacttatagactagactcacgaatgcctcttatactttggacctcaactgcacccaaggccacccgttaggtacagaagaaatcccaccatttaaaggtatatagagctgtcgagatggcccagtaggccgaggtgccaacaaccaagcctgacacgctggactccttccaccctgaagcccagatggtggaaggagagaactagctgacctccacacgtaaacactgtatgtacccttgtgctccccccacaataaaaaacaaaaatcacacaataagtaaataactaaaacttaaaggtgtgaagagaaatgaggaagactgaggtcacccacaaacaacgggattccgactagacaaatacacccccaacagttgggggctcacatacaggtactcatggcagagtcctggtgtttagatctcttgtgacagaaaacaagattgcaaaatgaagccagaatagacagagtcacagaatgggcactcacaaggttaactgtccccaactgccaagaaagacatggggtggctggctggagtaggagatggccaaggaggagggtctcacccactctcacctctgtgaggcacttggactgtaaagtcctatttttctgccaaaacctgagggtaggctggcatgcaagctcctcctgcagtcaatcaccaacgtcagggcaaacaaagggtcaaggcaaacaaagggcagaccagtagacacaaaggctgggccagcaacctggagcacaaacactgactaccacacctcacctgccacaggtcaagggtcctccctcctcagaacccgagagccaccagcccttgtcccattctacagcagacatctcaaaggttaacagcactgccgcccagcacctccccactgagaaactgagtgtgctcaaaccatcccaggacaaaggataaaaaagaagaggggcccaacccctaatctaggatcacccagcatcatgataaggacactcagcttccttctcgtgaggcaaacgatcaaatcccacagccaacagggaaagctacgtggtttattgacttggactggccatgcgtagaaatcacggagaactcgggtagaaatacaacttccagaaggtcccacagcagctcgggataactctgaacttggggagcaacttaagaaagctgaaatgcttcaagttaactctccaccaatgaaggtgatgagactcggcctccccttcagcaagccgagcagagtgaagtctgaggaccacagactacactgagaaagatctctctctctctctcacactcacacacacacacacacacacacacacacacacacacacacacacacaatacctcactgacggttgctggactgggaggaatggtcagagcgtgttggaatctccttcaaggctagggtgctcagtcaaattcctgggtccaatccagctggatccctaaatgagtccttccttaggtccctgcccccaattatggcacattccaactctggcgggatgcttaaattcatcctaaaccagaatctgggccagcctcagagttactatgacaactcaacacgaacgtgaccgtgggtagcccatcccacgtggtatgctagacacacccagaaccctcaactctaatctaaacctcaactactgagaagatgctgacccgcacctgccaatcacacaggtgagaggatagttcaaggtcagtgctaacatccagtaagccttactgtgttccaaaaggcccagattatccgcctgagactgtgtggcatcaccattttatgacttcaaaagcaaggaggcccaactcacaggcctaagaataaagctgggatccaagcccaggctatcaaaaggtgagctaccccgggccactaaatgcctcgttctgaaagtcctctcctattgttccaagggaaaacttgagttaagggtccagttgctttaagccaaggagagggaagtgcgatagctttcttgccagtaagtcactccgtagcttgcttccctgggaggtatcactttgatctgtctataaattagaggaaagcagtttgggcaaaacaggcccctggactcactttatggagagcatggacgtgacccgagctatcagcagttcccacaagcgcttgcctccatacatccccaccaccttctagagaggaagaaaaatctcaggaaggagttgggcagttttgcatttaacttgtaaaaaaaactaaacagctaaggagaaaaaaagggcgtcaaaaaaacctcgccatgcccacctctaaagcaatgttttggttgtttcttttatttccaaaggagttctttctcttgtcactcattcgtctcctttagaaagagtggtgcccccaaaacaaggtctcttatcagcttcctatttccaccctgcagcctctctcctactgccctcctgtacagtgccccgagcttccacacagccttctggtctagaagggtgattagtaactcggtccttggaccagccatgatgaatcacaacgattagctctaaggtgtgctaccctgcactgcccccacccttagggtccaaggctgaagcccacaactctggggtctcttcttagagcacatttagccatcagagcctagaacagggtagcagggcccaggagggaagccacagaaatcaaaagctcctttctgtctcgccagttgggctgacgcggcttcctgtggccctgtgttcagccatgcaaattataacatgtacccggctgctgctgctgctgttgctgctgtctgaggagacgggctctgcccaactccgagtggctcagaggaagggtggggcctcccaacccagccaactccattcataatatttacagtaaatggcctctctggctgctggtgagtgtatatccagcctaattacctctggggtttgcctacaaggctcttcccctcccccaagctcccacaatgaccccccaccccgagaataactcagcagccatctcctgtgagagggttttttgtcattgtttatttattcatttacttttggcaactgaacatctggagcccccagatctagatagtatcctctactttgcctactttatgtcttgatatgaacccagtcaggccccagaaaacataagaagtgggtgaatactctgacaaagtccacttgtaggcccaagaaagacagccctgctaaacccagctcctctgaagagctcctaattccagacctggattgtcaactgcaaagccagctctggatacggataaatgtacacccaagaatctggcagaaagaaccgtaaaggcgccaccagagtcgtcccctttgcttctttcactaaccattctaagtaagtatgttagctgcatgctagaagttcaataagacccttgaaacagcatagtatacacaggtcccagagtgccacaatgaaactcattcctttgtgtgctaacttttaaaaagctcctttctaacataaacggatacattgaatcagtttcccaaaagggcaaagattctcaggcccgtagaacccaaaaccatcttgcctgctttctccctagacttcgctttaatgaagtcccaggccatgctgacccccatccccagaagctgccaactctccatccattcagtatttttctagacggtaagaagaactgtcagatgacaggaaaagccgggagaagcaagcgtccttcgcacccctctcttccccgggctccccttgttccacaaggattatgaaaaactgccggacgggaaggcattttgaatatttacagcattccagccaataaattccagcgcagaagctgatggaagaaaggcctccctctccagcgagctccctccctgctccctcctcccctgttcagtcccagccctcattcctcttttctttacaacccaggcccagggttagccaggccagggctgcactgtacttacaggggaaaaacaaccgagagacagcctggagactgtgtgcagactggaaaagttaatcattacttctgtctgcctctgtaatctaatctccccagcttggacacactcactgctcagccatcctggcccttcacccccaaagcacccaggacctcctagacctgagcctcccggcctacacccccaacccctcccctccccccagtgtgggagcccgtgggaatggaaggctccggagagtcctcttataagccagagtggtaccacaggggtcgggagtccaccgtgcgtgcatggctgcccccttctgtgggatgctccagggttctaaatatttcctagcctcacatgatgtgggttccaatctggctagtacattagcgtcgcccccccccccttactctgctgctttctctgtgtgggatatacactttaaaaaaaaaaatcggtggttaaattaagtgttgttttaccacagaaagaaagggtaagcaggcagactgctcgcgggtagaatgtctgcactgtgctaatgatcctgggttcgaggcccagcacaggatggaaagggaatccccattttccaaagcctctaggtatcaccgtgagcctgttctcctacacatagggttttagactgcggattaacaggaagaaaaaaagctcccctgaccgaccaacagcagcgtgtgtgcaccctgagcggagggaggatcctccactttcacagaaacgtagaagagtttgcaagacatagaaagaattataatcttatttttagcataaagaggctgttgatggctccctagacactcccccccccagcatcccccctactcccgccaaaccacaaatccaggaagcttcacagatctaagggtgagaggggatttggtgaccaagcctaggtccttttctctaaagccacccgaggtccagaacacaaaaatggctccttccatggccatgctcccctctctcgggccacactgtcagtctctaggacctacaatgtgggaacagcaaatgtgtgggggaggggagcctgctgagacttctgactctttcaggaaatacccccacacacacaccccagaactggagatggggccaatctatccttaagcagtaggcacacacccagttcagggagaactttttcttttccctcttggttactgattaatgaggggagggccagccctgtctaacaggcagcctgccactgggctgacaagaattcccacacagtacagcagagctcacaaacagctcagatggccctcactcttcccaggagctagagggcaatgatctcaccccccacacacaaaaaaaaggtagccaccaaccgtcattatcttggcactgtattcatttgtgtcggttgggcaaagatcccagatcaaaaaaagcaaaaaggctatagagaaattcaccaatccaggagccaacagcgacagttactggcctggttacctgtgtgtcttttggctaagagaagttcccagctccacacggtgaaactggagttgggaccagtccttccttttcggctccaagtcaaaccagctctcccagccttctccccagccccccccgggggggggggggggagaagcaccagagagacttctaggataattcaattagcgggccctcagagctcacagaagcccgggttagtcccccagggaacccacagggcaggagcagtgtagaaatgaatgaagaaccttgataaacacattcttagattgctatgtgccaggaaccccagatcaatcatggcttctcaatcaagaggtagacctcagaaatagtcgtaggctctgaaaatatcccatctctcctctagctgccaattattggctgctgcccaatgttgcataagccgtgtcccccatcaatggtatcactaagaacccagctccccggtcacttctagcagcctgtggccccaggtgctacgagggggtctgcaagaatgagtggacatcgtgccttgaattcttgctatgatcaagcaacaagcagagagggctgaaaccagaccggggggagacctctatttatctatagactttgctgtggttcagtttttcacagaagcagaggcagggcacatgaccaaaaaataaaataaaataaaataaaataaaataaaataaaataaaataaaataagccctgcctgccccatctcccagagagccatcccagtagaatctctgctgcacaagccaactatataagatactgcccctgccttcaaggaggctttttatctaactccatcctctgggaacctagaccctgatcctccacactacacggggcctgatacatggtaacttctcaggaaatagctgatgaattaataaagcagacaccactggcttctcccaacacaaatggcccactcagcttcacacctgggcgtaaatactcccaccagggagaaggagaggacgaagggcctctccagcagagccagccagaaggaccatggcttgtcttggaccctgcacagttgggaagagactcccctgctctggggctgaaaggatgcccagccagtggctggcacaggctgagaggtgtttccaaggtaggcgccggccaggcaacctctgcgggtacaccacctgcccacagcgttctgctctggcgtcctgctctgtttagacaagttaccctcagcaagtgttcaacaatgcttttacacaccccagggctcttgttgtgttatgaaaacagaacaaagcacgctaaggaaaaaaaaaaagctgggagggtgggggtgagagggagggcagagcaggcagccacacacagtctctttctttctggtctcctctccagctctgggcagcactgtctcacatcctgagccatcagaacaagggcatcaaaagagaggacccggatccccagggatgaatacatagaagctgtatcttatctgcacgcctcccttgagggatgcttatgcttcttgaagcactgatggacacatgacctatttcaatagttgtatcgatggggtgtgaacccccttgccccatcctcggggactgtgagaaggcgttatgacagcatcgaggtccaaaccgtatgatgccagctatcgctccaaaaagacagctacggtgtgaaacagctaaggagtggagtaaattcctacctacacttccacaaaaaaaaaaaaaaaattttttttttgcaagttaaaactgagctaatgacactgggtggggctcagggttcgggatgccaaagctaaaccaaaattagttcccagccaagcattgcctggcctctccatttggggaagggagctgggaaaaaaaaaagtcatgaaagattcttcagaaaactgggaaataaggctgcagtgaacagttcaattaagggtgacccctctggtaaaatatttttttaaataataaaaaataacataaaagttctcaaacagcctctttcttaaagaaaacggtctaaatgtcttcacgggcctggaagggaagagggacaggggcaatgtctgacagactcctcaggtacactacttttcattaaacttttccccccagaagttcttaaaacacaaaacaaaacaaaacaaaaaagcacggtgacgcaatttcctgtcttatcccgatatttcctgttagctgacaaggtgaaagttatcactggtttaaatggctgtcctaaactccatcaaacctttccctgcccagttcttgacttcactacaacctgtctccatcttggcacatcaacagtattgttttctacatctttaggagcagtcaggcaggcaatccttctatggtgacagtttcctccaggaacagggccaagggctgggatgcccaaggtgacctcatggggagaagcaggagagacaggagaggtgatatccacctcctaccaacgggtatacgctgggcaactgcaatcagagaatacagctttcttggtgttagccactccactgaggatggtgcctcagcagttaataatatcttccctctgaaaatagcccagagaggaagcctccgtgtgacagtaggcaggcggccagatgctgggccattcaatcctcatcgagaaagatgcgagggccaatggtgacctcccagtggctacgcttacagtatcctctctcagactcccacaaaggggcacctgcctgcctggaaatacaggagggatgtcgcatggaagctagcccctgtaccttctgaggacacgacatctggggagaagtaagaataagtgtactcccccccccaccccacccaagacgggaaggtcagacttggggaacaaactataagaaatttcctaattaaggtttttgcaacttgattggaaatgggaaggccgaggaaggtgatggtccttttgtcccagccctcgggaggcagaggcagaggcaggtggagctctgagtctgagaccagcctgggctacacagagaactctgtctccaaaaaccaaacaaacaaacaaggaaggaagctcaatcctgaaatgcattgttcactcccagcaagctaggctgagatctgttccaggcagggccatcagtggaccaatagtcccagagacctctaggtgctatggaaacctgcataacccgtcaatagatccagcccctgccagaagtctcgcctctcctcaccagtcactgctcctcactgatagaacaacaacccccacccccaatacacttaaaagctacatctgtaaaaattgtcgtaaaatccacgtagcatgaaatgtgccgtcagtgacagagtccattcaaagaactacatctcaccgtaagcacatcatagcagcagttaagatcacactggctgcgatggccgaggatctgggttcagttcccagcacccacatggcagctcacagcttgtctgtctgtaactccggttccaagtgattgcctccggtaatcatttattttggtcaagaacaacaaccaaaaaaaaaaacaaaaatagatcgtacggtacagcaggatgtttggcattcgtattttgtcatattggttgtctaatatttcaaaaagaagtctttctttcttttttttttttttcttcttctttgagatagggactcatcgtgcagccctgacaggacaggaatccactctgtagaccaggctggccccaaactcagagagaacggactgcttctgcctcgcaagtgcatggaataaataaaaagacttaagtgctgctcaaagttcaaagcacacactagagtaaagaaaaggccaacctagggaacaggatgggggccttagctcacagtagggggtctttgctcacagttgagcgcctgctcactgtgctagaggggtcaccacacttatccctaagcactttaaagaagagaagaacaccctgttatcacacagcataccatctaaagaattattatggagttaatatggaaagaagccaagaaagccaaaccctgtcatgagtctgtgactcgtccccctttctctgctgctggccctgaaactctccaagtctgagcatgagccgtctacagtgggctctgagagacctaaccaaatgggagttggggtgggaatgggtgtgggggagctgttgcaggaccacagccaaagtcaactgccatcctagcatggcctttttgggccccccccccccgccactccaccccctcgctggcctgactgggttctgcctggggacaggatgcagaggcagcagccatctcgtctagccggcagagcggcccaaatttgctccagagatttttaaatgctgtcaccctgcatttaacccctgcctgactacctcattctttccaggacaaaagaggtttatcagggagtcgctctccaggggcggggcccatgacctcaggccctacagaagaggccagccaacagccccatgctgcccaggactggtctacaccagggtgtgggtgtgcatcaggtgagccgcccaggcctagagccatcagactgacttggtttaaaagagatgcagactgtattcttggagttccagacaagtcatttctcaagtgacctggagagaacactgctagcggactccccaaggcctgtcctttctaacagctgtgagctcagtgtgtgacagacccaccctcacttccaagcgtattggaaaccagaggttacctgttcctaggcatgaggaagagaccctggaaacagcacatacctaaggcccagactctctagttcagtatcacagtctcatgccatacaattaaaatacgtcttcacatttagctgaatggctttcttacatcagaatggagccatcttccctgggaactgcttggtttgagcccaagtcactgtggactaagccagggcagcatttcagattatatatatgtgttttgaagtctctcctcagacactaaggcagatgccagcagggagcaaagaggagacagacttgtccttgtagttgacttggtactgactcaaaatctgtcctctccaaacctggccaccaaaagctaagtccttaaagcaaaggaactagccagcccctcatagcccctgcccctcctcacaaacatgactacatagatatagacgggagatggagtttcttcaatgcccctaagacccctgcctgcttcaagtccccagtgtccatccctcaactccacctccaccccagtccgagggagttcctcccccctctcactctctagacaggggctacaaagatgcagagttgagagcagttcttccccgtggtggagggcccggaccggtactcatgccttctcctccactgggctgcagagaagttccccagctatgacagtccttgccaaggtgggtctcccggcctcattcgagtccaagcagcattagcaacggcctgacctggattttgcatgccttccaaaagacaccggtgcccaaagacagagctaaacccaggctaaacccaaactgcagttccgaacccatccaaataccagtccccacacagtatacaaaacttcatgtaagggacacccgaccagagcaggaccccagattctctcaagaccctgcctgtaggcacagcatctctctgctcaagtgtcaacacatgagcttgtctgtctgtctgtctatctgactgcagtgtgtgagcacacgcacacacacacacacacacacacacacactcacaagcctgcacagagcaacccatctgtctcagagagccggctgtcaagaaatgaaagtacaatcccctggaaccaaattattgccttctaaaaatgtcccgttttcccagactgaggaaactcacaagggtggggtgtgtttcactgcaggtccccaaggaccttggcctgtcgtccccctgccctccccacacactgcaaggctggaattccaacctgaagccagccagggtgctgctctcagtccacacccactccccttcctctagctggccctctgcaagggcgcaggaaagggaagggccagccttggagtcacccctgcatttcaggaggggctgggcctgtgagcacaccccacccccatctccaaggcaccacattttcacattcggctgctttctctttcccttcttcccctgccaagagaatcaagccctggctcacactgccgaccttcctcccaccctaaactgagccccattcattaagcccgctctcagccagggcaggacaggaaggaaagcggcacacagggcctgtgaaagagactcccagaggttatttcggagggggggggtcactaccccccaccttgattgatgcccgacctgttctagcgctgcctcaccccagcgtccaccacaggagcccccttcccatcttctctggcctcactcagccacccctgtctattaggagctcagcctacccaaagaatacacatctagtcccctacacacacacacacacacacacacacacacacacacacacacacacacacacacacagcaccacctctgtaaaaaggaggcttggccttccagaaggtataaaaacttctgccaaagctcaagaaaccaccctttgagggcattcgcgggacaaagagtataggtggtttctctctgtgctccttcacctcaactccagatacccccaaagcactggcatcaacccaaaaagctcttcctacaaccccatcccaagcacattgcaactacacggctccaactacgtacagaaagaagaaagcgctccaacttcgaagccttgggaattagtaaaccaagagctgaaattcaaaacaaatgctctttcatgtggcggcctccccgcccaacccccttttttcctttctgcagttttgttatatcatgccgtcccttgcaagacacactcctgcaccctagcagaacctcacccatctcagtcaggggctgcagttacccagggaggggggtgtggggagtggggagtggggaacgagaatgctgcttctcagctcctctctagaactggatggactctgggaattttgggaaacaaggttggctgaccaggtcaggctgcctggctcctcgggcggggcgaggaactctcgggggccgctggttctcagcctggtgtcgtcatttcctctagtagaggagacagacaagatgttatcaataagacaaaccttccgaaaggctccacttcccttgcttattttatgtggtttggagaacctggggctcctccctgcacacccagggcttaaaaatcgtaacaagccaacaacatcctgagtgtgttattctgttcagactcttcctctcttgtttcttcgttctctcaagaactctcacctcatttcagccttagaaagcaaagccgcgaagccttccctgggcatactggctccctctcctcagtgactagggcccactccctcctcccccggaggccctgcttttcctgctcagttctcattagaagctttgaataaacaataccctcggtctcagataacagtcagagtacactgcactggaatcaaaacaaacagggtccccatacagccattccccagcaggctccactcctgcaggggagagagtgggccatgagtccaaaatgaactgtatctccaacacataggggaagctcttcaacagtcagtcgccaggacccacctaccctgcaacaggtctaagggaggtcccgtaacttccactaagagatgctaaaacaggacgtccaccaatggcctgaagaccagctctgatgagagcccagaactgtcctggaatttcgccacccttggttctcttctcttgctttaactagttcttaggaaaaaaaaaaaaaggatgacgtggatggagaggaagggaagaaaacattcttaggaaagaaagaacttcgctcccagagcaaagttgccatattatcctcttttgtcctctgggataataatccactggctttccccaggatacctcctccagcaccatctctccagggcccagagaaagcctgtctagctgagggcagcttcggtaactatgtacctatagcaagccctgccctgtgactccagaaccccacagtccactgagctccttcttgcacctgggctatgcctcgcaaacctgctgggtctgcctccttcaaggcacgtgtgcaagagcaaaataaagagtttaagcacatgagatcatgccaacgttaacaaatggaagtaacttaagtcaggggttgctttaaaaaacacgagggagggcgaggtggatcccataggaaatagctcatagaataaacgtgcccgccaccaagctctagatatctgtgctctgtccctgaagcccacagggtgggaggagagaaaacaacacctacaggttgtcctctgacctctgaggaacacacacacactcaacttgaaagatagccctggggatgtgagatggctcagcgggtaagagcactgactgctcgtccagaggtcctgagttcaaatcccagaaaccacatggtggctcacaaccatccataatgagatctgacgccctcttctggtgtgtctgaagacagctatagtgtacttatgtataataataaataaatattaaaaaaaaaagaaaagaaagatagccccgaagctcggcacacacacaacacagttcccaggtgactccagatcccccattcctgggaatgggcaaggttctggcacaaaaaaggaccctagaatgacaagctgaaggaggccagtcaccggatgggttcggtttaaagtatatgtaaatgacaacaattccagaccaacgggggtggctgaaggccacccccatgcttttattagcatccatcgatctctaggaaaagagaaagtctcttacctgaaagccccccaggggccagataattcgttcccccggtttccgcggaggaaggtacagcatctggacagcctgctgcagtcagagaagagagaaaaagtcaattcacaaagaagaactatcagcgctcactcatcctgatgaaacactgagagacgcatgaaagaagagaccacacattccaaagggctgactcacagccgcgatgcagattattaatggtctactcggcttcatggtccagcctaagacagaccacagcaccttgtcaccccgtctaggctccaggcggccggccagttaatcattagtcaggtcaggctcaatcacagactgcctggaatttctcttccattagaagtctcccattgagctcaggtaactcccaaggtcaaggaggggtcgaggtgtactttctcaatcctgctctcttctcccatcgagcacaaagcctcctgcctcccactcccagagacaagggtctcaatccctgcctttagaaagaaatcgcacaggctcaccaacttccaccagtcttatcatggattcagggtcaagacttctcagcaaggacccagccagagagaaacctttctacctacttccaagctggtccaaacccacatctggaaaccctgctcagacacctagattctacaaggctgcctgcctcagtacccccacaatctttctggcacgatattcttccattttctctactagaccttaaccagcagatttcatatcctctacccctctcccaactcccaggtgctcaatgaccagtgacctcaatgttaacaaggataatgacaattccagctgagtaagagacagaccctatggaaggaacagcctccaagcaacaacaaaaaaaaataatgcccacgaaccacaactaatcagtcccctggaccgcaaacgcagaggcccctgtaagtttcttctgcaccactgccaatgtcaaacgtcttcctaagtccccatagacagtttggctccggaaaagcaaacgcactactggtttgtacagactccatccagtcctcccaccctggctaccaggcattagcagatgtctctctggccatagaggtatgaatgctagctactcgaagaaaagagcagcctagatagagacaagcaggacagcttagggatggccttctagttcctgaccaagggaaggtgacctgcccagaagtcactgctgaggatccctcccctccctcttacacttccctccccaaggctgcagtgggttggaaagattggtgggggttactcaggtataggcagcgcctgcccagtgtgtgtttaaatttttaagaaaaacctcttcttctaaacgggagggaacacggaggagccagcaaggggataagagaacgtttatgtctcatttcttcaatgaagaggataattcctgccaggaatatgcagctttacaggacccatgcttcatcgaatggaaaacaatgggggggggggggttggagggagggcacacaaaggagtaggatgcaagtctgtactttctggccccaccattttctagagattggcttctcattcccctccccctcacgctcccccagatggaagacaccccgcagccactcccccaactctggctggccgtgtgccaggggcaaggtgtatttcaaaggcagagcctggcctctccagggcagagcctagagacctcagtcagcctgtcagcctgtctcacatcaaaggtgagccagctccaagatgcaaccacaagtgatttttatgaaatgcgctctgccctctgcatcgcctttgatcttaggagggctttacacacgttaattaggcctcccctaccacccctgggaggcagcaaggcatttgagaggcacccagggaaactgaggtgccactccactaggccaggggccacccaagcagctagctgagccacccccaagtccagtttctaccccagggcttgcttccattcccaaacctccttccctggagttggccaggatgaacctggtctctggtgtctagatttccacctacccaagactctgcaaagataactctcaagtcagaaatctctcaccttccaccaccgtctcctgctccccagagcccagcctggcagacagcagagctgagctgttcttggctctcctctaccaccgcacattaccaaacacctaattaagccctgggttctgtggaacaaagacgcacacccccttctcccagcagttccaggagcccgaggaacgtgtaaggttctttcccacatcgctcttctgagtgtccctggtactactttgtataatgactgatggaaacaacaaccaccaaataaatgaatgaatgacctaatcattcattaaaagggactcggaaaagttaaagagacctaaattaagaggggccagatggcagatcaagatgccagccgttctggtaggatttgaaggttgtaccatgagaggccatccctgcagcagccagtctccttgcctttcagcagcggacacagagctgagaagggacagagccccactcaggctcccctccccctcctgcatctgtctacaggcgagacgtgggtacacaaacagcaaatcctttttcctttcgggatggcagagtgggagtaccttcgtgccttgcaaaagccacccaagtcagagccactcctgccctgaggtccaggcaagagtccttgcacacaactggtctgggacatacagaaccgggtgcagatctaaatccgggcccttccggtttccaagttcaacctccaaaggatccctcagctcaactatcccaggccccagaacctttccctctgcctcatctgaagcaggagatctcgctaaagggattccctcagtagtgctggctcattaagattttaacagttgtccactggaaaaccctattttctgtttcacctacctaacccaacaccaaactcctcaacctcaacccgggaaagaacatctacatccgcaggtcaacactttcccacacactgggtgggaaggaggggtgtgggacttgagagcgtcccctgcatttctagctactacacccctgatcaccacaaccagcaatcaggccctagaccagtcccttgggccagtcctgagcccagctctgctgtccggatcaatagctcttctcaatggggcctttcggctcctttcccgtgttccacaccgtgtggtgcctgagtgtgggttctttttcttgttttgtttgaagcaaaacatttggggtgagcagccagctgctcgggtttccgattggcaggttaatcacttcctattgggtgatgggagaaggttgctcccctccttggaaatggcacattcctgtctttgtggcttctctgtttacacacattttgctacctaatgtcaacacttgctaatgaataaatatatcactctactccccgaaaatgaggtcctggcctgccagaaggactgctgaaatcttgcgaacagatttaccccagtatctttttggcaaatccaagaacacatggtccttctttgctatggagtttggactttaggggaacctcaaccagagctgtcttcacctctggagccacagggccttcgctttgaaagacgaatgaggaaacacaaagccaaaagaaagaactgaggtggacaccctgggagacgtgacctcatggaacaattctggatcctttaagccataaactcaagacaagttatagccctcagagtttgctaatgcccgtttcaagtttgttgcaaacacagagagccagttatcttgtcattaatgaccatttatctggtgttttgtaaatcgaaagcaaaatatcagactctgcaggccacctattagacagacaccaggcaagcagcaacgccttcccaacttgagggaactggcgaggcacgtgaagggagggctagctggggctttgcttacacattcattaagcatttaatttatgacaaagttcccaaaaatggggggagggggggaagccctacaacagccaaaactcatgaagcaaaaggttccaagagctaaacggtggccagccctttactttcgcctctccttggcaaagcaaagacatcacaagtgttgcagttttctgctgtaaagcaccacagaacagacacaaaagacaaaagctgaaacctggccttgcagcaaacgattctgtaattcttccactgtaagaaggaagcaggacttgtccctgcggccatcccccccacccccatctgttttgctgaccctgtcccctggcactgtcagctctaagggatgggccctaggactgccagccagaagctgaatgcagacaaccacaacagggctggtgccagtctcaaatgggcttctgccctggccctctgccatccggcaagagagcaacaggcaggcagagctgtgcggaaaacttttatggtctctctaccaagaattctgagaaaaccccaggagaaagcagacttgtgggtgactgagcaggcgggaacataatcctcgctaaactcgctgcactgcctaacctagtgtgttcctccaaacggaaggaagcttgccttcggaatcgctcctcatccatgtacccatccctacccacagatccgactggcacttacaaagcttcagaattgtttccatcaacctgtcctatttggctcccaaaacattcagtggattaaaagcctccatgtgttaaaactgaactaacttccgtcacacagttcaaatgcattaaaaaaaataaataaaaaaaaggaacaaactgtaaaacgtatctggggagggggggagtcagatactttatgggggaaaaaaaaatccaatcacaacaagacaaaaatccaaacttaacaacagaggaaaattgctttgagcaacccaaacaccactctaggccccaacctagacacaaaaaccaaggttctaagaatcgaaagacttgaaaaccatctactcaccagttggtttgagaaaatccattgggtatctggagtaaggaggagggggagactctgaaattaaaaaagtaaaaggatataaaggctgagccatgagaaacagagatagaaacttatgataactcaggcattcttttagcccaactgtttgtcttagctgtgggggttgaaggcagggccgcgaggcggtgattgccttgatatttagctgtcagataaacaaaagaggccgcctggcgccagcctcggcgctctgctcctccacgtctgcggccgccgccaccgccgccgccgccgcgctcggcgggccgggctggaaaccaccggctgggccagggctccagcggctgggccgcgcacggaacagtctctagggtggggggcgcctggggctgcttagtgtcccacaactacagatgccgcttccccggccctcccctcctctaggagcaccagtcacctccacccccgctgctgagcttggcacccacgcactcaactagggaatcctacccagcccacctgagaaacacacacacaagtgtgccgctggtgaacttggaagattttcaaggagtagggtatgctcctctaccctgagcacaaagacaaggagcaagcagaaggcatgggcaacctagctatcaggatagcacggggaggaacctgctcagggtcccagccatgaagcccaggccaattatggagcagggaagaacatcaccgaaactcagggggtgggagtgtcggacaccctaaggaccactaactgtatgcttttctgtgcgaaataaagattaaaagtcgaggccacccaacttctccaagctgttccttctcaccccgaagctcgcacagctgagactggatacccagttcagtctccatcctaccactgcccccaaactccaaagctgtgaggccaggacagtatctgggccactcgtgtcccacgtgactgtccttatttactaaaggagagactttccagcctttaaagctagtttctcccagccttccttggcgggcttgggtcgaatccaactcggccacacacctcatcgcctttccgggtgcgggggaagccggattccccactttactctgtacccccttgcagacccggaaattagactgtctcattttctgcagcatgtctattcagtagaaggataagcagtagtaaccctgggtcccctcctctggaggcggggggtgggggggtggggtgcaatagagaaaaatcttagagggaaccccaagcttcccctggtcccttctctgacttagattccttgtctcctccaggaggttatacacacatcctcgagcatttccacgccagagggaacgaaaggtggactcagaacaacttcttacctagttcacagagtcgactaaggtgatgggggttgcagcacaccagctcggggttgatcttcccgtaagattcacagcaacacagcctcttgacttccgaggaatgcctgagatccggccacctgaacactttgcacagcaggagggggagcgagtaggacgagggcggctgcgcgggctgcgcgctggcgggcgcccccgggcccagcctgcagtccaggcggccgggcagcaggaggcacgcggtgcgcgtaccgccgcgggactccacggcctgaagcagcagctccagctgccgctccttgagtttcttgagcaccgagtgcgtgagcgccttcagatccgcctcggcgcccccggccgccccggcacccgaggttgggggatggggatggtggtgacctttggcacctcggactgccttgcccaggcagcagccagccctgcccgcaccgccgccaccagccccataagcccggccgtccgtcgccccttctccccgcagctcgcctcctccgccgccaccccccacgccctcctcctcgtcctcgccgccgggcgcacggctcctccagagacgccggacgagcgcagatcgtttggtcctgaacatgcggggcgaggaggcgaggagaaaagtcgtttgccggctaaggagcgaacatgacctccgcacaccatgaagaagtcgggcgccgagttggggcagcaggcgcaggcgacagcagcaacagcaggggcccgggcagaagcggcggcggcccgaggggcgctccgtggcatgcgccagtctcccagaggccggggcgcgcgcgggggcccaggggcgcctgccggggatcggggggctgcgcttcggctgccccacccggcgcggcccgcgccctgcgcggctttcgggccccggcgtgccctggaggaacgcggccgccgcttccctgggggcggccgaggcaaccccggtagacgcctcccccaaaaaaggcccccctacagtggctcccgagtgtcgggctcgccagcctcggcttcctacatggaagatcctcgggggcaaaaaaaaaaaaaaaaaaacgaaagacgttaggctgagctactaaagggaggaaaaagcctctttcccccttgctaagcaacttaatttgggggtggggagaagcaggcaattaaaaaaaaaaggcaggcacgatttattttttttcttctatatccttagtaaccggatctcctcgaattctgtgcacgcgaagacttgagggaggggaccgagtagacttcacccctcgtgagatgtctggagggtctctcaaaacccccaaaaccaaaatatgcaaagcccccaatgaaaaaacacaccacctcctcgcacctcggaggtctggagggcaccggatggagcccgggtttaaaagagaaaatgtttacaaagtaaaacaagatgttggaagggtgggggaaaaaaaccgtatccacgagttacatccccctttttttccttgctgaacccagccggtcttcctttccttttcttctgccaaaaaaaaaaaaaaaatcgtatttcttttaatccacagaaaggtctggctaggctgcttcaatcttgcgtatctgggtgttttagagtctctggtctttcctcctgcgttcccgggggcccaggtcctcggcggggacttcctccgcgctggggaagcagggacagaagatgctgcggcggcggctgcgccccggggggctgtcagcgcgggggagggcggcgcggcggcgggctccggcgggtcgcaagctctcgcccccgagggcacaggctagtgtgggggcctccggtgctccttctcctggccgcgggtggccgccggggctgctctcatgagctgctggccccgacccgacagtggcggcaggaggcccgggtgtcctctcgcagcctcttcctcggagactctcttcgtcgcgccccggagcctcctcgtcccccgtccgccctctcctggcgctcgagtccttctgccgccgctgggggctcgccgcgccgcactcagggactccggggccgagcgctcggcggcgtggcgccggctggctggctggctgcgtctcaggcagctctctccggcgcggcgagcggaccgagcgaggcgcccggctggctctgctggcgcagctcggggacaagatcctctgtgcgccgatcagcgagcgaatgtgcccagggctcgccgcctcccgcaaggcctcccgcctccgcccccttccctcccccctctacccctccctcccccgcccccagccgccgccgcctccttcccgcccccccacccgtccctctgctcggctggttccactgcgcagtggcgcgcccggctccggcctcgtcacgtggccgtctagacaccctgtcgctttaaaaaaaaaaaaaagcgattgtgtttcgcaaacaacagatcgggtttctaaaagctatttcaacccccctcccagttactgccaccctctcccaggtctagagaggggtacccacggtggagggaggtgggaggccgagacggccccgggggtcggcggagacccagcgggagcagggggaaatcggaagagctgggggcatggagcgggcgagtttggagcggaatgagccggttagtggcccgatttagaccagcagagctcgcccgggcgcttcattcattcgttttgttttaaggccctggcggcggatcccttggaaaggggaggagatcgctgtctgtttcaaagacatttacaccggccaggacggaggccctgggaagtgtgcgctagagggaacagccgggcggccgagggcggagaggcggcgcgaatgtgacctcagcggccgccgcgctccctcccgccctctcccgctccgggctcgggtttctaggactgcctggagaagtgtgtcttgtgcacagctctggaatgcatttggcaggctgacgagcagcgaggggcagcatcctggagggaggaggggtgcagctcgcccgcgcgccgccggcaggtttcctcccggcctggaagacctccggcacccgccactcggcctcccggcgcgctaaccttgcccagccagcagacctgcttagagcatccaatcgcatgcggggcctgcttagggtcagagagtttattccttcaccataggttccagagaaagctatccccagatgcaagtgattgctaggaagtagaaaaggtatttgtcaagcaaaagtccgtggagcaggtctgaggatagtactagagtgttaaatgttactgagacaactagttggcatggtgatccaacctgacatatttagtaggtttttgaaaagttgcttgaaattgtaacattaggacagtcatgaaacttacgggggggggggggggtaaaagaatttttttttaccagatgtggaatataatatttatttcttgccactggaatgatatgttctggaaaagataaattataaataccctttctttccagtaacgtttgtttctaacctgatagataattgacacacatttagagggctgggggtataattccttagagaccctggattcagtgactagcaacactaactaggaatcatcattttgaattaggttctctgaccattccccttccacactaaactcttacaactagaaaagaaaaccaacaagttctatcacatgattctctccctagggagccctacgttgtggaaggaagacaacagtataggaccatcagcaggaccggacagagaggggcacgtaagcagtaattactggatggcatagtaattctactaaaaattaaaatgccacttattggaatggtgtgtgaacactctaaagcaacccgggaagaagacagcagtcaagaagaccaaggaaggaaatggaggagggatgaccccaccattacaggcagggaaggactgaccaaagagacagaaatgtagtctaggaaatgtgtcatcttagaaaggaacgggaaggggctggagaggtggctcagaagtaaagagcagtggatgctctttcaggggacctgagttggcctcctaatgtcttcaggtacctcctaactgcatgtaactccagctccgggagattctggattcttctggtctccacggcactgcgttcacgcgcacgcgcgcgcgcacacacacacacacacacacacacacacaaattaatcttagaaaagcataggaagcctgattttttgtttgtttgtttgttttggggttttttttttgtttgttttgttttgtttttgagacagggtttctctgtatagccctggctgtcctggaacttgtagaccaggctggccttgaactcagaaatccgcctgcctctgactcccgagtgctgagattaaaggtgtgcaccaccacacccgacaaggaagcctgttttaagaagtgattccatggaggagttctgcggcggctcagggcttgactaaacagtggacctcaggtaagatgctgccttgaaagactgtctaaggcttttttttttttttttttttttttgagacagggtttctctgtgtagccctggctgtcctggaacccactctaaaccagtctggcctcaaactcagaaacccacctgcctctgcctcctaaatgctgggattaaagggtgtgccaccactgctctgctagtctaaggctttccagagaaggatcatgttcttgcagggtcccatttctctcagtagacaagagaggctaaaccaggctgcaggtgacaggaagaattgaataaactgaaagcaaagggcagccttctaattacgcttcgtggctatgtggacaacctggagaagtctggaaacgtgagtggtgctaatcccctttgtaatgaaaggcccgggtaaaaacagatggggcaagtaggtgtaatgggtatttcaggagcttgaatctgatgtcacagcttgtctggatgggacgtgcatctacttgcagagctatgttcccatctagtgtaattgtgggtgttttaattcaggcgtcacctctattttgtcctctctccacagctttcctcctccattttactacttgagggagcagtgggtgggatactaggcaagtagctgcaatggctggtgctttatggttccctggcatcccctgaatctgttaacatcccaaccttcttgacagccagccccaccccatcacattcttactccttccctttccaagaaagaagccagaagcccgaagccagcagtagagctctgactggcttgtatgcctagaaaggaagggctcttctttcgcctcacgggcacaaatgggacccacgagcgccgatttcagactattctgatcccttcaaaaagaaagttaggagtccaggctactgtgagtgaatttgattctaattgtttcagagaatatggaataaaatatctcatttgcagttgtttatttcctgttgtggcttctattttcatctttcagtcactttggtgatagtaatcaaaccctaatcacggtgcagccacaagtcacagagaccgaaatagcagacttatgacagacaaggatggagacagctaaggaactggctattaatcaccagtccctctgctcacagcccattgggtaggtgtctggagaagagctgaagcaaagggttatcagcctgtgccccaggcctctgagcagccaaggcccctaggtcccagaacaacacagtgaacaggaaatggcctccaagaaagttaagttctctgcatgtgtcaaggagaggtggttcacagaaagacctgttttgagccaaatcaaggccaagaggagtctcccaaaactcttgccagctcaaaatgaccacaagcaaaagcagagaaatcgcctccctaggaggacgagattctggctattggttcctttctccgtttgtttgtttgtttgttttttggttttttggttttgttttttgaggttccaagatggaagagcaagaagctcacagtgcccctggggacggggtcagggtgaggcagggacagtttttcttgcaaaagccgaaaggagaaacaattggaaaatatcaacatttcttgcacaatcgccccccccccaagaatgtgtgagtgagccctaaaccatcctcaactggcagctttacaaacggaagtgaggttacgaaagcaaggcgggcgtgagtaaggctggcggggcactcagcacttcttgccttatctcgagaagaactcgaacttagtgaatgaaaacgcatctgattcacaatcaaataaagacgccataagtcctgactcatcaaatactgtagcgttacaggcaagctgtcagctgatccagagtggctgccaggtatctgtccagagcactcaagttaggtgctgagcgtggggtgaggacacgcgaaatggatgcttgttgtaacaacgaagacagcaacatccagaaatagtggcgtagggatagatatttaaatatataatcatgttgaaattcctctaaccccaaacaagggccatggatagctaatgggcagggttgggaggggagtccaggcacgtagctttttggactgcttgaattccggagccagggagcacgttactcatccacaaacgcggagctgtcaattgttttaagccttgcctgcgtttctcatttcctgaaaatcactgctgacagtcttgtgtccaaagacaggttggccaggtcccatgcagaggtgatgctatagctagcatgtctctctgtggagcagttgctataggaaggccagtgacaacagaagccggtatctcatctcagagagcaaggaagggcagagagcctgctccctctctgaccctggcaagagtcagaaagagtcacaatccaaagacattctagataccagtcaggggcgagtctataacccagggccagaggcctgacaaaggctggtatgatgatggaggctcagggaggagactgccccgtccgagaaaaggagagctttgcttggggagaccaaaatggacgcacgtgactctctgttcacttagcagtcactgattcagagctgatgtcccaggcgctgggagagaccttctgggggatgtcagcggccatattaaaacagcttctgtccccaaggagggagtgaggaagaaggggggtgggagttggggggataccctatcctcaccaaatggactctgactggagaacagagaatagcaggtttattctgcgtaggggcatctcgcgtggttcctcgaagggagaaggtttgagggctgggaggactgagctgagtgagaagcttctgatggtactgatggtcctagcagaggcaaaaacaaggccaggctggagttcagaaagagaggacgccctgggatatataagcccccccgcaccccaacatggcaagaatgggaaaagataaagtagatcctaacccagaagaaccctggtctaccctcatgctattctgagtactgtccaggttcctatctagaaccccaagacacagatctacttcaagattctagtcatgtggggctattaagtggtctttgttactgtctaatttgtgcctggtttctatctttccattgcctgtaaactttcaaagtgtcacataggcgctgggtgctggttaagatctgagtggggtagcctgatagtggggaattgtagccagcagcctgtaggacagggactattcccctttagtacagtgtcactttctgaggttggccacatctaatggtcctggcttatcatagaactcaccagttcaccagaagagcccagtctctctctctctctctctctctctctctcttctttaaagattatttatttattttatgtatatgagtacactgtagctgtcttaaggcacacaccagaagagtgcatcagaccccattacaaatggttgtgagccaccatgtggttgctgggatttgaactcaggtcctctggaagagcagtcagtgctcttaaccgctgagccatctctccagccccgagcccagactctagaagtcggtcccagaagacctagagaagtagttcttaacctatgggctgcaacccctttgggaatgcatatcaaatattctgcaaatcagacatgcgaattacaattcataaagtagtaacatgacagttataaagtagtgatgaaaacattgttatggctgggggtaatcttaacatgaggaactgtattaaagggttgcagcattaagaaggctgaggacatcttcaccagagggacaggaaggacccccgcccccgacccaattctggaattaagcagactttgcggtcattgctaactcctcagaggcctttggagaagcagtttccgttgtctgcctgccttcctcctccgagtcctccgaattaacaaagtcttgtgtgccagactctgagcatccctccgaaaacaaagtgcgccccacagggctgcttggaagatgtgctgccactgtgggagcccaagtttatgtaaacccggtggcatacagatgctaatctctgttattatcatgaatcctgaggtctgagcctctggtctaaccttgcggagcctaggaaatgcattggtaattgtccaagcaatagggtaactaactgaaggaaaccactctttggtgactagaattttgtttgggtgtgggggtttttataccagtctccatggggttttacaaagaccggttatagctcatcctaagggaaagcctggtgtttgagtttaaaaacaaataggactgggaaatcttttcctgttgcaaagagagaacattaactgagaaaacaagtgcgggtttacttctttcctggtgcgagccagtatttccctgcaccttggcaatagctccatttgtaatgacagacagcggaggagggaagggttccccttcacagaggaggcacccaggattctgccgctctgagccctgtctctccatcccacggacatttgttctgaaggatctcatggttataggaaatgatgttatcgagctgtcttggtgttttgcagacccgagggtgaaggatgaggaggatggaagaaaatgggagtggcgcttgctgcaaagggtctcgaagggtctcagcacctgcgaactggctccaatccaaactccactattcatggtcaagttcacatagggcttggggttctaacaagatgtgactaaacttacgttttctatcttattgattgttgttgatgcacgtctggtggtacatgcttgaagaacacagacaccctgagaagaaagacatagctccccagattccagcacgcacttctctgtgagctaccactgtagctgaagatacagggctcaggaggaacacttggccttcgctctgaacttcaggcccacgtaaccatcagccgacatgacactgcaaaggcaccttagctctgctgtcccagatggccaagccaaccttattccagaagctacttctcctgatgtaagaaccagacacaaaggacaacctctgcctcaccctccttcacacaacactgagtctgtcatctttgaagcatttctcaagccatgtttattcccctggcctacgtggaacacagccagggtacggaacacaacctcagcaccggtctgctttcctctccccatttctggtctttctcagatgcccagagctcctctgtcccaatgactgcttatcaaagatctcactgtgtccccacccaaggggtctttggccaccctgtgaagtcctagtggcctggagtttgccccctttcccagacaccttagggttcctgctgcagctccagaactgggggagcagggttgggggtgagtgtgtgtgtgtgtgtgtgtgtgtgtgtgtgtgtgtgtgttgactcaccctgcagtattctctccatctgcacaggtccccagtctctgagactgaatcacccctctttcactatgcctctgcacagctgcccttgtgctccctctccttgccccgcctctttttaagacagtattatgcagccctggctgtcctggaacttatgtaaaccagcctggccttgaacttgcagagatccacctgcctttgcctctgcccctgcccctgcccctgcccctgcccctgcccctgcccctgcctttctgcctctgcctctgcctctctgcctttctgcctctgcctctctgcctctgcctctctgcctctgcctctcaagtgtcagggattaatgcctgccacctccccagtcccacccctctccatctaccatgtgggttccacggggcaaacccaagtcatcaggcttgttggccagtgcctttatccactgagccaagccgcttggtgtgtctttgatggtgattatttacaggagctattcagcaaggttaaatgctggcaacccaatgagggggtctcttgatccaaaactgagaagttgaggcactatttcagaatgaccaaagacagtagaagaatctagatatgtcgatgatgagaacaatgataactccaaaagctgagggaaattaactcaaaatcttccagcttccttttccttacctagtttggcggactccaactcttgggatagctttttttctggccccaaactcacctgattcgtctgtccactgccacactgaagaatgaacagctgtctcagagagcttggctccagagctctgcaaaaagaggacaccttgccttgagctgtgtttccagaatgtattgcagcccccagagtcatgtactgtgaccaggtgaggacatgcatcttctgttctcctgcacccagggccccagcaaccaaggatctggggacatggcgggtgtttggcaggttcgcactctgaaaatatttgatgagactcagtatatgctaaataaacactggatcaagttcttggtctctcctttggggaatttacagtctatcctacagagaagattgaaaataaccctttggtgtgtatgcatgtgtgtgggggtgtgtatgtgtgtgtgtgtgtgtgtgtgtgtgtgtgtgtgtgcagggtttcctctgtatatgtaatccaggcctttaacttttgatcctcctgtctctgccttccaagtggctaagattacagtcactatacccagccttcttttactttttcttgtttgctttggtttggtgagtctcactaagttgtccaggctggtcttgaacattcaaatcttcagggttcctgtacagccagggcaagcttgatgttttataaatgacagttagcctcagtggcaagagctttgagtagactgagggagttgagtgggagaggcagagtaaaggtgagaatgacgtcaggagtagcatctggaataccagagtgggaagaacgaggtccaggaaagagtcttccaggaatgagagagccaggtcctggctgctgtgtgggtgagccaacaggtgagctggcttgcagcccactggcctcgcctggaggccatcacgactgggtgtgtcagctgcagggagctgtggagcatggagaaggccttagtgactggattgtgcaacaccttggagcactcattccgtgagatggaaagtgctaccaagtcagacaactgtgatatcagggatagcccagagcatacaggacatcaggtatcccctctgtccccagtcgctgtgtcacctcaacttcccatccataaaacaagggcagtcatccctctagtggagagtgggctgggagtttgatgagatcatggatgagaagggggggaagagaagctgctgtcaaatcatgatacaggaagatgcagagcaggcggaaggcaccctgaacctcagcacacagtgggcggggcccctccaaccactgtgcattccgcttcaggatggcactgcagccattccggtccattctagtgttactttaaaccatctcatcctgtctggggagcaccttaagcagtgaggtgaacaaccagaggaaaatagcttcaaggattccctgaaactgggctggagagatggatccgtggttaagagcgctgactgcccttccagaggtcctgagttcaaatcccagcaaccacatggtggctcacaaccatccataatgagatcggatgctctcttccggtgtgtctgaagacagctagagtgtactcatatacataaataaatctttgtaaaagaaagaaagaaggaaaagtaattccctgaaactgaccagattctgtaggcaattccctgccagagtaaatacacacacacacacaccaagcccattggaccaacactgaggcacctggaaagaacgctctccaacctgctgagctgtctgcaggctgtgcactgtgctccaggctccctgctttgtgagttgtcactcatgctggagtggactttgagttatttctagtcctatagataaccgcaatgaaactcaccaggttggccttcagtggtatccacactttggtctgtagcatgtttcatctcccaggaaaggtcttgtcacacaacagcaagtgtatgtgtacgcacccgcagagatgccacagtgtggctctcagagccggggctctgcttcacccttctgtgggttcttcaaataaaactcagctcatcagacttacatcgttaggtggtaagcacctttcacagctgaaccatcttgtatggtgtgttaggtagagttgggaggctgagacacgggccctgctatgtagccttggctggccttgaactcaaaacaaggtagaagaggagatctaattcctcccatacttgtcctctgatctcaatgcattgactatggtgctccaacacacacatgcacacacatgtacacatgcacacacatgtacacacacacacacacacacaataaataaataataaataaataagcaaacaaaacaaaacaaatcaccaaaaccataaatggagtctgctgggcacataactaattagtggaatgcttgtgtaacaagcgcaggacccagcggccagtccctaacccggaattaaaggacaggtgtaaaagcccggcgtggcgatgcacacctttaattccagcacctgggagggaggcagagacaggcgaatctctgagtttgagccaggactacaaataacaacaaacaaacaaacaaaaaccacgtaggcagacctgagagttcaaggccctgggttacataaggtcctgaattaataaaaaccagggaatggtcattcagatttgtaatccggctcttgcgagggagaggcacaaggaccataaactcagctatctatcctcgactattaaggaaagctcaaggccagcctggactacctgagactctgtctcgagcaagcggatgaatgacaaagcaggctggaggctatatgtaggctaagaacaaatctgtcccgttttactgaagtaaccttgaacttggggatgggggtccttgacgaaacctcctcagacaccaatgggttttgtgatgctctagtacctaagtcctgagaggtcttccttctcgagatggttgaccagtatcccctctgactggatgaggtgtatagtaacttgctaggatctcacgtcccttcctgttttccttttatggacagatgcatgctaagcaacgtatgaggagaaagatgctgaagagaccctttgataacaatgtgaaactggccatttgtttaaagatccatacaaacactggacagtggtagcacaaacctttaatcccagcactctggaggcagcagcaggcagatctcagtgccttcaaggccagcctagtcgacaattatttccaggacagccggggctacacagtgaaatcctgtctcaaggaaaacaaaaagagtgaagactgggcttttaggaggtccaaacctagtcagtgccttttgtagcgtgggtttagagtcaaaggctctgaaacaacctgttccaagctcctttatccctcagaaagacccaagatattcatcttctgttgcatgagtcttacactcatgtgtacacagggaaggaaggaaggaaggaaggaaggaaggaaggaaggaaggaaggaagtccttttgcaatttttactgagaatatagtaaagtccatgagtaaattaagctaaacagtgagatttacaaccatcagggctggagagatggcttagcagttaaaaacaatggct

SEQ ID NO: 89 - DNA, 294581 bp, Homo sapiens
tctcacatcttgacttccactaatattataaatgaaaactcatttttaatactcttgttctgcctagcagaggaaaaggtaaaccctctctggtagaagatatcatcatctgcacactctaccattttttaaataaacaatgttcagcattcattcaaaaattcttagaaatatcaggctgggcgcagtggctcacatctgtaatcccagcactttgggaggctgaggcaggtggattacctgaggtcaggagttcgagagcagcctgaccaacatggcaaaaccccatctttactaaaaatacaaaaattaactgggcatggtggtgggtgcctgtaatcccagctactcaggaggctgaagcagaagaatctgggaggcagagtttgcagtgagccaagatggtgccactgcactccagcctgggtgacagagcgagactgtctcaaaaaataagttctcagaaatacaaaaaatttgctaggcattggtggcgaatgcctgtaatcccagctactcgggaggctgaggcaggagaatggtttgaatctgggaggcggaggttgcggtgagccgagatcatgccattgcactccagcctgggcaacaagagcgaaactccatctcaaaaaaaaaaaaaatcaaaataagccaagagagggggaaaaaaaccaaataaacaatagcaatagatccacaggtgatccagatgttgaagttaacagacaacgtggtttaaagtaactatgattaatacgttcaaaaataaataaacaggcaaggtgcggtggctcacgcctgtaatcccagcactttgggaggcccacgcaggtggatcatgaggtcaggggattgagaccatcctggccaacatcgtgaaaccccatctctactaaaaatacaaaaattagctgggtgtggtggcgctcgcctgtaatctcagctactccggacgctgaggcaggagaattacttgaacctgggaggcagagattgcaataagccgagactgtgccactgcactccagcctggcaacagagtgagactctgtctcaaaaaataaataaataaaaataaataaataaaaagggatagcagataaaaagatggagaatttcttaccctttatagaactgaaatctaaaaaagaatgaagttgaaattccaaagccaaagtacattaccattataacagtattacatttttagaaagttcttgctgagtgtgagctgagacaacatatgtgttcttttgtggagtcacaatcttactactccctagctaggagctaaggaggctcctaaacgcctacagccactgtggaagttcagacactagcagtcacatactgatgaactgaagccattgcaaggaagctgtgagggttacatgacatcctcagagtgcatagatgagccagcaaaatgaggtctccttccaaacttgggatttagctaccataggcagcaatgctgttatgtaatttaagggaacttggcaataaatgaaataacagttaatctataatttctccaaatcactgatccttaaagtcgggttcaggcaaaccagagtatgtagacaatctcctaggttttagggaggaaatgctaaaacttatgtttacgtttaactcatgtttgaaatgcctatatatttattttacaccatgtacttactatgttggtattgtagaatatattaacttacaaataaatagatatgcatcttttggaagtaagtttaaattttttttaaattgctggccaaagtttggagaccatttttttctaaacctacatatttatttactaaattccatgttgcatctactaaatcatgaataaaatcttaccacagttggttaatatctgaatttggagttgcatttgtttcctcagttttcttcatctataaatccttggcactcagctgttttgtgaactaggctaaaatggcgatctcatttgcagaaaataaaatagttttctcaaagtgaagttatttcccatacatttttattaaacctttgcttattgttattatttgttttctagtgtgttggtaacaataaaacagatgaataagtagagaattagtaataaaagaaacatcaagatatagttttttttatagcttgcctgcttttttttatacagatacatgctcttatttgtgatttttttattgcagatgtataatatactcatatatttattcttaccttttttgatggaattaaatttatcaggtaaaggtttggtaaggtcgctctgactcccaagatatggtgatgcctggaaaaacttgtgaagattattttattttatggctttgttatctggtatctgttaatagcacttggaagaataacaaattatttatgcacaaacaaactgatagttgtaaaagcagattttgagagtagataagggaaggaagtaaaggcctgcggcagctaaagaagtgagaaagtccagtaaaaggtacagaaaataaacttcctcctacctcccagttttgctggaggcagaccctgcaactgagagtcttaagagttggaagaaaactcagaagtcatctagccccactgtgactgaagggattctgaaaacatgggacttacagtattaaaactgggaaagtcccagcaaaccaggatgagttggtcatgcctcctaccttccgcaagaataccttttgacatgatcacatatgctattattgttcccaatttacagatgaggttgggtggtcagccaaacctctgttagaatattctcagtgatgggaaactagatagtggttctactggatgcttctgcctcagaatgaactattttcccctctcatttacgcattggtcctttttttaatgaaaatcacataggacttttatttggtaagtctagaaaatcaacttgctgagaggtccaaaaaaaaaaaaaatcaaacaacaaccataccccttcttccctccaactcaagtacattcatttcccatccaagtattaatcaggcctgaccctgtcgagcttccaagatcagataaggtcgggtgtgttcagggtggtatggccatagacttcatattcatttcagtttagcccagcacacagtacctgtgctaggcccaggaggggatctgaaaaagagcatggacaaatgaacaaatctagaaagactatttgataaatgtgtctaaacatggtagcccaaaatagtgcctctttgggaataaaagtgtaatatgcaatgcatacaagaaatagaggtgtggataactaaatccagactgtagcaagctgtttgctatagtctaagttgctgtagtttgtccaatcactcatacttgacaagttaattcaaattggcttgattatgtggacatcttcagctcaaagagtaaatgacaaatttattcagagacaaaattactgtaaaaatagtattacaaagataattttgaaggccggacatggtggctttcacctgtaatcccagcactttgggaggctgaggtgggtggatcccttgagcccaggagttcaagacaagcctgggcaacatagcgaaaccctctctctactaaaaatacaaaaaattagccaggcatgatggcatgtgcctgtggtcccagctacatgggaggttgaggtgagagaatcactggcacctgggaagtcaaggctgcaatgagccatgatcgcggcactgtactccagcctcagcaacaggagtgagattctgtctcaataaaaaataaaaaaaataaaaaaaataaaaagataatattgagggggaggaaggaaaaactcaaggaaagccacagttaccattacaattataatccatattcactaactatcattactaacaaggatataaaaccagttatggttaaatgtacttaaggtgttaatttagcaggtgtgcaatgacattgcaatgtagaataaaacagaaacctggagtgatttttgcaatgcaaagtaaagaagagaggctacaattaatattaaaaatacaattaatttaggttgctgtgggcaatcactttacttaatattagcctgaaatgtactttaagataaaaataatctggctcttctttctttcctttttttggattaggtttccgcagaggccaaatataccagatgactgtgaaattttcactttaatttgcatgcgtaagtatagtcttggatattagaaatgagaaaaaatgaaatgtaactgatcaagtgtaagggaatacatcctgattaagagaatagaatcaattttcggaaatctaggagtaaatgctctgtgtcaatagaaacaaatttaagcttacatcatggccagcagattttaaaaatttctactgataattctataacataagtttaacctgctttctgacttttttaatgcaaaaggttgtttaattgacttgtctaaatctgtcaggtattttggaggttcatatgcatgaacttgacattaaaagccaaaaccagacaacagcatgctatgcacatgggaagtaaatagatagcatatgatttttgtatttggcttcgaatcatttaaagtgatggttatcactagtgccaggtatttttgatatcatgtaatttttcgaagtgatatctagatgtggctctggttcctgaaatcttagccagttatggaccaaaaaatgcagttttaaaataaagtaataaaattagcatagttttttttttttttttggacagagtttcactttgtcccccaggctgaagtgagtgcagtagcgcaatctcggctcactgcaagctctgcctcccgggttcacgccattctcctgcctcagcctcccgagtagctgggattacaggcgtccaccaccacgcctggctaattttttgtatttttagtagagacggggtttcaccatgttagccaggttggtctcgatctcctgacctcgtgatccgcccacctcggcctctcaaagtgttgggattacaggcgtgagccaccacgcccggccaatattttacatatgcagaatattttagacaaaggatttttattttgattaaaagtgctatacaaataaaaaataaaaataaaacctcttgggtttgagtgtcaagaaattaaaaaatgtataccattacatttccacactatttaaagtgcaactgacaaactgccccatcttagagtattttcccaagagtaaagagggtgagtaccagagtaaagaataaatagagtaattaaagaaagtgggtaatattgttacctttcatgattagttagcctaagaagcaagagagctggccgaactttagagggttccttaaaataaatttctggtctttttgttgaacacatctgatctatctgttgtctctaagattttttttttaatctcatccatcttcctctggtcttgtctcctgatattttagcagtgtaagggagaggctatgttcacttctctacttctttccaaagaaattttcttttttctttttctttgaaaataagaaaacatctttcattggctggggcagggttttagggtggagaaagcattaggttgctttcagattttttatacaaggctccgattgttttattttttatattattattattattattattttggagacagagtctcactctgttgcccaggctggagtgcagtggcatgatcttggctcactgcaacctccgcctcccagattcaagtgattctcctgcctcagcctccggagtttctgggcttacaggcatgtgccatcacgcctgtctaatttttgtgtttttagtagagacagggtttcaccatgttggccaggctggtctcctattcctgacctcaggtgatccatccgcctcagcctcccaaagtgctgggattacaggagtgagccaccacgccccacctgattattttattttgtattcttgcttttagaattattccgtatatcaacacagctggtcttattacaataattttgatattttaaacaaatcagtgatgctaaggaacgtcactgagtgttgacatgtctgtgaaagcctttatatggaaactaagatatctttgttaggaatggggaaacaaaggtaaatgtgataataatgtatcataatgtctcaacttagtcattgtgaatctctcactgtcagattaagatgtacatgcagtgtatgttaattacggaaatgcattctgccttatacatgcagaattatatcttagagaacttctccccaagctttttgctaaccaaatcatcttttcaactatatacaggtctttgaaagtccatctcttcaatattttatgacagagtgtgttgacttgaagaagttagaaatggcaaattcccttccaaacctgtttttctgctcttactatatctctaaactaaacatgttggatttgcacttattcgggtctaggtaagtcactaaataaggataatcagttatgtaggatgttattcatgagtatagaatattgaccaattcaaaaacccaaccagtgaacatggatgagattttttaaataaaaaccaacaagtcagaacagttatttcttgtgtttaaatttcagatgaactctgaaaattgtttacaaaagtagattcttaaatttataacaaagtataaaactaaagactatgacagccaatataagcatatatcccttccaaatatcacaaacaagaaacaaaacagaaatacttttaaagaacttttaaagttcttcgctgatatactggtttcttattcagctcagatattttatcagactaagatatatactttaaccaaatatataaaccgatataagaggaatttaggagcatattgcttttgacatagttattataagttaatggtcatttcactactattatccattccaaaggtgcttacacctttagaaacaaactttttttttttttttgagacacagtcttgctctgtcacccaggctggagtgcagtggtgcgatctcggctcgctgcaacctccgcctctcaggttcaagcaattctcctgcttcagcctcctgagtagctgggactacaggcgcgtgccaccacaccaggctaactttttgtatttctagtagagatggggtttcaccgtgttagccaggatagtctcaatctcttgacttcatgatccgcctgccccggcctcccaaagtgctgggattacaggtgtgagccaccgtgcccggccagaaacaaactttcaaggaagctcaccacgtgctggtggccaaatcttaacttttgcccctgagttaaatcttagtattctttgtgtctgtgtttgtaaaatgtaagatttggaatttcttttcatgtaattgatttttcattcctttatacaacactcaatattcatgaacatgtaccatgtgccaaatgcagcacaatttgtactagattaaaattcagaggactaaaattaaccacaacaataacaaattacttaaccttaaaggcctccatttaataacagagaggaaagatatggacaaggtgttctgctcagcatttttggtatgcatatcactcaatcttcacaacaaccatatgtaaaaggcataagtgtaacccattgtacagatgaagtaacttaataacttgccaaagagcacccagttagggaaaggcaggatcagaaatacagcccagcactgtttactctaaacctggttgttaatgaccttcctggtgctgcatctcacagggaagagaccgtgagctcagggggtggagggagctggtgttaccaaggaggtggtatttcaagtggttctctaaataacccgttatcaggcagttgacgcaggaaagaatgttggtcagggaagtggagcacagagaagtgtattacaggcaggttgtgtggagcaggtccaaaagtgtgaaagagaatagcatgtttgccaaaatgctggtgctattaaggtaggcagaagtgcccttgcagaaggcctgaataccatctagattccatcctttagttagacactgggataaaagtaggagtgcagtaggggtggggccttaaataattttatgcaaggaacgagttatcggatttgtgctttaaaaggtaactggtagagaagtgtggaaagtggatggaaggaggcagtggtggtgcttgccgtggtgcaaatagaggcagggagcccactgccttgttctctatgaatgatgatcaggctatcaccaaaggctgagagaagtggcggcctgagtcttgatgtacagtggaatatagagaggaaaggaggtacatgatgctcagatttctgaattagggaactggaaggatggtgcccattccttgatggaactctaaaaggaacagatgagggtgaagaggtaatgcattccattctgcatgtgatgagcttggtgattgtgtgccattccactgggtgattatcaagaggtagttaggcatatctggggtgtcattatttcattaacggtcccactcaagagccccccccttatccgtgctctgcctgtttttttttgtgtgtgtgtgtgaggcagaatctcactgctacacccaggctggagtgcaatggtgcaatatcggctcactgcaacctccacctcctaggttcaagcagttctcctaccccagcctcccgagtagctgggactacaggtgcgtgccaccatgcccggctgatttttgtatttttagtagagacagggtttcaccatattggccaggctggtctcaaactcctgacctcaagtgatctgcctgcctcagcctcccaaggagtgctgggattacaggcgtgagtcactgcgccaggcctgccctgcctgtcttatcagtcaccaaggcctgtcacttctgcctcccctcccttccttcctcccttccttctctccttccttcactccttccttccctttatttttctctctctgcctctttcttcccttcttccccttctccccgcctccctccctccttcccttccccctctccctctttctttctttcttccttccttttctctttcttctttctttctctccctttctttctttctttccccttcctttctctccccttcccctttttctcttcctccttctttcctttctttttcttctttctctctctccttccttctttcttctttcttcctttcttttctttctctatctttcctttctctcgctccccttcccttccccttttccttccttccttccttccttccttccttccttccttccttcctccctcctccctcctccctccctcccttccttcctctctctttctctctttctttcgacaaggtctcaccctggagtgactggcacaataacagctcactaaagcctcaaactctcaggctccagtgatcctccaacctcagcctcctgagtagctggtagtacaggcacacaccaccacacccagctaatttttaaaatctttttgtacagacaaggtctccttgtgttgcctgtgctgttctcaaactcctagactcaagtgattctcccacctcggcctcccaaagttttgggattacaggcgtgagccatctacttccttaatatttcttaaatctccacttaaataaatctctgagttggtcatttggattggtgtgtgcaatgccccataactatgaacaccttagcgtttctagtaggcccttcaaaatgactcaggcctgtatctttagctttgtctgtatccacaccactctgcagaggctgcactccagctatactgaagcagccacagtttgcaagagattatgcttactcacttctgttttgaagtgttttgaagcacaaaggcatgtgtacagtccccaccacatgccaggatgcacaccaggagaggcaatgatatagggctgacttcccaggagcgcctagtagaaaattagaagattgtgacttagcggagtcatattcatgtccattcattgaagttcattgacagcaaaaagccaggcctccggatgttcatttaaattaagtagtcaatatcctaattcagtgactcgcagagaatctggtgggttatttaatcatcacataaaataggtggttcatgtactcatgttgaggcaggagactaggttctggaggcagggaaactaaggacttccttgaactacattgaaaggaaaaccctaactttccacgcctaagtaacaaaaggaccagaggctacctttgaccttttctgcctagtagatgggaaattggctgtctgtaaccaatcagactgactgcgggtccaatcttcatttgcaactttgtaacttcactccagcctctgaatggttgttgtccacaactaatcagactgtgggcgagtcttcgtttgcatagaagcataacttcattaagtacatcccagcctctgattggttgttttttgcaaccaatcagatgtttgcacaggagtgttacctttgtatcttcatttcagcctctggttggctgctttctgcaaccagtcagactgattgcgggctaccacttcatttacgtgagatgagcatgagttgccaaagggaaacttcttgggggtatttggacccaagaagattctgtattcggcctttgagccgctgctccgcccgctcccacaatgtagagtgtactttcgttttcaataaatccctgctttcgttcttttgtcgcttctctgggtgttttgtccaattctttgttcaaaacgccaagaacctggacaacctgcagtcacgatcctttactggtgacaatattgttttattttactgagattccatgtatcagtgttagacacaaaaatcatttggtcatgtgctgccataaataactataaagaaagtctatgtgtgccaatttcacttattctggcctggatctcactgtagtagatcaaatgtgaggaagaaacagtagccgagagaggctggaattagtaaaaatttaagagtagttccatccattatgtatgccgtaataggccctatatgtgaaaagttaaaggagcttatttaattatgaaggaaactattatacaagtaagcaaaacaatttataataaaatattctttatgctcagaattttaaaaatagatgtagactggaaaacctgcaatttcctcattaccatctaatacatagaaagtcaaatcacttacggacagaaacagacttgaaaatttcagctgagaaaacattttagaataaaagaaacattttattcagcacagtcaaaacaaaacaaaaacaacaaaacaatgtttaaaatggactttctgttagaggtggccgtttcacagtcaaaattatcccagagaattgtttatattaaaaacaggctgagaatagtttgacctctgatcaccaaaaaacctggaggataaacattcatctgtcaagatttctctggaaaatccctgcgctgcttcaaagagacagaacaaaggtaaatagcatctgccacccaaatcttgctgaatagagtgatttatcttcaggcctactagccggcgacaggagcgcacctcctcccttctcctagctgtcccgggtttattcattccctgagcctgaatcctgataagggagcagagtagggtttaagacctcggaccccagaatacaccactgcaattgaattttggttccaccttaaggtaaactacgcagctgctgtgagcctcagtttccctacctatagaaagaggatcgtagtggggaattgttgcaggggttaaatgagattgtacggatcgtggagcagcgcctggcgtgtggtaaacgctcaacttatgcgggttgtaactgcctgaggcgtttccttcggcgcgccacttggccttctctttctaaatattagcataataaatataaatggacccagaacgcgagggggcaggggccacgtgatcgctccacgaaagccacttgtagggacctttagagagttagcaataaggctggagaaggaaaagccggcgcgcccgcggcccgcgcgatttcccgccgagcccgcgtccccggcggcgggcgggctccgggggcgcccgggccgcggcggcggcggcggcgcgagctgcgcctccgggccggtgaatcatcccggcagacaccaagagccgcggcagcagagaggagcgctgaaacatggctgaagcggccacgggctttctggagcagctcaagtcctgcatagtttggtcttggacgtatctgtggaccgtgtggttcttcatcgtgctattcctggtctacatcctgcgggtgcctttgaaaatcaacgacaacttgagcacaggtaaggcctgggagccgggcccgcggcgcccacccctcccccgccccggaaagttagtgcaactcgcgcggggccgcggccaggcgcgcgctcggggacgcgccggggcccgcgcaccggaggcccgcggctacccgccagcaacgcggcggcttaggcggcggggccgggcagctgggcgcgcgggggcggccggtggccttcacggccccgcggaggaagagctgcgccgcgcacagcccgcaaggcgggccgggccgggccggcagccgccctgctgcgtcgctggtggtcgggagacggagaagaacgggtgtcgcgggcgaaggagttcccaggacaccccctcgggtgtctgcgccggaactccgagggttccccggagttagaccgagtccttcctcacgccctcccggctgtgggtgccaagcggccgaagtgtggtcggggaggcgccctcccgcccggccgcggaggcccgagggcggctgccggagggtgctcggcggcgaagccccctgacccggccgggctgtccgggcggcgccctccgtggcccggagttgcgtcttgccgggcgtggggctgtctctctggttgggtagtggggagaggggttcccgaaggcactcttgggagtgtatggatgacgtgtcaggtcaccaaatggattgtcgaagggaccggagggaagaggggagagctggaatttctgagggtttcggttgcagttttcagtgatctttgctcgtctcccttccctgtaaagctacatatgctcagcaagtgccgcgtgcctcccatccttggtcggtggtaaatgcaggaggtaattaacaggatcttcacaaacttggagccagcccactgagtcgttaaaaaaacacccgcaaagaaaacacacgagccttaacactccagagagttccgaaacacaaagtaaatttcgagctaagggttacagtcctttaaatctggaaatttcaaggtagagtgtttttgtttttgttttaaattttaatttcacagtactgggaaattcttacagtcctgaagatatatacatatgtacacatatatatcttcccttgttaatctccatactctgggagtgcaagtctggaaatgcattttcctcaggtgtttagctgcattaaaacgctttttaaaacgcttgagataatgtactcattttgttaggaaacttgtacctttcagatactaacttaagtattttgattactaacttgaactcatgttcatatttacatttgttttgtagtatccctcgggatcgtgtccctgggaggcggataggattcagcactctagaattgtctcaccatttgaataggtgctgctcagcccttttgagtctgtcatcggaaagaccatggctttctcgcttttcatctttttggatggctgcttgtcgcaatattgtcttcttcgctttagacaagtatgtctccaggataccttctggtctcaaagttctatacctttaagaagttgtttgaatatatgttttaatggaattacgtatttgttggtaacagtgttagtctgttttgtgctgctgtaacagaataccacagattgggtaatttttaaagaacacattttatttcttgtagttcaggagtcagggaagtcttgagatcaagggactggcatgtggggaggtccttcttgctgtcatcccttggtggaaggtggaagggtaagagaacatgagaaaacaagagggggcccactttcacttttataacaaacctactccctcaataacaaaattaattcattcttgaaggcagagccttcatgacctaattaccactcacaggtcccacctttcaacacttttgcacttgggattttcaaacacactagtttttaaaatattaatgtttctccttattacacacttaaaattttatttcatgatatacatttgtatatcacattttcatcaggttaaataattacccatgtatatatgtgtaagtgtcacatccagtgctctgtgcagatcaggcaagaagcaaaatatctactgggaaaatgtgtacttcttaaggaagggcattgttaggtcttctagcaatttaaatctagcatttctcagagatgcctttgttaatttgtgtaggggcagttctaagagatagcgaaaatatgaagatgaacgtgccatccgggctgtaccttgctagacacatgatagaagacctgatgatgctggacttttcagtttggtttcatgctcatttcagtcataaagaaagataaaaggggaagcacacagagagcactcacctctctgctgtttttatgagagggtagcaggatctggggtgggaggaggactttggcattaattttgagacatgaaattatagccacaaaccaccctagaacagtttaggtttttcaaaaaacagttgcagacattagaggcctattttcttcccttttaagtaacagtgagaagttatagtaggaaaactgccaaaaggttgttgtcaacttaattccctcctttccttgccaattcccctcccctttgggaaaaagtttctgtactgaagttattggcaaggaaggcccagggagaaagaagtcattagccagcacccctgagaggggaggcaggagctagcctggtctaacttgtccttgcagggaggtctaaaagagttctaacgggactaactttgctgttcttcagccctgtggtgcttactcttcctgtgatgaaggcaagtgtgttcctggagaggttactgaatctggagctgcttttagggagttgcagatggcgcaggcctcccttcctcctcaaggaagccaaagacaccatcacaatcaggcagccaggagccagggcttccataggcccagctctgtacctgtagggggatggaatctgctaaaagtgttctggagtcattcttggatatctgcttggtatcttctcaatatcttgaccatctgtgacaattttaatcctcatttgatcatattttatggtaaatgagcttaactcgatttttttttaatttagatgcctcctaatgtactataacaggtgctatgataagaaagatgaatgagtttgtaaaacccagggtaaataaggagtttactacaagaatacaacttcccatatgcaagatggggctgggcaaggctgtgagagcttctcttgaattgagcctaagaggatgaggagaattccatgattgaggactcagaggtggacctcccaaacaaagggacaaagttgtgaaagtgcaggtcagattcagagaagagctaatcgtggaatttaatttaaaataataaaagaaaaggactttgatgaacaaccataccgtttttagctcttacatcgtgtagttttccaagtaaaaatgctttgaatgctgtttttgaggtatactacttccctactcccaccagcttggctcgtgtgaccttcgttgcattgagccagtgccatttagggtagggatatagttcaaagaattccacagtattctcttagaccatacagagaaaccttaacattggcaatcacatcttgtaatgaaaatgaattttaaaaaagaaaggggagaaaacgaacataataggaatagtacatagtggctagctttgataatagtttttttttttgtttgttttttaagagagtcttagtatgttacctaggttgggcttgaactcctgggcttaagggatcctcccacctcagcctccctagtagcgagtactacaggtgtgtgccaccatgcccagctgctggtaactgatttttgaggctctgctcttgatttggatacaatagtgttaaaatagttttatgatttactgaaaatagaatgaaattttaacaaggtttttaaaagaccccaaataatattacttgtcagttttcaagtgaattaatatcataaagcaatacttttccaaagggcagaaaattaattgtagattggcacagtcatgcaggatattattaaaataggtgagtcttaaaaaatagtaccataacttatacagtggtgttgatggcactttctcatctaccctatgttataaagttttttgctgctgaatttaaacaccttttcctaaaacgggcaactttgctgtttttgcaaaaagcagcataagtgattttccaattctttttctatttgctgaaaagcaagttttcaaagatctttgaaatccgttttcattccttttggaaaacaaatgtaatagcctgatctaggcttaaagttatttatttacttatgtttgagacaaggtttcactctgtcacccaggctggagtgcagtggtgcagtcacagctcactgcagcctcaacctgcaggctcaagcaatcctcctgtctcagcctgccacctcagtcttagtagctgagactacaggtgcacaccacagtgcgtggctaattttttttttttttttttttttttgtagagacagggtcccctgtgttcttgaactcctgggctcaagcagtcctactgcctccacctcccaaagtgctgggattccaggtgtgagccaccgtgcctggtcaagttatttagaagacttttttttgtgttaattaagctcatgaatacagatgtaaaactcttatattgttgacgtgatatagaacttaggctgcagctcagttttggcattttttcatgttgagaatttttgctctaaatttacttaacatttagattttaatttacttaaaatttacataaaattggatttcccttctagagggtctggttgcagtttacataggtcttttgcccctgttgtgcctgttgtctaaaatgttcttccctatctgtaaatcccacccatctatcaaggaccagctggcatgctgccttctgatcctttcagctgcagaaaagacaggcttaccttggagatattgcaagtttggttcccggccactgcaataaagtgagtcccatgaaatttttggtttcccagtgcatataaaagttatagtcacactatattgtattatattaagagtgcagtagcattatatctaaaagaccaatgtatataccttaatttaaaaatcctttattgctaaaaaaaaaaatgctatctgagcctcaggaagtcataatctttttgctggtagagagtcttgccttgatgtttatggctgctgactgatcagggtgctggttgttaaaggttggggtagctgtggcaatttcttcaaataagacaaccgtaaagtttgccacatggattggttttcctttccagagaaagatttctctgtatcatgtgatgctgtctgatagcattttacccacagtaggactttcagaattggagtcaattttatcaccctgccacggctttatcaatgaagtttatgtaatattctaaatcctttgttgtcatttcagcaatgttcacagcatcttcaccaggagtagattctatctcaaaacactttctttgctcatcaaaagaaacagctctttatccgttcaagttttacaaggaattacaacaattcagtcacatcttaaagcttcagttctaattctagttattttgctgtttatggcatgcctgcagttactttatcttatatgaattatggtatatgtgtgtgatatatgtgggtcagtgtttgtgtatatatgcatctttttttgtatatgtatgttttattacttcttctagattctagttcttcatcttccagtgttaattccttgtacaaagtaggtccttatcattcactggatgaatgaatatccaagttacggtgtatttagtgagctgggattggaacaatacaattgatcaaatgcattactgagtatgtgccccatctaagtttgcagctttagattgtggtcagaggctgttacaagatcttatatattctatgatgggccatatgcatctaaagcatggtggttcagtttatgaatatataaaaggacaattttttgattaatgtcagctttgagtttagaatgtatcccagacatcttagttgcccttaattatttttggagatatttttctcagccattaataaagcaatccgaatgatgcatttttctctgagcttgagtttttgtatatgtaaaataatggctttacattcattaagtttccttctagctctgggattctgtgtcttacgatgaatttcattgagtgcaaagtgtagcaccaagataatacatggacttaatgagtatacatgttttttacagtttggactcttaatacttagtgaatacaagtccagattttgtatgacttcctgcagtggcttccattgcattgaaaatacaatctaagtgtattaccttcatttacaaagtttgatgctatggctctttcttacccctcaaatctgaacttccacctctctttttctagatcaccaccctccaaatacgctgggattcttttttttttgttttgtttttttgtttttaagacagagtctcgctctgttgcccaggctggagtgcagggacgggatctcagctgactgcaacctctgcctcctgggttcaggtgattctcatgcctcaccctcccaagtagctgggattacaggtgcatgccatcatgtccggctaagttttgtatttttagtagagacagagttcgccatcttgtccagactggtctcaaacttcaggcctctagtgatctgtccccctcggcctcccagagtgctggaattctaggcgtgagccactgcagacacataaaattgtgctgaagtatttctaatcacttcgagttacaattctgttaagtttcattttgcctgccaatattattctgaaaaatttcccaaccaaatctttcttgtactactgtgtcattgctcacagacaatttttttccacattggtagaaccctgaactccattcatacagataatatgaggtacttaacttgtacatttgtttaagttccttattgatgctggatattagatctttgtcagatgcaaagtttccaaaaattgtctccattctgtaggttttctgttgactctgttgatagtttctgttgctgtgcagaggctctttagtttagattttatttgtcaatttttgcttttattgtagttgcttttggtgtcttcatcatgaaatctttgcccattcctgtgtcctgaatggtattatgtaggttgtgttgcagggtttttatagtttttggttttacatttaagtctctaatccatcttcagttgtatatggtgtaaagaaggggtccactttcaatcttttgcatatggctagccagatatcccagcaccatttattgaataggcaatccttctcccattgcttgttttgtcagatttgtcgaagatcagatagttgtaggtgtgcagcattatttctgggttctctgttctgttccattggtctatgtgtctgtttttgtaccagtatcatgctgttttggttactgtagccctgtagtgtagtttgaagatgagtagcgagtagcatgatgcctccagctttgttcttttgcttaggattgctttggctatttgggctattttttggttccatatgaattttgaaacagttttttctaattctgtgatgaatgtcagtggtagtttaataggaatatcattgaaattgtaaattgctttgggcagtatgggcattttaatgatattgattcttcctatccgtgagcatgggatgtttttccatttgcttgtgtcatctctgatctctttgagcagtgttttatagttcttcgtgtagtgatccttcacctccatggttagctgtattcctacgtgtgtgtgtgtgtgtgtgtgtgtgtgtgtgtgtgtgtggtggggggcaattgtgaataggtctgcattcctggtttggctcttggcctgactgttgttggtgtataggaatgttagtgatttttgcacattgattttatatcctgagactttgctaaagttgtttattagcttaaggagcttttgggctgagactatggggttttctttcttttttttttttaattttactttaagttctgggatacaagtgcagaatgtgtaggtttgttatgtaggtatacgtgtgccatggtggtttgctgcacctatcaacccgtcatctaggttttaacccctgcatgcattagctatttcttctaatgttctccctcccctcacccccccaccccctgactggccctggtgtgtggtgttcctctccctgtgtccatgtgttctcattgttcaactctgacttatgagtgagaacatgcagtgtttggttttctgttcctgtgttagtttgctgaggatggtggcttacagcttcatccatgtccctgcaaaggagatgatctcattccttttttatgactgtatagtattccatggtgtacgtgtaccacattttctttatccagtctatcattgatgggcatttgggttggttccatgtctttgctattgtacatggtgctgcaataaacatatgtgtacatgtgtctttatagtaggatgacttatattctttgggtatatacctagtaatgggattgcttggttaaatggtattatttctagttctagatccttgaggaatcgccacactgtcttccacaaaggttgaactaatttacatcccaccaacagtgtaaaggcgttcctgtttcttcacagcctcaccagcatctatggtttcctgacgttttaataatcaccattctgactggtgtgagatggtatctcattgtggttttgatttgcatttctgtaatgatcagtgatggtgagcttttttctatgtttgttggccacataaatgtcttcttttgagaagtgtctgttcatatcctttgcctactttttaatggggctgtttgattttttcttgtaaatttgtttaagttccttgtagattctggatattagacttgggcagatgggtagattgcaaacattttctcccattctgtaggttgcctgttcactctgatgatagtttcttttgctgtgcagaagctctttaattatgtgactctggggttttctagatataggatcatgtcgtctgcaaacaggggtagttgactttctctcttcctatttggatgtctgggcattctatgaatatttgtgtggttgagatagttactgactttggccttacagcttgatgatagacttggtcccttgactagaatgcaatcttcatatgagactgtaaaatgaataagtgctttgtaggctgtaaaatactatttaaatctgaggcattatagtaggtcttttcctcagaaggctatattctatattctataggcttggctctcacagtgaaatgacacattaaactatataatagaatcttttttatcctcgatattctttctaaaactgcaccaagcaagataatgggttattggattgtttgaaaccacactactgtctgtttgttgtaaatgtggaataatatctctcaacatcattattgtatttgagatgttgttgtaaagatatctgtaaagggctttggattttccagaagagagaacttgtaatgaaactcatttttcttgttacagtggggcaagacagttgctgatgtgttaccattacccatcatttaaaactagcaggcattcctatactacctactgtgctaaaataaggaactgacaggcccagttagttagctgtagcagtattttatgttgctgtggctgtggtatcactgtttaattgcagttaccaaatctctcagcaaagtaaggcaacatttatctgagaaagcatttttttccattctgaattaactgaaagtgcactggttacacttatactctgtggagaaccctaactttggttcttttttttcttttttttttttttttggagacggagtctcactctgtaggagtgcactggagttcagtggtgccatctcggctcactgtaaactccgcctcctgggttcaagcgattcttctgcctcagcctcctgagtagctgggactacaggtgcatgccaccatacctggctaatttttgtatttttagtagagacagggtttcaccatattggccagggtggtctcaaactcctgacttcgtgatccgcccgcctcggcctcccaaagtgctgcgactttggttcttaagttgacctccgcatctaataaaagactgtggttaagtatcagtctttcagaaattttgagcaaggttgtagagcgttaaaggactttaaaggcatctcttaggtcagtgaggaaggactatttgttttattatttaaaaaaattaacatttaaaaacagcacaaacagaaacactctgaagtataaaatcgtcttaaataaggaagtagtttttacacataagctgctcatatctggagttattgtgtgacctagatttagagttttgtcttgttttggtcagttgttaataccattctaaagtattattttattagtgacaggtaatagtagaatgcttacagttctctttgttaagcttttccagtttctggactctgtcttgggaatgagaatgaaatttacttccctacaaattgggttttttcatttatttgatagaccctgtttattgaacgttcctaatagagctaataaaataatgctcttggggtgttttgcaatttattacacctgctccactcaattgattcagatttgtatagtgttacataataagaactagtgggatctagtttgtacttttccctggggcttgggttggggagcgtgtgtatgtttgtgcagaatttctattttctatcattggtatcttgtatttaaagcaaaataaaacaaattatacttttttcagttcaggctcagagttggcgtggtttagagaggaatttttgtcttagcttatttatgttgcagaaatataatgtttggccattttcataaggctttttaaggaaagtattttaaattgtacccttacatttgagagatgaagcatgagaagctaaattacaattttgaaatattagaaatttgctgcccaatcgttctttccccaaactggaagttgtatatgcattatcattcaataaaaatctgaaatggaatcttaaaaatcttatagcaaatctaatcaattaaagttattatcctaagagaaaactttttctttctcttacattatttgaacaagcaaattctgttcttagagggaaagcacagaagtcatggcaacataacatcaattaagttagagcaaagatatgcagacttagtttaggctatagaaatattccatggacggccgggcgcggtggctcacgcctgtaatcccagcactttgggaggccgaggcgggcagatcatgaggtcaggagattgagaccatcctggctaacacggtgaaacgctatctctactaaaaatacaaaaaaattagctgggtgtagtggcgggcgcctgtagtcccagctactccagaggctgaggccggagaatggcgtgaacccgggaggcggagcttgcagtgagctgagattgcaccactgcactccagcctgggcgactgagtgagactccgtctcaaaaaaaaaaaaaaaaaaaaattctatggacacagggaggggaacatcacacatcggagcctgtggaagggtggggggcaaggggagggagagcattaggacaaatacctaatgcatgcgaggcttaaaacctagataacacgttgatgggtgcagcaaaccaccacgatgcatataggtatacctatgtaacaaacctgcacgttctgcacatgtatcccagaacttaaagtataataaaaatttttttaaaaagtattcctataaatgttttgtacactgttttttaattgcttatctatagaaaataatgtaacaatttctggtagcttttaaaggagagttgaaggaactgtgattcttgaatgaatgttttcagttttaaccaagagaataaatgtgatgaaaaataataagatatttgaaaaagataagacaaacaacacgttactgttggggctaaagagaacctaaattcaaagtttgcatgaaatatggtcagctgctaagatgaaacaaagatttattattgctcagtccaaagagaaaactgaaatgatatttataagtgtagtgatgagcaggttggatctagcaggggaaatgtagttgtatagtagtggtcacaggcaagagattttcccctatcatgtcttgaacgtggttcattggttcatgcccacctggccattggttcatacccaactaactttctagaaataaacatgacctagaaataaaatataaggtccattttaacatgttttcttctgtctgtaacacctgcaaaaacaaaagatataaaaatatgtagacattaagacagtatcttttttagtggattacacttatttgttgcagttattaattatttccgtaatatatgttgcttttttcttttttctttcttttttttttttttttttttaagataggagtcttcctctgtcaccagggctggagtgcagtggcatgatcttggctcactgcaacctccaccttccaggttgaagtgattctcgggcttcagcctcctgagtagttgggattacaggcacctgccaccacacctggctaatttttttatttttagtagagacgatgttgcactatgttggccaggctggtcttgaactcctgacctcaggtgatctgcctgccttggcctcccaaagtgctgggattacaggcatgagctactgcgcccagccgataatatatgttgcatttcattaaaaacttggtgttcataagtgaatgctactgatacttggctttatggaaatctctttttagtattgactagtcacccagaagattaaaacatggcagctagacaggcaatgtcaatcctttcaaatcaatttacttactggagattttaagtaatttaagcaaagcatcccctctaggcaggaagcccagctgtgattgtgaaatgacattattttcaccttgcatttaattgaaagcagctcccttctagtcctggcacattgctttcacccttttcttagaggcactggagaacaagtaactattgcttcttgcagcacaatgttgtatgcctgtgattctctgtcctagtttacttaccacaggatgtaacaaattatccaaaataggatgtaaaattttcaaatcaataaaaaattaatgtatcacttgttactttcagaaataaaatggaggttaggaaatcaaaccccttgatgtatgtgataaagtgttacaaaatatcaaatgattcactttgctatttgtgagtttctatcactctttttttttttttttgccactaattgcaaaataactcatataaacctgggtttctcaagcaatgttctcctagatgtgtaggacgaaggctatattggtatgaataggtagtaattctgagcctgttctggaagaccccattcccctgcagagtttggtagggctcacatacccgcagtggtggtggccattaatgaccaattctgcctttgagtgctccacttgcgctactctcacttctggctcctggtgcttaggactgctgtcccctctccctgccttaccagttcctattgtggacattaaggagtgaatttggtcaggcagcttgtgcaggtcagtgtcccagaggcaggtctacagctctagcgggtccagtcccagtggacctttctgctaattgtgtccagcctttccattcttgaattactgacctgcgataaaaaatgatggcgcccttaccacattctagcaaaaaggtcaacagtcatttaccagttctgtgatcttaacactagttaccttgtttataactgagcatgataatgatgagtacctcataggactgttaggaggattaaatgagatactatgaaaaaagccttaaccagtgccagcacttgctagtgctcaatacattttagatatttacttgtagttactgttgtggctcctactataatattgactttgttttgtacttcttggtgtctaactcaatcagctttttctcttaagtcagtttctagactgatagttctttttaaatgcatctgttcttcattttcatagttacatgtatgtcctctgtaggttttctgtttccattcagttttggggtgaaatatgatagcagcatgaggagctccactcctggtctaaatgaataagcttatattatctctttcttaactttgctccttaactctttgtattctgttacctgctttcataattttcctggaacttcttaaacctcattggtaatttcaaagctaaatttcattaatcatttctcagattttgttcatactgattcgttgcactataaaaaaggatttaaattttttttctaatattcactttttttgttttgttttacaaattctcctccctatcccctcccctacttccctctctccctccctccctccctccctccctccctccctccctccttccttccttccttccttccttccttccttcctttcctccctccctccctccctccctccttcttccttcttcttccttctttttgcttcttcttgagacagtgtcttactatgttgaccgtgctggactcgaattcctgggctcaagcaatccttctgcctcaaccttctgattatttcgactacgggtgtgcgccaccatgcctggcttagaaaaggactttatgttgaacctcttttctcttacaatcaaataataaattcattgagtcatactattagcgagtcgcagtgcttggtgcgggtgtagaggaatggaatgatgaccaagacatggtccctgtcttcagtatcttgagatattgagcactcagggaaagaaaaatgggcacaaaactataatgcaaagtaaaatgtgtagagcacaaaggagaaataaataccaaaacaaggggatgagagaaagctttcaaatcatagtggtagttactggaataactttaggaattcccaggctgcttggagaatatgagaatgtgcatctgcttggtcccttcagaaaactgtcagtgtgacagatgggagggtgaaaaagagggaaaagctagaatctgttggggttaaattggagttcattttgaagcattaaaaataattgaaattctgatatattttacctgtatagaaagggacaggaaataatatgagaaataataatagtggggtgacccatcatccatatttaacgtttgttaacatttcgccacaagtgttcatattgctttctctctctttttcaaaaaaactattttttagaacccttttagatgtggcagtttttcagactttccttgtttttgataactttacaattttgaggagtatcatatctccctacaatcctcttgcatgtggcagtttttcagactttccttgtttttgataactttacaattttgaggagtatcatatctccctagaatcctcttggatgtggcagtttttcagactttccttgtttttgataaccttaacaattttgaggagtaccagtcaagaattttttagactatcgcttaattgagatttgtttgatattcttcttatgattttctgggattttgagtttttgggaggaagaccacagaggtcaagtgccatttttgtcatgacataataccaacttatcactgttgatattgaccttgatcccctggcagagagagtgttgatcaggtttcttcactgtaaagttaccctttacttcctcatactgtgctcttgggaaggagttcgctttgcacaggctgcacttaaggaatgaagctttgtttcctcttgtggaaataaatgaggaccatctaaatgagaacaagtaaaggctatttattcaaagcctcccataacaaaggagtcagccatcatcacttgtgtttggcagagacttggaggcagtcagaggagtaggaacgctttattgtagaaaaaagggaaagcagctgggcatggtggttcatgcctataatcctagcactttgggaggccaaggtgggcggatcacctgaagttaggagtttgagactagcctgaccaacatggagaaaccctgtgtctagtaaaaatacaaaattagctgggcgtggtggtgcatgcctgtaatctcagctactcgggagactgaggcaggagaatcgtttgaacccaggaggcagaggttgcagtgagccgagatcgcgccattgcactccagcctgggcaacaagagtgaaactttgtctcaaaaaacaaaataaaacaaaacaaaacaaaacaaaaacaacaaaaaaaggaaagctatgttatagagaaagggaaagctccaggtaggccctgtttggaggctgctgacgtggagagggtggaacatcctgtgttattgattagtggtacatattttgctttctccagcaagtcttaatttaaaagtgggtacagaaattagggaagctgttagttactggtcaagtcctgactgttgggctaattgttacataagttttgtgcttagtcagtttaggctactctaacaaatataccatagggctcagtggcttcaacaacaaacatttattacgtacagttctggaggctgggaagtgcaagattaaggggctggaagatcctgtgtctggagggcttgcttcctggtttgcagatggccttctccttgtgtcctcacatggaagagagcagagagaggaagcaagctttctcgtgtctcttcttataagggaactaatctcatttacagagcactccatcgtcatgacctaattacctcccaaaagccccagctccaggtaccatcacagtggggattaggcttcaatgtatgaattttggagtgacacaaatattcagtccatagcattgtggtttggctttctggactgattgttgtaggttgtgagtcagagttctatttttatatatggtctggtcattacctgtttgtatattcactctttcacccacctcaaaggtagtgttctatatcaattattttgaattcttctgcatgggagatttgtctcttctctcccactatttttttttattttttggagggactggttctttatttcaaaaagacatttgtcaatattcagtatcaaaacagttgcactattgatttctctttctcccaattggacccaaagagaccacatcaaaggagagtacattttaagccagtaagctgcaggatgtacacctaacagacctcctagaaaccttaccagaaaatggggactcggtagggaaagaaactttaaaaaatcagtaaactgccagcccacagagtgcagaggctgtcacagccaggtgggatggccagggtgtcacaaacccaaagaagcaaagtttaaaaataatataaaatttaaaaagttttgtacataagctattcaagatttctgcagcactgactgatacaaagcacaatgagatggcacttttagagacagcagcttcaaacccagaaaagggtaatgagtttcacatggctgaatcagtggcaaaaacataatcatctttctttcaaggaggcaggaaagcaattaagtggtcacctcaacataagggtcacatgatccattctgtaagcagttgggagggggtagagatgggacaaaaatttggtctcagagttcttacatcctgatttggtcaattctaatgaaaaaaaaaataagaaaaaagaaataatgttgtccaaaggtatattaaagctgaaaacttgaacagcacatttttgtttgtttttgttgttatttggctaactcctcctggaatcacctttctggtttagctggtactttgtacagagcaatgaggtttccaatagtggagtctttccctgggctctgtttggctctcagtaaggcaggcctataccttttcttctctatggagcgggcaatatgcattaagctgaaaagtcaccttccaaaagtgagaaaaggattagattgctgcttcagggctgtggaattacttggaatgttttacaaatggttgctacaaagcaacaaaaaaggtaatcacaaatgtgtacatcacaatatgccttttaaagacattatgcattgtgctcacattcccttaaatgttgtttccaaaggtgctcagcctctagcccagctggaatctccgggaagaggcagagacagtttggggaaaaagacacaggggaggagcgggaggcaaaagcggaaagcagccttccagttaaagatcagtcctcagttaaaggtcagcttcaggcaggctggcctcaggcagagtcagggtcagagggaggagcagcagcagggtgggactgggctttctacatctcattcaggtcaagcagagtctggaccagcatcttttgtgtacagaggcgctgtcctttggtgcatttgagtttatcttccaggtcttcaattgtattttccagcttggctaccgatctctcagcaaacccatcacgggcctctccctccttgaatttatcagtaagaatcttgatctctttctcatatttgtcttctttttgagagtacttttcttcagcaggactcagacacttcagattctggtccatcagtctgatctgctcatccatctctcggcaacggtactctgccagctcagtttgttcctctgtgcgttccaagtctctttcaatgatcaccaacttatgagctacctcttcatatttcctatttgcctcttctgcaatgtgcttagcttctttgagttgaatttcctggagttccatcttttcttcatcttttaagggctggttttcaataaacttcatacctctctcactctcatcagcagttttttccgcttcttccagcttttgcagggcagtggctgggcgctcctgagcacagtccagcttctcatgaaccagctggatcctacggttcaaggaggccacctcagcctcagcctgttcctgggaacacctttctccctcaacttctcactggagacgatcagctcgctcctctgcatcatctgcctgctgctgcagaacctggatattgcccttaaccgcctcgatggtggtgatcccagccatggtgcccactcagctactgctcgcactccgattcctgcctcctctgcttggtgttgcagcctcctctccctcacccatttgtttattcacttatccattcatttgtttatagcagtatggattcatggatatttattttatacaggttataatccaatactactttatttcattgttcacatttttccagttttggtccatcgagagctctgctgcttggcttctgtgttcctttgacatactcccatgatagtgggtttttcttttgagaatttccttactttttagcactacaagatgttctaggctcatcttgtgtatttcttgtcctctgtctctctctctctttattgattggttaattgagacaagctcttgtgctatcacccaggctggagtgcagtggcacaatcatggctttttgcagccttgacctcccaggctcaagcaatccttccatctcagcctcccgagtagctgggactacacatgtgtgccaccacgtcagactactttttaactttttgtaaagatggggtctccccatgttgcccagactgacctcaaactcctgggctcaagcgatgctactgccttggcctcccaaggtgttgggattacaggtgtgagcactgctcctggcctctctgtttttaaaaataaactgttacctagacaggtaaaggtactcctacatccctttccccacatgttttctttattggtaaccattgtcctgaagttggtattgttcccatgtatttaatgtattcatcaataatgtatagttattttgtgagttttaaaaatgtacatgatagactactgcccatacccttctgcaacttgtttctattatcaaacattatgtttatgagatcttcccatgttgtagatatacttaatttaattgttatatagtatttcattgcatgagtataccatggcatatccattttaccataaataggtaaattaatgctgcatggacctctttacacatgtatttgatttatcaagggaaagtgttatcaatagtaatgggatcaactagggaaagtttggaaatttgtgggggacattttattttttaaatttttacatatttcttttttcttcaggaaatgccagcaggaggaatattttcaattattgattgggagagccttattgacattgggagagggtgaggacaaaggatgtatgatgacctgtgacgtgtgtgtctgcctttctcccatataatttttaaatatccccctcaggtattcttgtacttaaaaattctttgtatgatgatctgactctagaacctccattttgtctataaaaccaaagtatttttggcatggttttagtatatgctttttcttttcttttctttttttttttttgagacagagcctcactgtgtcgcccaggctggagtgcagtggcgtgatctcggctcactgcaagctccgcctcctgggttcacgacattctccttcctgcctcagcctcccaagtagctgggactacaggcatctgccaccacgcccagctaattttttgtatttttagtagagacggggtttcaccgtgttagccaggatggtctcgatctcctgacctcgtgatccacctgcctcggtctcccaaagtgctgggattacaggcgtgagccactgcgccgggccttttctttttgaatttaaactatcatgcacattgagggaagagtttactttgttcggaaattttaccaagttccgaacaaagtaacacacttgtatcatcctgcatttgtaggttttgcattcatgatgacagtatataggagtgcaaatgtctgtttacttcattaaatcctctaccaaagtcatgaaaaaatttgcatttttaatataattatattttctaaatagggccaggactaaggtgaggcaagtgaggttgcttaggtgcaaaatttgaggagatacaaatgcaagtgtcctgcaagtgcaggttcagtactttcactactttgcctgcttaaattttgcaccctaagcaccttgcttgcctcatctcaattctgccctgattataagtaatattttatgtatttttttcatattttagttaggctattgcattagtccattttcatactgctgtgaagaaatacccgagactgggtaatttataaagaaaaagaggtttaatggactcacagttccacatggctgaggaggcttcatagtcatggcagaaggcgaaggaggagcaaaggcatgtcttacatggtagcaggcaagagagcgtgtgcaggggaactgccctttataaaaccatcagatctcatgaaacttattcactatcacaacagcatgggaaaaacccacccccatgattcaattacctcccactaagtccctcccatgacacatgaggattatgggagctacaattaaagatgagatttggatggggacacagccaaaccatatcagatattatgggggttttttgaaaacaatttttttttttgagatggaatctcgctttgtctcccaggctagagtgcagtggcatgatcttggctcactgcagcctccacctcccgggttcaagcggttctccttccttagtctcccgagtagctgggattacaggtgcctggctccacacctggctcatttttgtatttttactagagacagagtttcatcatgttggccaggctggtcttgaactcctgacctcaagtgatctgcctgccttggcctcctaaagtgctggaattacaggcatgaaccaccatgcccagccttttttttttttctttgaaatttatatggattaggtagattatctattatgtttgttatagaatagaaaaagggtgtttcagataatttcctttaaaaggaaatattagatctgattggtctgagaaccactgctttaggacacatacttggaagtgccgtttgctgggccatatgagcatcttcaactttactgggtattgccagattcctttacagaatggttgtctcagtcagagattgctgtagtgatgctacattaaaagaaacaaggctgggcatggtggctcacacctgtaatcccagcactttgggaggccgaggcaggcagatcacctgaggtcaggagttcgagaccagcctggccaacatggtgaaaccccttctctactaaaacatacaaaaaaaattagctgggcgtggtggcaggagcctgcaatctcagctacttgggaggctgagggagagaattgcctgaacccaggagacggagtttgcagtgagccgagatcaggccactacactccagcctgggtgacagagcaagactctctcaaacaacaacaataacaacaacaacaacaaaccccaaaagaccccaagttcaaaactcagtggcttcatatagtaagtatttatttttccctgtcaacctgtgggtagattgcaacaaaaattagctgggcaggattctggacttcaggcactgagctccagtctgcaggttggattgaggttgggttcaggtctgctccatgtctctcattctcttggactaacagttacctaggacatgttttcctcatggaaagtggcagaagcaaaagaagccaagtggaaatatgtaaaacctcatgtgggccatacatagaactgacttgctgtcatttttgctcacatttcatggaccccagcttgtcacaaggccaagcccaacatccgtgaggtagggctatatattctgtatattctagtgaatggtactgcaaagttatctggcaatgatgtggattagaattctagtacagggagggtgtgaagaattatgaataatgattcagtttaccacatggttgtaccattatatacctcaccagtaatagatgcaaactcctgtttctcaacatcttcactagtcttgatgttacccaacttcaacattcttgctagtttgatgagtgttaaatgacattgttattttaattttcatttccaattatataggtctttcaaaatactatctattcattttaaaagattagttttagcctccactctaaagtcagttagaataaggaggctttttgtgatgaaaataaaaatttggaatctgagattatgatagttataatcagttgctcactttggctaccaattaattaatttgtttttcttttgcttaagtaatgtcagatattctgaggaccattaaaatgtctagactctgttctccaagggccctgttctaacattctgattctgtgtatatgatgcattcgtaattttctttccatgtaataatctaattttattgaccccactaagtaagtaaggtgtaggcattatattccaaactactctttcaaaagtgtgactgtactgcaaaaaatgcagatgttgtgggtttcaataaatggatttctggtatgtttctctgggaagaatgcttcctgtttattggcactcctctaatgtggaggcaggtcttgctggagagctgcattcaagtgagggaggggtgggaaggaagaaaggcacccacagagcttctgccttgtaaatataatctaatttgtgctgggatcagacagatcagtccaagagtggtagtatttttttatgtttttatatatttttttattttgagacaaggtttcactgttttgccaggctggagtgcagtggcacgatcttggctcattgcaccctctgcctcccaggttcaagcaattctcctgcctcagcctcccaagtaggtgggactacaggcatgtgccaccacgcccagctaatttttttgtatctttagtagagacagagtttcaccatgttggtcaggatggtctcgatctcttgacctcatgattcgtccggccttggcctcccaaagttctgggattacaggcgtgagccaccgcgcccggccgagtggtggtatttttaaagaagcacaggccatacctgaaaaaacaataaaaattgaaaaggaatttctttctatactgttatttcttaaaggagatacaattcataaccccagtaacatttccagagccctcctctggcttctacttctcatttctcacttctctcctcagttctctctcctgtgcctggtcagtggagcttttaccattctcattctcatctgctcagctgagcttggctgaatcattccatgggccagcctcatatccttctggccagcctcatatcttttggtaaaacatggagacttacatgacattttcagagaagaaccatagttgaggaaggccaggccagtgtctgtggaacaatgtctctcttaccagataagaaagaagttgcttcctgacttgcaggtgtgaagttttctgatatcccccgatttccttttcccaggaggcaccagcttccacaggatttggagaggatgtattctacttctggtatcttagaatccagaatcttgaaagacaacagaggagatcaaagatagaatggaccaattacattctagaaaaggctgttgactagaactttgtttagggatagtgggataaattaaatgcttcaatatacattatggagattattatgactgacaaagatagggcactatattcaaatgaaggtcgtagcaggaaacatatcatacattctatctatctatctatctatctaatctatctatctagagacagtctttctctgttgcccagactggagtgcagtggcataatcttggctcactgcaaacctacagctcccaggttcaagcgattctcgtgcctcagcctccgagtagctgggactacaggcatgcaccaccaggtccagctaattttttgtatttttagtagagacagagttttgctatgttgcccaggctagtctcaaactcctgagctcaggtgatctgcctgccttggcctcccaaagtgctaagattacaggtgtgagccactgcgcctggcccaaatcatgcattcaaattggcaactgaagaaaatttaataaaaggctatttacagaggtattggcaggataataataaagaatgttttattggtaacaaaggatagcacagtaccctggagtaagcagcagaagggagccatgaccatccttgggcacagctctaaaacctggggaggcagccatgtggaaaggctgtggccttcagtggagagacatagccaatctgtgcattgggagcctggagaaaacgctctgtgcctatttttctcccaccctattaatcccctgttggggtctttcattggctgaacccaaccagaagcctagggcaagcagcagggaaagtggaaggggagggacaaatggaaaaataactagcagaagacattttctctgactcattgaaatatttttttgtttcactgtctcttttcctaacaagaggcatttctcaagattccatttacagcagtcttcttgtcttatgctgtatctttcaataagcttgtgtaaatgaaagtgagatctttctcctttctgtcctctcccaacttccaggtttgcattttcaattgcctgttgtatattttcactaaggcataggttactagctctatctcttccttttaacagagtgcaatttctcttcaaggctcttaatagtcttcatcttttctttcctttatatacgttaagttactaaatcccattaactttgtattgccttaatctctctttgcttcctacttctgcctttatttcaacacttataatcttattacagtaatctcccaactggtcttcctgcctctaatctctcctaatctatcctatatgctgggatattgcttgcaaattctttaatgtctttctattgcctagcaaatgaaatagagacacctaaacctaatatcctaggccttctaccgtgagcgccactgcatgtttctggcttgatactcactgcttttcttcatacaccatgctccattcaaagtatgctttactaaatgtaactttattatatttatcatgctcatattccttttttctttttcttttgtttctctttttttttttttttttggagacagagtctcactctgtcgcatgggctggagtgcagtgctgcgatctcggctcactgcaacctccggctcctggattcaagcaattcccctgcctcagcctcccgagtaactgggattacaggtacccatcacaactcccggcgaatttttgcatttttagtagagacggagtttcgccatgttggccaggctcgtctccaattcctggcctcaaatgatatgcccgcctcgcctcccaaagtgctgggattatagccatgagccaccacgcccagcattcatattcctgatcaccttaaaaattcttcacttttgttgtcatggaggccagatgagtcatctgcaagttagacacctgtagtttatctgagtccgaacacttcctaatatcccacattcgaagtgtcccacataatcaatataccctattggctccttagtctccttgtcctgtggctccttcacaggagcttcacttttccctcgagagttttactcgatgcttgatggtgcatcctggcttggaagcccctggactttgacatgctctgggtcttttcccctcagtgcatgtttgtctacaagctgagctcttccagctgctgttgtcacaagaaacagctggcagtctatatggaggcctctgtagcattcctcactcacctttaagttaaaattgttattttaaaataatttcaaatttgtagaaaagttgaaagtacagtacagttttttcttccagaaccattagatgctgatgtggtactttatcactttgaaatactttagtgtatatttcatacaaacaaagatgttcttcaaaataaccacagtatactcatcaaaataagaaattaattagatttgttaatcagaaattggtacagtgacaccatctaattctgtcgattctatgcaagttttgccaatggttacaatatgctttacagcaaaataattcagttcacaatcatgccttccatttagtagccgtgtctctccagactcctttttttctgcaaaagttcctcaatttttccttaactttagtgaccttgaccttgatagttttgatgaatacatgccagttattttgtagaataccattcaatttgaatttgttcagtagttttgtttttttttttaaatagacaatcttgctctgtcacccaggctggagtgcagtggtgtgatcatggctcactgcagcctcgacctcccaggctcaagtgatcctccccctcagcttcccaagtagctgggtccacaggcacatgccaccacacccagctaatttttttgtaatttttgtagagctgggttctcactattttgcccaggctggtctcaaactcctgggctttagtgatgctcccacctcggcctcccaaaatgccaggattataggtatgaaccactgcacctggcctcaatggttcctcatgattgaattcaggttatgtaggtacccttggctgtgatgatgctatgtttttctcatagaatcctatcaggtagcaaatgatttttcttggtcccattattgattattctcattgtgattacttgactaagatggtgtctgtgaggattctctattatattctattctcttttgtagataacaagcatttttgtggaaacactttgaaactgtaaattctttatcagacgcttaatgtacagtcatgtgttgcttaatgacaatccctcctttctggaatacctcctgaaggacctgcttgaagctgttttacagtgagctaagtaggagtacactctaaaataatgataaaagtgtagtaaatacataaaccaggaatatagtcatttattatccttttcaagtgtactgtactgtacataattatatgtgctatactttatttaattggaagctgcagtaggttacaaaagtgagtaattatttgtgctacagtgttataatggctgcaaaatcattaggtgataggaatctttcagttccattttaatcttttggtatataatcttggcagtaggttacaaagtgagtaattagttgtgctacagtgttacaatggctgcaacatcattaggtgataggaacctttcagttccactttaatcttttggtatataatcttgcactgtttaacgtggtctgtcattgacagatatgttgttatgtggtgcatgactgtattcatttacttctgctgctgctgctgctgctgcttcttctttttacttcttttttgttttgttttgttttgttttttgagatagacttttgctcttgttgcctaggctggagttctatggtgcaatcttggctcactgcaccctccgcctcccaggttcaagtgattctcctgcctcagcttcctgagtagctaggattacgggcatgcaccatcacgcccggctaattttgtatttttagtggagatggggtttctccatgtcggtcaggctggtctcgaactcccaacttcaggtgatccgcctgcctcggcctccccatttacttctttaaaccagtgtagactcctgcttttctgttgtattcagtgggatatagcctatttttactaacattattttaatactcaaattgtcctagatttggcccatgggagccccttcaagctaacttctctatccttttgacatgtccctattattcttggaggacttgattactttctaagatgtcccagtctcatcttgcacttttcctgttccattcttggaatcagcagtttctctgaggatccctttttcattttagtggagaaaaatatttagaagccaagatctgggcacaaggtatacttgttgccattgaggagttgctgttcccagtcctctcaggggagagtaagggaatatatgtatatattcatatatagatctatgcacttttacatgtatatatatattttttgtttttgagatggagtttcactcttgttgcccaggctggagtgcaatggtgcagtctcagctcactgcaacctccgcctcccaggttcaagcgattctcctgcctgagcctcccaagtagctgggattacaggcatatgccaccacgcctggctaattttgtattttgagtagagatgtggtttcatcatattggccaagctggtcttgaactcttgacctcaggtgatctgcccaccttggcctcccaaagtgctgggattacaggtgtgagccaccacgcccagccacgtatattgtttttatatctagttcttatctatctctcttgaaattataagttcatattgatatcgcagatcctcatctaatctctctgtttccttcttttcatatttgttcatttcctgaaaatcagaaatgtgggtcccattatccttaatatatttacttatttgcttaacccatctgtatgtaaccagtatctcttaatatcccccctcacctcactctggctctgatatcacatgcttgggttttgaaaccacatgctgagcatcctcctcagaggccttgctcagttgtctgggctccagcacccaatatcctctacatccatcccccttcccctaggggatgcctccttatacacactgggctctgacaccacatgcagcctgccccctgttcttataccctcctttctctgcttgggccatgacaccctaagcagggctgccgcatgcatcgatgctgtcctcaccttgctgagtctcagtgccgctaccaacccccactgtctgtcttcacccaagcatagatacctacctcgcttggccccacctatgactttagaactatgtaggaaggggaagacaaagaggaggtgggcccacctttatgattgattctcctctcacccctttctctttcttgctacctttaagaaaatccaaataatatattaatcagttactacatacttaaagtttttggtctcattcttggttccaaagtcatgtcctctttcattaagctaagctctcatctatttgtcacatcctttggttcttaaggtgatatcgatcaaattatgtgaagatgtaaggccttgaagaaaccttgcaaaccttgccacaaagagcatgtctattggaaagcagcagtttgaatgctagctccagtttgcacgtatttatgtcagctgtgtgtgtgtgtgtgtgtgtgtgtgtgtgtctatctgtctgagaaagaagagaaacttttgaaattgggctgaataatttataaaggactcccttgttgtgatagtctttaaacatccccagatctggcctgtcaatctgagacttctcagcctccataactgcaagaaataaattccttttctttataaattacctagtttcaggtattctattatgagcaacagaaaatagactaatacaggctctgttttcttttaagatggcagcagtctggttaatcctaaagtctgtgggattatctgttatacaatagcgcatctctcttttccatgttggggtcggttacgtgtgccctaaactaagtgctcagtgagtttctgtgcacttcttctattgtattacttaattttttcccaaggacccagtaatagatggcagggggtggggtagatgaggagatgactctatcacttaatgtctgtatgacttaggatacattatttaatacgtgagggtcagttttctcatttgtacagtggggattttaataactttcttaccctgttcctgtgagggttaaatgagatacaacatatgtaaatatgcccaacacatgtgcagagtcagtgctcaatataggcatttgctttcctctactatgggtttaagattcatgcaaggatgttaaaacagctcaatctggactgttctcatgaccattcagacttaatatttaccctaaaactggcattacccttgatttagtcatgacgtgattattaaatttgttaaaaaaattgggtcctgtataagaactgcccatgatttggattttggcaggtaatttagctgtaccatcaatggtaactgtttatccagagtaattctttctaccactagatggtgcttgtccatatatttgtgaggctctcctatataaagttacataatttggggtaaaacacatcttgttgacctttgagaattgtatagtggtattgatactcatgttcaccttgttgatgagatgtttttaagggtaaaatttagggtaggatttgatgaaaatttaaaagtttggatcactttgtttacccatagcattcccaagtcctaagtataagatatttactaaaaaaatgatgagatgggaagaattaatgtgggtaatatggtattcgtatttttgaaatgtgtgcgaaattggacctaggctagttcatgaatttgttagaagtatcaagataattaagcaacctgtaggcccacataatttcctcttgatttttcaatatgaacagaaaagcttagcagacatttcacactcaaatgtactagtagtggatagtcaacatcacatacaactcagagtatgcatcatttgaagtatggtgacatcaaaaaatataaagcaatttttgttttactttctgaacaaattcaacaagcaaattcaacgtgcctcacatggggctacagagatgagacatagtcccttctttcatgaagttaggaataattaattgtgtttgactgaggttagctggtataatagagattgtgtgggatcagaggaaaaggtgatcagaatttgtgttatgcaactattttagatgagctgtgaggaaatccctgctagagatttgctactctgtgctttccacaaatagctgacatagccagtttggaaataaatactttggtgatttattttattttactttatttcattttgagacagagtctcgctctgttgctgaggctggagtgtagtagcatgatcttggctcattgcaacctccgcctcccaggttcaagcgactcttatgtcgcagcctcgcaagtagctgggattacaggcatgcaccaccatgcctggctaatatttgtatttttagtacagatgaggttttgccatgttggccaggctggtctcaaactcctgacctccagtgatctacccaccttggcctcccaaagtgctgggactacagatgtgagccaccacgcccagcgtgataattttaattttcagaatttctcaacactaagagcattctgggttgtgtgagtagagtctattttagttgaaagtgggatgattctgctgtttcattctaactgtaagtggaaaggaggggaggagatgggactggtggtgaattgagagttgaggggtactgaagcagagtcaatgagttgagaggtggtggtcatgtaggataaggggttttatttgtaagcaacagaaactgactctattttaaggaaaagtgaaaaattttcagaatctaataaaaagctgaaaaattcagtttcagaaaggacaaaatcaagagcattttcagggatttaggtagtaggaaataataaatcattttctgagaatgccactgtaagaataaatggattccagctgcttcagtttttttcttttattatttaaaaaaatcactgataaataccatattctttgcagacagcataagtaccaatcccagttgacatcagatgaaatggggaaggctagtgtgagggaaaagaggagcaggttttggcggaaagactagttttggatgtcagtggaagagattcaaatattcaaattgagatattgggtaggtagttggatatgtgagtctggaggtagagagagagagatttcagataggtggtatttaaagtcatgggattagatatggttactaaagaagtgagtatacatgagagtccttaaattgcatggtggggctttccaacccaaagaggatgggaggaagaagaaccggcaaaggagactgagaaggatgattaagaacttctgctgctgggcctttaagtgagaattcatgtgtgtgttcaaattctctgagccctttcacatagtctgcctatccacattcttaatctccaacctttgtgctaccaatccttcagtccagctttttcagcaggacattagacattgctcaggaatttatatagattctgatcctatggcttttcttctggcagacaaagtaagaagatgtattatttgaagactctctcttcttcattattctcagtcaccccaaagaagagctataagcagtaaatgagtactggcatgtcacatagagccatcaaaatgggctgggtatttttcatctttaagtatctaactgggttctgggtgagtccccatgaactggtatatgtttgaggcacaggagtagacttactgggtgtgcacatcctattatgcaacgtcctgggcctttgggcctgctgtggcatcactggcttggctgttcaaggctgcagcaagaaaactgctcctcttttgacgttctttgcctagtcccagattcttgtcactaaaaattggcctctgatttggttcctgactctgcatcacaccctgaacttcagacatactgattttccatgagattgctcttggcaccagtcccttcacttatattggccacatttcttcagagtaatttctgacctttttattggcttagatacctcaaaggaaagaaacctattatcaggggcttctcttgttcacgtctggcatcagtctctctttggtaccagaaatcacccactgtgaataaaccttttttcttcttttgacacggagtctcactctgttccccaggctggagtgcaatggggcaatctcggctcactgcaaccttggccttccaggttcaagcaattctcctgcctcagcctcccgagtagctgggattacagacgcctaccaccatgcccgactactaatttttgtgtttttggtagagacagggttttgccatgttggccaggctgatctcgaactcctgacctcaagtagtccacctgcattggccttccaaagtgctgggattacaggcgtgagccactgcacccagcccaccttttcttattttccaaaaattttctagccagtcctaatataatgaatcatttttctcctttgctagttcaggagtactggctgaactagttaaattaacccctattatgacttgtaaaaatccaaactgcttgaaacatttatataattctataggaggcctcctattttcctgaatcagcccatatctcagctacattagttgctttgatgaacttggaggtcagagtgtttacgtggatctctttggagtaatgttggtagaaaattaggttttgagtttacccacttttataaaatggaatgtttattgatatttttaaaatgacactgagggatattttctcttctgctttctttcattaaactggttcgcttgaagccaatattttagcagtctgctgcatttagtttttactgtatttttcagagagtcctttaacattgttatatacagatttcatagtcatttatttttaaattttattataaagctaattcatctttgcagaccagtgtattttaataatattatgatcactagagggcactctttaaaagataaagcagatttttttcatttctcgatttttgaaatctatgtgatcatagctattgaaataattgaaggtagtgattaaaatgattgttgtgttctgattaaatatggaagcataaatcataatctataaaggataccgaaaatactttaaataatcaaccaaatacaggaatggagatgttgttacttgaattgactatccaacttgcctcagactgaacttccaaaatgcacacttttaacatgacagacttggacactaatgctgtgaaacatatatatatttttaaaattcagcaaatagcaaatacctactgagggtttatgatgctctaggctccctagaggacacaaaaatgatttagatacaacccttgtccacagcgaatgtatgatctagcatagaggtatccaacagaaatatgatatacaagccacacatgagccacatatgaaattctagaagacacattaacaaagagaaacagataaaatcaatttttgtactgccttttatataaccccatatattcaagatattatcatttcaaaatgtattgaatataaaaattattaatgagatatttacaggttgtttttggtattgagtctgaaatgcagtgtgtactttacatttctagcacatcttcccttgcattggccacatttcaagtgctcagtagccatatgtagctcgtgctacccttttggacagtgcagctctgggtcccttcacagctgtggagctcacctttttcactaggctgcatcctggagatttaggtaatagcctgtcaatcttcattgaggtatcatttatatatgaagaaattcacccattgtagtgtgcaattctgttaccccctctcttttaaacagcatctgttcttattccaaggatataacatcttatctctctgagttttttttttttgttttgttggttgtttttgtcagtattttgttagaaattttcctcaaatgaggctgtaatcccagcactttgggaggctgaggtgggaggattgcttgagtccgggagtttgagaccagcatgggcaacatagtgagacccccatctctaaaaaaattttttaattagctgggcatggtgacatgtacctgtagtcctagctgctcaggaggctgaggtgggaggatcatttgagcccaggagttcaaggttacagtgaagtttgattgtgccagtgcactctagcctaggtgacagagtgataccctctctccaaaaaaaaatttttttttccttgtgtctggtgatccttgattgatagaaaaccatatgtatgtgtgtgtgttatgtggcatagattggtgattaaccatgtttttgtttgtttgtttttgagacagagtctcgctctgttgcccaggctggagtgcagtggcacgatctcggctcactgcatcctctgcctcccgggttcaagtgattctcctgcctcagcctcctgagtagctgggactacacatgccaccacacccggctaattttttgtatttttagtagagatggggtttcaccatgttagccaggattatctcaatctctggaccttgtgatccacctgccttggcctcccaaagtgctgagattacaggtgtgagccaccacgcccggccggtgattaacctttgatttctctgtagagtgagtgagtaagtgaatgagtaaaaatgagtaatttctccttcagctttcctctttatcctgcttggaccgttttctttctattctgggtaaactcattccttttacttttgactagctctgcttgtgcctaggaatcaatccccttcctctaaggggttagtgttgttttgttttgttctgttgtatgcacacaggggaaacaacattttaaaaaatgttataatggtccaggttgttataattccactgaaaaaaataaaagatggtagaagttaggtggattactttctctttgtgatataatttgcagtatacaagcataggttgaactatctattctgtgtactttcctttagaaagctgcatacccatactcttttcaggtttctaattaaatgtcaccttctaagttcagctttccatgaccctttaaaattgtaaatccccttccatacccatctatatacctggcactgactgttcctttttcttgctttgttactattttttagttgcacttaccattatctgacacaccatatactttactaatgtctttccctccccaaaatgagaatggaaaatttaaaaagtagactttaaaattaatgtaacattcatacagaaaagagcagatattctaagtttaaagcttggtgaattttcattaagtgacacatagatttgattaccgtgtcccagatcaagaaacagaacattaccagtactgagaggccttccatatgccccttcctatcactaaccctgacccaaatccctcctcaaaggtttgttcgttctcgttgcattggtttgcatagtactccattgtatgatcacattttatttatctattatacttttgatgtatatttgggtggtttccagttggacctattatgaatagttagtattttgttttgaaaaagcctgaaaggttcctaggctactactttttccaccctgacacatgcctcctttgaggcattaagcagggctctctgcttgaatgtggggaggcagaaatgttattcagccatgtattagtctgttttcatgctactgataaagatatgcccaagacttggaagaaaaagaggtttaattggacttacagttcctcatggcaggggaggcttcagaatcatggggggaggcaaaaggcacttcttacatggtggcggcaagagaaaatgaggaagatgcaaaagcagaaacccctcataaaaccatcagatcttgtgagacttgttcactaccaagagaacaatatgggtgaaaccgcccccatgattcaaattatctcctactgacaccctcccacaacacgtgggaattagaagagtacaattcaagatgagatttgggtggggacacagagccaaaccatatcatttcacctctggcctctccaaatttcatgtcctcacatttcaaaaccaatcatgccttcccaacagtcccccaaagtcttaactcatttcagcattaacccaaaagtccacagtccaaagttacatctgagacaaggcaaatcccttctgcctatgagcctgtaaagtcaaaagcaagctaattacgtcctagtacagatgttgggtaaatacagccattccaatgggagaaattggccaaaacaaaggggttacagggcccaaccaagtctaaaatctagtggggcagtcaaattttaaagctccaaaatgatctcctttgactccaggtctcacatcccggtcacactgatgcaagaggtgggttcccatggccttgggcagctctgcccccatggctttgcaaggtactgcctctctcccactgctttcatgggctggtgttgagtgtctgtggctgttccaggttcatgatgcaaactgtaggtggagctactattctggggtctggagaacagtggccctcttttcacagctccactaggcagagcaccagtagggactctatgtgagggctctgacccttcatttcccttctgcactgccctagcagaggttctccatgagagccctatacctgcagtgaacttctgcctgggcatccaggcatctccatacgtcttctgaaatctacgtggtttcccaaaccccaattcttgacttctgtgcatctgcaggttcaacaccatgtggaagcttccaaggcttgggcttgcatcctctgaagccatggcctgagctttatactggcccctttcagtcacggctggagcagctgggatgcagggcacaaagtccctagactgcacacagcacgggaccctggcccctgcccatgaaaccatttcttcctcctagacctccaggtctgtgatgagagaggctgccgcaaaggtctctgacataccctggagacattttccccattgtcttggagatgaacattcggctcctcattacttatgcaaatatctgcagttggcttgaatttctcctcagaaaatgggattttctattggcattgtcaggttgcaaattttctgaagttttatgctctgcttcccttttaaaatggaatgcttttaacagcacccaagtcacccttgaatgctttgctgcttagaagtttcttctgctggataccctaaattatctcccttaagttcaaagttccacaaatctcttaggcaggggcaaagtgccgccagtctctttggtaaaacataataagagtcgcctttgctccagttcccaaattcctcatttccatctgagatgacctcagtctggactttattgtccatatcgctatcagcattttgggcaaagccactcaacaagtctctgggaagttccagtctttcccacattttcctgtcttcttctgagccttccaaactgtttcagcctctgcctgttacccagttccgaagtcacttccacattttcaggtatctttttagcaacgccccactctactggcaacaatgtactgtattagtttgttttcacactgctgataaagacatacctgaggctgggaagaaaaagaagtttaattggacttacaattccacatggctggggaggcctcagaatcatggcaggaggcaaaaggcacttcttacatggcagcagaaagagaaaatgaggaagatgcaaaaacggaaacccctgatagaaccatcgtatctcgtaagacttgttcactaccatgggaacagtatggggaaaacggcccccatgattcaaattacctcccaccggctccctcccacaacacgtggggattatgggagtacaattcaagatgagatttgggtggggacacagagccaaaccatatcaaaccatatttgcattctccactaatagagctccttgagaacagaaatcttgacttaatcatcttggaaacttcagtgtttggcatgggccaggagcataataatctaaagactatttctgagggatcacatcagcttttattctcagaatagataccagagctaggggaaatagagtttatttagaaggatcagggatgaaattgagactcaccatgtagaaacttcacaactagcaataagagaggttctaaatacattgaaggcagaaatgtggctaaggaatcagtagtgtactttgattgtattgtataaggtattttcaaatagaaaagcaggtagcagaaatactaaaagaattttttgctttagtgtaaagtagataatgagaggtagatgcctaatttcttagttttctttttaaaattatgctaaaatatatcatatcatttaccattttgactattttaaaagtatacagttccgtggcattaagtacattcacattgttatgcagtcgtcaccactgtttatctctagaactttttcattttcaccaactgaaacgttgtacccattccaccaactcctccttccaccttcctgctaacccttggcaatcaccgttctactttctctctctatgaatttgactacactaggagcctaatttaagaggaatcatgtaatatttatccttttatgactaacttatttcacttaatataatgtcttcaagattctaaaattttctgttgaagcaaatagactggaggatggtttgaggttgattaataaataaaaaatacttcactctctgagattcaaagacatctttccaaaagcatcaaggaaacttaaaggcataattaattatttgccaaaatatataatgtttaactgaccggtgatttttatgcacaataaataatagaatcattgactaaggaaacaactataaatctttggggaaagaaagcctgatttttatggtagaatctactagatatgtctgggagggtataattacctccaaacaaggataaaccaatggacgcaatgtttttagattaaaagaaaatctttagtgatatttttctactcaagactattaaaaatgaattcattaaccattcgagggaatacttcgacattggaggagttctctcttagagaccataataaaaaagagaagtatttagctgtggaacatgaagtgctaacagtggtttttctgttgggaaattgatgctgggaatatgtgtaatgtaaaatgaatgactagagattgcatgatgtaccagtccttttctgttcgctctttcatacttacttttcactcttttttttaccgtttccttctttcctgggaggtaatcaggatcgactttttcagtcaaatgtcttgcatgcctctgtattctggttgggtttagcccatgggaggaagcctggtaggagattgggggacttaaggagagtgacttatctggctgtgctccttcaccaaagcctgtgccctttctacacctttattaaattctcctcaaaatcttctgagtgcagtatctgctttctgatatgacctaagtaatacacataacaaaatctagtacatagatggaagacagaaaagaatcaccaacccaagagatattagtcttgtctttgctcttactcataagagacaaaataatctctatgcctttgccctttgacaaatgaggaatagtaaccatccccgtcctagggttgttttatggtaatgtacatatatacatatctaagtttacctgaaagctttctaaaacagactaccaccaatgaaaggcattattattaacactcatcaccagtgtgaaataccaagtgaggagaataaactcttcatggtgaggtgatatgatgggctagaggtgacatacaagctataaatggccagggctggcacttattgggagcccatgggaagcaatcctgagtgagaaggaagctgttttacagaatgtcttggatgatgctgcagactgtaatgtctagtgtttttcttagtttgactgtgcttgccccttcctcattcctgctattcagctcctgatatggatcataactttgagtatgtccaggaattgcaaactcagatgcctacctacagtaggtgtgagctatttgttccagtcagttgttgctgtgagggaatgtgggttatctgtgcaccatatcttctaacttttcaaggaaagttgaaaacgtcaatttttatatgaagtttcccaatttacaaatgttagcaactaattaaaattttaaaaattgtgtttgggctgaaaagacacatgtttgagctagatatgacctgtgggctgccagcttttaatctctgctacatggccatcttggatttcctagtgactttataggattagactagagttcctaccccttcttacctccataacaaactgatgtgtcttccactttttggtttctggtgttaactcttgcagattccccgtttttttttttttttttgagacggagtcttgctctgtcgtccaggttggagtgcagtggcacagtctcagctcactgcaacctccacctcctgggttcaagtgattctccttcctcagcctcccgagtagctgggactacaggcatgtgccaccacacccggctaattttttgtatttttagtagagatggggtttcactgtgttaggatggtttcaatctcctgacctcatgatccacccacctcggcctcccaaagtgctgggattacaggcgtgagccactatgcccggccaattcccagttctttatgttcaatacttgtcacatccaaatgtgtgggaatgcactctgggaaacactgtctaggaaattgagctaatacctctgccaattcttatagatgctgatctgctgatagataatataaacttgttagtgctgcttcatcttatcaggcttgcttaggtggctacagtctcttcgtaaccaggcagtttaggaatctgttatgttccctactccagtccattagttgtcattttctgaataggtgcattcttctttattaatatgcagagaccagaaagttacctagtctgatttaaatattttagtgtttcctcatggtgcaaatgaataactcccttttgccaaagtaggtgataaaattgcctagatgacatttagatactatttacactttctagtatacaactgaatggacatatatagctgatgtttttcaaatttgtgtccataaaacattagttctggagacatgaatgtcttctataagaaaaggattcgatagccagtaggagaaatatcccataccctatgaccttctagaagagtcacaaggcagatttgcttggaaaagaattgtgtccggaattcgtgggttcttggtctcgctgacttcaagaatgaagccacggaccctcatggtgagcgttacagttcacaaaggtggcgtgtccagagtttgttccttctgatgttcggatgtgttctgagtttcttccttctggtgggttcatggtctcgctggctcaggagtgaaactgcagaccttcgcagtgagtgttacagctcataaaggtagtgccgacccaaagagtgagcagcagcaagatttattgcaaagagcaaaagaacaaagcttccacagtgtggaaggggacccgagtgggttgccactgctggctcgggcagcctacttttattcccttatctgaccccacccacatcctgctgattggcccattttacagagagctgattggtctgttttacagggagctgattggtctgttttgacaggttgctgattggtgcgtttacaatccctgagctagacacaaaagttctccaagtccccactagattagctagacacagagcactgattggtgcatttacaaaccttgagctagacacagggtgctgattggtgtgtttacaaaccttgagctagacacagagtgctgattggtgtatttacaatcctttagctagacataaagattctccaagtctccactagattagctagacacagagcactgattggtgcatttacaaaccttgagctagacacagggtgctgattggtgtgtttacaaaccttgagctagacacagagtgctgattggtgtatttacaggcccttagctagacataaaggtgctccaagtccccaccagattagctagatacagagtgctgactgttacatttacaaaccttgagctagatacagagtgctgattggtgtatctacaatcccttagctagacataaaggttcttcaagtccccaccagactcaggagcccagctggcttcacctagtggatcccgcactggggctgcaggtggagctgcctgctagtcccatgccgtgtgccctcgctcctcagcacttggacggtcgatgggaccaggtgccgtggagcggggcgcggtgcttgtcggggatgctcgggctgcacaggagcccatggaggcaggggggaggctcgggcatggcaggctgcaggtcctgagccctgcccactggggagtcagctgaggcccagcgagaattcgagcgtagcgctggcgggccggcactgctgggggacccggcgcaccctctgcagctgctggcctgggtgctaagcccctcactgccctgggccggcagcgccggctggccactctgagtgtggggcccgccgagcccacacccacccggaactcacactggcccgcaagtgccgtgtgcagccctggttcctgcctgcacctctccctccacacctccccgcaagccgagggagctggctccggcctcggccagccctgagaggggctcccacggtgcagcggcgggctgaagggcccctcaagcgcggccagagtgggcaccaaggccgaggaggtgccgagagtgagcaagggctgcgagggctgccagcacactgtcacctctcagaatgaggagttctgttgtaaggaaacagttaactttgtttaatccagaaactgagtcattcatttatatgccaactatttattgagcatttactatgtgccagacactttgcttttcttccaggacatactgtcctcatggaacttatgttctggtgagaaaaactgataatggagaactaagcgaatatgtaaattccttatacatcatgagtaaatagtgggaagaaactaaacagggagctgtgatagagaataatgggcatatattgaacttaagtggtcaggaaaggcctctgtaagggaggtgactgagacctaaagaatgagaacaagctatctctctgcactatcaggggaagaatgtttcaggcagaaggaacagtaagggcaaaagtaaccttagcaaaatactttgtgtccctactatgtgctaggcattttgcatgataatcttttatcaattaatttttcagttgagaaccttggcttaccatgcaaccagcctaaggtcctagagcatgtcaacttgtggtggaacgtggttggaactcagacatgcttgtgctatatactgccttccaaattgcttgagattgaaatatctttccttctttctttttttcaatagtaggcctcctaataagcttaggtacacgaaattggagaactctggtatacaaggaattataacagaattagaattactgctgtcatcttagagtttcaaatagtagagaggtagaaaaatatttttacagctttattaaatactttttcaggaacttatatactaagcatcttagatacttggagttcagccttcagggccccttcttgggcacaattccaaggtttagtaagtgcacaaacaacaaaccctatgaggaaaagtatccagtaacagaaaagaaaatggaacagctctgaatttgggaggagcaaatagacatcatacctctgtggccctcaaaggccacgcagagcattgtgagtgatggcataccagccactggacattcttcttttgttaataaaacaaggttttgcccttagaagatgatatctagaagggaaagaaaggttagtcatgttcctagtatcatttcacttatcaacattatcttttaggacactttgtttagaagatactgtaagagaactgatccattctgtagatactaaataacttggtctactgttgacatttctgtttttaattttgcttgtgcctagaattttctttcttttttttttttttttttttgagacagagtctcgctgtgtcacccagactggagtgcagtggcgcaatctcagctcactgcaagcttcatctcctgggttcacgccattctcctgcctcagcctcccaagtagctgggactacaggtgcctgccaccacgcccagctaattttttgtattttttagtagagatggggtttcaccgtgttagccaggatggtctcgatctcctgacctcgtgatccacccacctcagcctcccaaagtgctgggattacaggcgtgagccactgcgcccagcctagaattttcttttaaagccaaatatcaaaaagtgtttggagatgaaccgtggactgtgtaagtactttctgttactgacactgaagaattctgtctttgctgcaaactaccctcaaaatggcaatgagttggtggcaggtcatatgcttaggaagtttttagagcagcgttgtccaatagaactttctgcaataatggaaatgtcctgtaatacagtgtctgttgagctcatgtggctagtgtgactgaggaagtgaatatttaattttaattaatttaaatttagccatttatagctagtggctaccatattgaatagcacaggctttgagataactttaatacctttatgaggtatttaatacctttatgaggggagaaacaagtgaccaaaaagcaaagtgatctttgagactttgaagcagcttgttcgagagcctgtttagaggttaggcctatatcccacatcatctttatttgcatctccagttacttctgtagtctatcaaagtaattgcattattaggagaagctttttcagagctttgtgtgacttaagatcgcagggaaatacatatgaaggttgcgtggcagtactgccatgtggaaatgtgggtgtgggctttgccttgttgcaatgacttgttagtgctactggccataatacctgggaggccagggatattgactgtaatattatcctgcctaaaataccaataacaccctcattgagaagtattgctggatctttttgatggtaagagttattaaaatttagaaattccagaactcaaagaattatttcttctctgaaaaacccagacatctggtagacattctctgaagcttctggatgtttttctgtattgtagcctatggcattgtgaatctaagatgctttttgagcaccagacaattagtagaacattttaatgttgtggttggataacactgaaaaagccattgacatttgttttgagcagcagcagtgaaaccggcaccttatctcatgtgcacaaaaatccatgtagatgatttaaaaactgctgtgctgccgatgaagggaagaaagcaggaggtctaatcatcgtcaactgaaacctcacctaagtagtattcgcctgcctccactttaaaagacaaattaaactacttgtagtattatgtagaagaatgtatgtatttgtatatttccaaatttaaagtctaccttttgcctgaaaaaaacatagaaaagaaaactaccaatactaagtatagttgagtggttttcctgctgttttctattatggtccctggagctcaggtgtccattttcatgggaaggaacctttcacttgataaatgagctggaaaaagggggtttatgtctgtgtgagctgcagaaaggactagtagttagtaaggtgataaaattgcaggatcaggcaatgatactttcagaagcaatcactgcaggctgtcaacagagcttacaaacctttgaggttgttcctgggccaaccttggaagaaggtatatcttatgtaattgtcattgtaaccagagaacatttttgatacagtttagtgttattatctttttttgtaattatgggtgatagattgataattgcattaatatcattacagggggtatatttaaaaaaaagtggctgatttttcttattcttccctccaataccatagtaatggcaggatccttttgttgttccacaaagataatctgatgtctattttgtctacagacaaaatataataaaagtacatgggaaagtacatggacaagacattatgtgttatgaacatactttctttttaaaatgttttattggccaggcgtggtggctcacgcctgtaatcccaacactttgggaggctgaggcggacggatcacgaggtcaagagatcaagaccatcctggccaacaatggtgaaaccccatctctactaaaaatacaaaaaaatgtagctgggcatggtggtgcatgcctatagtcccagctactcgggaggctgaggcaggagaattgcttgaacctgggatgtggaggttgcagtgagccgaggtcgcgccactgtactccagcctgggcgacagagcaagactctgtctcaaataaagtaaaataaaataaaatactttatttattttatatattttttagagacaggtctctctgtgctgtccaggttggtcttgatctcctaggcttaaatgatcctcctacctcagcctctcgagtagctgagactgtgagaatgcaacaccatgcccagccttatgaatatacactcttaaacactaacgtttgtctaagtaattttaactggagatgaactaagacccattattttaggatttcaaggttctaatacaatattattatttttacacagcatttgttgtgtttaaaagtttcattaattacctccagttaatagcatgatatattttcaatgcaatctgtttcaaattgatcagatatatagaatctctggtaacctcctaaggattgtagttgaggctgtgtgtgtgtgtgtgtgtgtgtgtgtttgtatgtatgtgtgttaaaggcagaatctcttcactatgaaccactgaatgaagaaattatgcaaattaataataacaaaatctgtttatgattttatatgattaagacaacatgaaattagatgcatctactgaattttttttccttttttttttttttttttttttttttgagatggagtttttgctctagttgcccaggctggagtgcaagggccaatctcggctcactgctaactctgcctcccaggttcaagcaattcttctgcttcagcctcctgagtagctgggattacaggcacccacaaccgtgcccagctaattttttgtatttttagtagagacaggttttcaccatgttggccaggctggtctcgaactcctgccctcaggtgatccacctgcctcagcctcccaaagtgctgggattacaggcgtgagccaccacgccaagcctgaattagttttttagaatgtgtgtattattattattttttttttgagacaaggtcttactctgtcgcccaggctagagtgcagtgtcatgagccccacctgggcccaagtgatctttccatctcagcctcccaagtagctaagactataggtgtgcaccaccatacctggctaatttttctttatttttctgagacacagtctcactctgtcgcccaggctagagtgcagtggcccaatcttggcacattgcaacctctgactcctgggttcaagcaattctcctgcctcagcctcctgagtagctgggactacaggcgcacaccaccacacctggctaatttttgtatttttagtaaagatggggtttcaccatgttgaacaggctggtcttgaactcctgacctcaggtgatccacccaaagggctgggattacaagcgtgagccactgcgcctggccatgcctggctaatttttgtataactttgggagagatgggggtttcgccatgttgcccaggctagtcttgacctcctgggctcaagtgatcctcctgcctcagcctcccaaagtgctagcattagagcgtgagccaccatacctgacgaatgtgtatatcttttccttgtggtgtactgaaggacttttttaagaaaatgtttcataggaaggggttttgagttgttcaaaggacaacttttgaatgagttgtctgtaggctgcaattattgctaatttgattcatgtgacatggagggtgtctttgcagggtgactacaatctgttcagagttctctccttcatttttcattgtctctacaactcagagatcagaatttctcaaaatgagaatgagactgccattgtctgttgtctaccttttaaattgaaaagactaaattttatggtatcccattaaaaatcctatttaggttttttcttttttgaaaagttttttttacattgatatggatgaatgccaattagtatggatcacacatttttgacagaaaaatatgttgacttgatccagatggaaaatgattatcttttggatatgtaacagtaaaattgttaaattagggagaagaaaccccattttctgaaaatgatttcttggacattgataatcagagatgtaagttgatagctacagagttctttgaccttgccttcgtgttatccacttggctctgaattgtaccatttcatcatgggtaagtctctggagagaaagcatgaaatgttcaacttgtttaatctcaacaattcggaaatatgctgtatatgttgaaaataaatgaggtaggcggatcatatgaggtcaggagttcgagaccagcctggctaacatggcgaaaccccatctctactaaaaatactaaaattagtcgggtgtggtggcagatgcctgtagtcccagctacttgggaggctgagaccagagaattgcttgatcccgggaggcggaggttgcagtgagcctagatcacaccactgcactccagcctggacgacagagcaacaccctgtctcaaaataaataaataaatacatacatacataaaataaaaataaaaataaaatgactacgaactctcatttttctcctgtaatactttagaggtaaatgctttagaataattttaaaataatacctcatttctaaaaatataggttatagcaatgatgacaaagataacttatcttccatggaatattttggatagaacaaaacatttatgatgctttaatctgtatttgtatgaataaaatttgattcaagtggaattaggagtaatgggaacttagcatgttttatgtggaaacttagcatgttttatgttttcgttttgttagctatttttaaaatatggctgtgtttaaatatattgctactgcataatgcctagaagtccacaggcctctgtattttgttccttatgatatcatctgttctcaatgcactacttttttttaaagaaagatatacacattcctagaatcttttacattcccagtgaaatgccaagacaggtctgtcaaatctaattttacagaagtggaatgtatttgtcaatattttataatattgacaaaaataacttaatttttttttcttcattttatgtatcacttcttgtgacttgtgagaacaaatttttgatgttaacaagtcacatgtaagtttaaaatctaatattattttaacattgtacagaacaggaatatctaaaggctgttgttcctaaggctagcccagtttcagtccacttcacttacagccatctcctgtgatggtaagccacaaatgtcccctgttttcctctctgccttcatattgattattactaatgtaaaaatatttccaatttttacaaatagttatgtgtgtcaggttttaatgaaatgctaaaggacattactaatagaccccaagagattccgtttcttcttcgcctgtcacacttcctgcccaagtgctgatggactgtggaaacaatgactaccatggaccactgtttgaagatgtagtatgctgaattcccagacatcaacttaaaaataaattctgctcatgaaaagtatgcagggcatgtttctgcttaaaaaaatgtcctgggaaaaaatctaaattgaattcagaagatagagtaccatgtaaaagagtggccaagttataggaagtatttattttttatctttaattaggtattttaacattcaaaaagctaatgcattttgtttcttagacataaataaatacgtagatcataaatagaaatgtttcagagatgttttatttaagagagtcaacaatagtaattaaattaatactaataaataatgctagctcctgacactttaccattgacactttcaccagtatcttacatgaacctcatagcaactcatagctcatgtctgtgaaaactgaggcacagagttgcctaaagaaggctccaaagtggattttgctttaattccagtactttttccacctgatacctttttcatggttgatttatagtagagtcaatgtgtcttttgaaagaacagtgtccatatcttattggaaatagtaaagctttcaaaagagagcagttgttatgaatctgtcatcctcttacttccatctttaaagtttcaacagttcactctttccttcttaccatccttgtgttttcagaatgctatcaccagtcagtagcagtgtagcatgactacctattctgaatggtttgtaccctttcttagacttcaggagttgctttctactcaagctagttcaattgttgactcaacaagcattgctaggcattagatgtaacagcacaatgtttattccttctttatatttttatgtctttttattcacaattaaaatttgtataagctttgcataattgccatttaaagttaatatttttcaacaaatgtaagaacagaaatatacctaattcctaccaaacttttataattagtttagccagttattctgaccctaaccatatagaggcacaccttgttttgatgcactttgctttattctgccttgcagatactgcacttcttataaattgaaggtttgtggcaaccctgcattgagcatctgtcgtgccatttttccaatggcacatgctcacttcatgtctctgactcacattttggtaattcttacaatatttcaaaccttttcattattatatctgttatggtgagctgtgatcagtgatctttgatgttagtattgtagttgttttggggtgccgcaaaccacatccatataagacagagagcttaattgataagtgtgtgtgttctggctgctccattgacctacccttctctagtttctctccctctctttcgaccttcctaatccctgagacacaatattgaaattaggccaattaataaccctacagtgacttataagtgttcaagtgaaaggaagagtcatatgcctctcactttaaatcaaaagctagaaatgattaagcttaatgacgaaggcatgtcaaaagctgacataggccagaagctaggcctcttgtgccagttagccaagatatggatgcgagggaaaaattcttgaaggaaatgtaaagtgctactccaatgaacacacaaatgtaacagaatgaaacagctttattgcttatatggagaaagttagagtggtctgatagaaaatcaaaccagccataacattcccttaagccgaagtctaatttagagcaaggaactctctttaatttcttcaggggttctatgaaggctgagagaggtgaggaagctgcagaggaacgctttgaagctagcagaggttggtttatttggtttagtgaaagaagccatctgcataacataaaagtgcaaggtaaagtacaagtgttaatgtagaagctgcagcaaattatcaagaaggtctagctgagatacctgatgaaggtggctacactcaacaacagattttcagtgtaggtgaaaacagtgttatattggaggaagatgccatctaggcctttcatagctggagagaagtcaatgcctggcttcaaagcttcacaggacaggctgactgtcttcttaggagctcatgctcacattgccatgcaaccagtcttcagaattcttttcattttacgaaactgaagttctgtacccattaaacaactccccattttcttcttcctcctgcctctggcaatcaccattctactttctgtctctatgaatttgaagtctatagttgcacaggcacaaatgtctgtctctagaaacattttccaagtaatacacttcactacattttctcttagaatcacctatatctgtgttaaaactgtaagaatctgtgttaaaattttaagaatgtagcagttgtcttgattagaaatatattttcaatagcctttcaaaaaaccagagacaaaaaagcagagaggaaattatctgcttcttatctgaaggctaatgacaaaaaaagtcatccatgtgaactttaatagaaatctgccgaaacccttaatgaggtaggtatcatgatcagcgtaactcattacagaattgttgtattttagagctagaaaaaaacctcagaaataattttaagttcttcatttcataaatgaagtgatactgttgtgaaatgtctaaccaaattaattaactgtgcagttaggattgtagtctgtttcttgtttctcaagaattccctttcagcaattgttggtgaacagggtcagattttctcagacaaactagctattacttgtgttctacactatgagtatgttttatagaaagttttcctggcttataatataattgaagagacttggaaatcttagcccatgatttccatttttatataatcttcaagggctagagatgtatgtggattggaggtatgtggttttccttatctgggaaagtagttgacaatttctcagaaattgagcatttatcaccagttctaatgtgatagggaatgaggtattgttcatagtatcatcagaaatgaagggaattgggatgaaacttttcttgaatttctgaccctgatgcaatcaggcagttgttgatggattccattatcttcgtgagtcttgtcaatggcagagacctaattgaagattagagctcttgcagagaaaggtcaaatcaaccacagtaaatattgttgaacagggtttggcaaactgtagcccatgggctgcctgtttctgtgagatttataagctaactttttttttaacatttttaaatcgctgaaaaattttcaaaagaatacgtcatgatatgtgaacattacaagaaatttaatttcaaagtttataaataaagttttattggaacatggctacattaatttatgtattgtttatgactatttttgcactgaaacaatagagtagttgtgacagagaacagatggtcccacaaaatctaaactgtttactatttggccctttataaaaaggatttgccagctcctgctagaaaacattgagaatgatttgttttgtagtaccatggaaatttgtgatcttctttgcttacctagaactgcagctgtatgctacagctaagaaattccttaaagaacttctccactttttttttgtttttttttttttgtttttggcctctgggacaacccacactagtccattcatgactattttttatgactttctttgcttattttccagtggttccttttgccaatcatgtgaacagaccaaaaccacacaggaaggtctgtggtttgcctaaagaagcttttctacagagggatatgtctggcttgggtacctccctgtttgttgtacaaacctatagtttgattctgatcattacactagagctttgattcaaatgtatataaaatgaccatcactgtcaggatgtaaaatgaataagcatatttattgttggattcatatttgtaggacgaaaatcttaatctttcttatttttatcaggcattttagtaactttagtaatgtttctcatgactgctaattatacatcaagattaattgctatatttttttttaattggctaaccttaaacacataaacccaatgtccttttttatagtcatcttctgatagagttaaaacatcagtgatagggagaccacacagcacctcttataaaagttatttacctcctttttccagctgtggttacttgattttagttctcttgaggccactgtaagaagggagtggccctacaaccatgtaagagatctgtgctttgcagccactgagaaccggggatcctgccactattgccaccatccttttaaagcataacaacaaacaggtgttgtgtatccagaaagagcccttatctgaaggtttggagtttggttaagcagatcttttattatgttttactcatgcgtttggtcataattatgcttttgtgctcaataaggatgattgttatctgtgaaagtaactgacaatttctcagaaccattgccttggttctaggttctaggtagctagtaactagtctggttagtgccatggagaatgtggagcactggtctgggtcatgatattgagttgagtagctgaattctctcctcacttcatagggtagttcttttatctggttagtgctagatgctcatctgtcttagcttacttaaattttgaggtcttgggagtagagcccagtaatgggaggagctgggcatacgctctaggaatcttctgcatccagataatcctttttttagtggagtcttctcacattttgggataggccatgaggtagacttggggctcagtaagcaaagccaatgaggatgacaaaacatgaaaaggaaatgctgatgcagatgcaggctggagtgggtggtaagaggcctgggagagcagcaagatgagatatcttagataatgtttgttctgacttagtaataaggtgaaattgggatgtgacataaccttaaggcattttgacttagctctcacatgttggtgagaattgagactagagggaaaaccccctattttcatttctgaaatgcagaaaaatagagtgaacatttataatccaaccctggtattttaaaacatgtgtaataacaaagtcggttattgtataatttggaaatgcgatgtaagatattatgataaagctgtgattttctgatttaagagggaagagtgaagtggaagccatgctcgttctcctctgaggagggtagaggaccgtggactcgcgtggcaggcactagtccagggagggaagccatgaaagagaaagagaggagagctatgtctcagcccctgagctgtcctctatgaaaagcttcacactctgtgtccagctgtctcaatcaagtcctggaagaatggtctccttcagaagctttattgctggcacccaggccacattgtcctaagaggtgtgacccaccaggtcatgagccatgaaccctctagtaggcagatcctccaacagtttaagtattttgtgtgtgtgtgtgtgtgttaatgtgtgtgtgtgtatctgtctacttaccaccaggctgagttactgggggtctgcctagaaaggaacagtgtccctgtaaacaggaggaggctccccagaacatcagcatccaacataaacacgctgaattaggacaatacatcctggctcctttgaggaggggctgttcccaaagccctggcaggatagaagaggggacagtgggggctagaaaaggagtaggtatcagcaggagttacttgagttttctcctctgactgtaattggtttaaagtagagtccaagattattaaagttggactagatcttagggattttccagttccacctcctcattttaccagtgaaggaacagatacatacaggggttctagaatttatcttagatcagagaggtaatgagtggccgtgttggctagactccaggtctcttgattcagtaatgattctttctccaacctggatcacgaagggttaaattgtagcaggactctgggatgggattcaggggtgccaaatgctataagtacaacccactgctgtctcaggaaattgtggttaggatagtggtccctagaacaggtgacccgagaagaacttctgacttaggtgaacgttatacgttttggagaggactatgatgtgattgtttgggaagggggcatctaggcatatcagcaagtctcacttgctgagagtgagatggagatagagaaaattctttgagaggtgggtggagggatctagttgaaggctctcctgttgagctttgaatttatagtcagtgtttatagagtctaggcaagtagtatctactgtgacatttggagaactgaaaagtagagtgggatttagtggttactgagtgtgccttgggtaggacaggtccttttatggttgtagctttctgcacttgagtacttatttctgctttactggctaatgccactctcattttaagctatcacaatgactaaacattatccctttcattctgattctctgttcaattttttcatatgttggaattgatcatagaatatagaaagaatttttatgaattcggaactgaactgtttggcccactgtagatttggttttattggaaagaacctagttttttgaaattttttttttttttttggcttccgtatgatcacctactctacacaggcagtattgtgtactggttaagcacaaggattctgagctagaggctactccagttgaatcctggctctgatcttagataagttgtttatcctccatgcctcagttcttcatctctaaaatggggataatacctcctagggtcgttttaagggttaaataggttaatacatgaattagaacaatgcctggtacacacaaagtgctatttacatattagctgttaatacattccaagcattgatctaggccttttgtcaatttataagtaaaccaaggctcagagaggtttaaaaacttgcttaatgaagataatctatctagtaagtaagtaaaccaaggctcagagaggtttaaaaacttgcttaattaagataatctatctagtatgtaagtaaaccaaggctcagagaggtttaaaaacttgcttaattaggataatctatgtagtaagtggctgagatgggagttgaatcttctctgactaaacttggcttttctgtttgctaagcctggcttttaacccctctgctggatttctgaggtatggcaaatcacttaactataagtaggttgtaggttttatatctatctactcatctgtccatcggtcttatactttctaatttagatatttcattatgttttcattccattaataaaatgcatttccttaaaatatctgtctcttaagaattataaaatacacagcataaaaataaaaagtcttaaaataatgctactcagataattagataagtgctttaaaaatccatgctaactactaaattgtgaaaagcataaaatgttattccaggtgatatttgataatggcagtcagcgtttccacacacttgtaagttttgtgtaaatgtaggtagttattatcaggcattttgagcttactattttaaaacaatcataacattaatgttctaaccatttgcacatcttaattatcaggaagaaattatatcaaattgttacaacttgtggaaggcttcccaatctgtaccctaggttaagataaagagaattaaggcctaataaatgagataggctcacttagcaacagtgacaggtgaagttgatgagaattaacagcttttgactgtagcagattggtggtataatgagctctgcttatggtaaggaagcactgattagacgactgagtgaaatggtactttcttatttattttataaaattattggagatggctgggcgaggtggctcacgcctgtaatcccaacactttgagaggctgaggcgggcggataacctaaggttaggagttcgagatcagcctagccaatgtggcgaaaccccatttctactaaaaatacaaaaattagctgggtgtgatgttgcatgcctgtagtcccagctactctattcaggaggctgaggcaggagaattgcttgaacccaggaggcagaggctgcagtgaggcgagatcacgccactgcactccagcctgagcgacagagtgagactccgccaaaaataaataaaaataagtaaataagtaaataaaattattggagagatctgttaagtgataatagtaatcctagaatttgtagaatttgtattacgcacttttgatattgtattgaaaattcaaaatcacattttatagcattgtcaactttataatttcttttggagaaacctgttcagtggaaaggaaagtagcaaaagcaaaaccaaacaccccactactccagcaaaagcattctaaacagttagtacctcatcttcttcaaagtggtggtaatttggtagtggtggagggtgggggttggaaattgtccaaccattcaggttgcttacaaaaaaagataaaaaaagtaaaaatttatttatgtttcgtcttttggcaaggtaaataattgtatcaagatgaagtagccattgttaaagtttatttaaagtataagctaggatatgctcaagattggcaatggaggaaaaagatggctcagggtatgtggcaatgtgacattaaagattacatcagatatagtgtgtctcagtaatgaccatatgtcctttccagctgatgtctattttaggacttggataaatgagttggaggtcttagatatgctataaaggactgttcttgcatcacctttattaggtttgttttcacattagtcaaatgtatttcaaatggacaaatggataaaatatgcatatgtactatcaaatgaatgaatgtaatgacaaaattgagacaaaaatttggacgctgattcctttcaggttatgtggcttctttcatatcattgagtactaggaagaagtatggatatcttgtgtccttttcacttacaggaataaaataatttattttttctcttatttagagttttaacctaaaaccaaaatttagttttaacctaataattaatacaggagggaaatgggagtaaataacagttattttctgagagacatttctaaggacgactttaaaagaccaggcaaaggagagcagagcccagccgttgccgcttgagagagataagcagaagtgtgggtgtgcttcatgtcacatggcaggaggcttccccagaacggttcgtcagtccagggagccgtttcattttctggctgatagagttgtacttggaaaatactcagtttcctgcttactgcttcattatggattatacaggtaaaattaaatgttaaatattttccagttatgtagaattactttaaaaataatattttgaatttatattttaaaaactacattgattgtgtgagtactttaaaaatattgtgcatcagtttattcctgagtattgtatgaatttgttttatccaaattgtgattaatttaggataagtgcttaagggaatttctgagacatacctttgttgtttcttccatttcagttggatcatacttaaatggacttaaactccaacccatagttaatccacatttctcccctcttaggccagaggatttaaagtacaaacatctgagttcagattattccacacagggaataaaatatgtacacagtctacagagagtttctgttattgtggtggtggttttgtgcttgtgtattgctcttttagatggtgttaatgtaatgaagtgaattggagaatttcagtttttatcctaaattttctgagtataaatgtgcccagatttttctgaccttttctgacctttctaaccttttccttttttaaattgcatagacttgtttctcaatctctagtttcactgaatggtaaattggtacatgtttagaaataaggttagattaaccatgggtggtggttacttgatgagtaagtgggcgattcccttacatctggtagggtaaaggtgtgggtgggaggtgaagcagtgatcaggtagggacatgagtctttgcccaaaatttgtgcacccaattcagaattatattgccctaaatttgaacttttggggaatggcgacattgtttgctgacagattgcttttaaactaaagaacgaagaattggaaaattttttttctagggcagagagaggccacttttcatacccagtgtaatataaattccagtgtgcatccggattgaactctacttacacagtatctataaattataactgtaggtggatctttggcaagacagttaattacagtgtgcaaataaaagttttgtgaaattgctcatttaaaatatagcttttaggagcttgctatttaaaggacttctgtggtagatactttttgaagataaaacattttaaagcaattaattgccccaaaagatttgttttataaatctttagtattctatgttagggtttctttaaagcaagtatacctgtatctgtgtcttgtgtgtgcattttgattttcttttcctcataagattagcatgccagaatttttgttccagggctctgaaataaaatgcacccacctttttagaaggttcgctttatgtgtggtactacattgaagcaggaaggaacacattttagccatatgcagagaaatcaaatttgtaaaatcctaccacagagctttactatgagtatgcttttagttataaatttgtacctcctcccacaaagaacaccatcattgaagaattctttcattttctatagtttgtatattgccattaaaacatttgttgttcttaagtaatactttatatatgtataattgatagtttaagatgtacagccttaacattctaaatagacatcaagagaatcctaagaaactaagaactttagtgtgaacaaaggaggtgactttaaggaaattcacatgacactttcaaatttagttgtgtgtgctgtagagaaaaaaatatggtttaagttcttaccacattaataaatacattaattaaattacctgtctgatgtggtgagaagcccttttgaatgttgtctttcatagtgatttttataaacatttacacattcattgcaaagatagctatatttaatctattaaactttgaagagaacaactcatgttttcagttcatggcagagtgatttttttgtattagaaaagagcatttattttgctttcagcacaatcacttttgtactaatggcatcattatagcactgaaggggatatctttcaaaactgatatttgatgattcaagaacagatttattattaaaataatttaaggggcccaaaacacttctattaaggcctttgcatgaaacactcttccttccacgtggttttcaggctaaccatgtggttttttcaggtcttgttgaaatgtcacctttttagagtggcctttcctgataattttacctaaaataaccttctcatgcaattactccttatcctctaattcctctttatctttgttcatcacatataccatcacttgacacgtcacgtgtttgtttctctgtctcactcactaagatacaagcttcataggggagggactctgttcatggctgatgcctagagtgtagaacagtaagctcccagaaaatagttgttgagtgaatgcttgataggctttcctttaaaagtgactgttgactgactttaagattttcgctataattgttctttgtcaatagcattctcatttaatgattattattttgaccactaaactactttgaatgttttccttcctttcgttgctaactttatctagaaattaacagcactgtctttactgtgaaggaagggcaaggttgcaggcaggggtattcagacagagtggttaagccaaagatcactttgggtttggattgtattatatgactttttttttggaggggggttagtaagggatatcagatcagttttattcatccttcatttttcttcattacattttctttagacaacatattaaactttgtgttccttctctgagctgactagaggagagaactggaatgaactaaacttttggaatcattttggtcaaagatgggtcttcaacaatgtggatccaaacgttctaaagtggttagaaatgcctcaggcctccacataacagaaatcttcataggagtcagagggtgtgatttgtgtccggttttcctggcaagtgagatgcctgatgtttttagcatactgatcctgttacagttgtctaaaaagtagacttaaaaaaatcacagcctttaactcttagaagcctgtgccaagaagtaaatataggccctcagaaaaatgcattttcatacacatatacacaccctctcatgtatgagccaacaaaaggagcaacataaatgagtcggcaaagcagttattacatgtagaccatggcctctgtttgaaaatatctctaacccaggggccattttctcattctcttttccctcttgcctttctgacggccacatccatccactatttgagtgactatttatgtgacaacatctcatatgcaatttaaaatagatcttatgtaagataatattctggctttaaggttccacccttttgaactgtattatcctttcccacttcctacagttacatttcaacatcattattgatattcccccttggttgtcgatgtgactgtttttgaaggtatacatttttattaattcctgcaattttctgtgattttttttctttctctgatgacctttctcttttaacgattttttttcttcatgttttgagttggtttctattttcccttcatttcagttaaatccttaaatataattttgctgattatttattcattgttcaagaaagaggcattatcgtagtgtgcttaagagcattgctttggatccagactcctgagtttgaagcccagtatatcattcaccacctgtgtgacctcgacaaagtatttaaccatctgtcaaatgtggataaaagtggtatataccttgtagggttattatgaagattaaatgggtttatacatgtaaaggacccaggatagtgcctggcacatagtaaacactcagtaaatattagctattgttattctttcccgcaacagatgatttgttctttatcttatttagcatcatcaaatgttcttcttaatggctcagcatttttagtaagctaaagatcaagttaccctgaataaactgtggtacattcatacagtggaatcttatgcagtctttaaaaggatgaggtagatcctacatatactgaccagaaaaagtactaatgatatttttagatgttaaagtaatatgtggttccactttcatagcagaatttaatatttaaaaactgtattgagatcaagacatgtctttgtgaacacaagaaattaattagaaaaggcatataccttggatgaatgggtggagaggagacttgaactattgaactttctactatatatgattttaaaagttacgtatatatgtatatatatttactttttgtgcatttcagtattttaaaaacataacaaaactctttttttggcttgtgttggatagctaatgaaagttcatatgcttctagtactttttctttaaaaacagatttataagaatatggtaacacaggaagacattttttgttccagtgagtcaagagataaaatattttcaattatttctttgtgtgggtagatcaaaaagaaatgggttggtcacaaatgcttactcatacagaggtatacacaggtgtgtgcacacagccttaaaatgactgagttgctctggaaaatgacagaaattcatgtaaggcacgatgaagaaataggagaaatacatgtatgtaaatatattcctagagcagcgtttttcacatttgaacaatagttgcaaaatagctagtaatggaattgcctgcatttgagtactcactgtgtgccaagcagtgttctaagtacttaagattactattttactgttacatttgtatgtatttatgtgcctagaatatatgtgtaatagtatacatattttcacatacttgtgattgagtgtacaatccttgatctgtcaatctaccataagctttgagaagataacaatgaactcttctgtaattacttctaaagacagataatgtttctcatttctgatattcttaattcccttgaaaagttctttctatatgctgcgcaaaaccaagaagactgatatgcatgatgtctttgtggttaattgctataaagccaatatttaaatttctttgagtcctcttttactgcctggtatcatgggatgaagagctgcgcaggaggggagtgtatacgtggctctcggtcttgtgcattttgtgacaaaggaattcccctttcaatcacgctgctctcctggagcccctggagcctctggctcaagcagcgcagtcggtctgtgcagtgtccctgacgtcatccagcgtatgcataagccctgctattgtcttactgctacagcagggctggggattgcagtatccgctgttgctgctgctcccagtcctgcccctgctgctacctagtccagcctcaccgcatcccagaagaggcacgtcggccttcatttgcctagtggattttcaaaagcagctcttcggtttttggtgctgttaagagaccttgcatttcaatcacaccgggagaaaactgaagctcgtaacaggagaatctggcagctggacacagcttggactgcattgtctggcttcatgacccctgctgtgtagccggctcatctcttcactctcacatgtacactctcctcgcttttctttcttttttttttcccttttctttcttctaatttttaaaaagcagcctctggagccagccatgtttggcactgaatcttcatgtaagtaaatggatcccacttctctgctatttagaaatctgcttgctgtcatggtttcattggcttagagttcatatcactttgccttaggtcattaacaacctttgtattttggctctaattacaaaggaattggtctcagggaaggaactccccttaactgggttattcatccttaaggccagggatgtcaatgtgtcaaaaccaggcctgtaagagggaggtaggaaaaccagaatccatacagccaccctagaatgtgttaattgatgggatcaggcctgtcactgatctattgttgtaggctccgtaatggtgcttaaaccttaaaatagatactgggaggatctgagatgatagtgtttattagaaaggaaagaaaggcttacattttttcatctaaagagataaatagttatcattatatactcttccatattttcacaaaaacatagacattataggtagattcagaatgagtaagaaatcgctttatttttgaggatggatttttttttttcccacagtggcttcaattttgatatgctggctagcatcacagtccagcaggatcatatctttttaaaaacttatacaatgaaattgctttggtgcagagaaggccctgcacaatgggctaggcaggacagcagttgtagacagctacaatggatattttaaaaattacaaccaaactatgtgaggattatttaatgttgatatagaaatataacgtcaatgcagttgtacaggctctgcagaatattttgtcattgtctattagcaaaaatgacagttaagaatttctaagagataagaatttctaaagagactttcaacctgctggctagagcattaaatattggcaagccactatctttgctagggagaaggggtttaggggaggaatttaggaaactgatttcttacgaacttgtaatttgacctttgttttttgatctcaggtgatcagtgtgactgtttgtgcatagctgattattacagaatagtagcatttcgagagagctaataatcctcagttcttttgtttcttgattggctttttaaaaaggttaattacttttgtttcactgtagaagcttctcatctcagactaccacattgcctaatcaaagttgtgttagaataatagtgacaggtaatgtcccattcagcatgtgacagtattatttcctaataatttaggcataattttttaattcacttaatggtacatttagaattggttatctaagaaatagaaataaatcactaagtgtcaaagaccatccagtttcatttcagtcatggaattttgtttatgcaggagcctaggtatggacagaaataattatatactaaaggaaaattagacctgttacttggtttagccaaaaatggaagttaaaactcagtgcagaagtctttggttcttggactagggactctaacattgtctgctcagtgttaccaagcagacacatagcctttcctgatcatcaaacctgatcttttgataatatcacctatgcgctgtatggtatgtgtgaaaactgctggttgcttgtgccctccatagctgctaaattactgaagagaatagaatatccttcagaagacagaatactatcatacaggtttttagcattttttgtctttcgtgagtgttaagctctgtttcttgcttataggtagattcgtactgtcagtggatatcgtgttgaaaatgaattgccttctttggcacgtgtatacctatgtaacaaacctgcacattctgcacatgtaccccagaacttaaagtataataataataataaaagaagattccctaagtctgcattcagtgttaggacaagtgtattttctttgtgttctgagacatagctttcttggcctttgatgtcaaccttttggaggctattttttaggtttgaaactgtacttaaaatattcaggaaaatagtcacatttgaaattccaattagttcaaaagggatctcccaaaccatctagggtgttcttactaaattatcgtaagaaatacttgtttaactatctattctgtatacagtactgtggtagatcctggtaagggttaatttttttctaacttattctgatttcgtgattcttacccttgattatggttgcagtgccttacttgtataggatgcttttactttttaaattgaggtatgatttacatgcagtaaaatgcttaagtctaggtgtgcagctcagtgaatttttgcccatgtttatacccatagaactctactcagctcaaaatacagaacatttccatttcccctggaagttctcttgtggcctttcccagtcaatattatttcccctcttcatgaaaaggtaaccactattctgacttctgatgccatagattcatgttgtaagtggctcttttaaactttctttatctcccccttgctctttgcctgtaagagaaggaaatgtcttcattttcaaatattgtattgattaagttgattttatgtttcagacctttgaggtcagaaatttgcagtagcctggatatcacattataatacattctgtcttactgaaataatattgttttaaatacttgcacccttcctcaccaaaaaaaacagacaaaaaaagcctttaaaataccaaaaaaattatgtggaagagtaaacgctagttcttcaaagttaaagacttacacagctatggcaatagaattaataaatgctcttttatgcctgacactgctttcatcaatatctccaatgatactagtctcatctctttgacttagtgaatctgaatctcccacagttgtgcagattggccacagtcagtctattttgggctcactttgaaatgggtgttctatagtatgtgtagactaatcatcacaaagcaggaagtatagcttctgtaactccgtttattaccatcttgatgtatttcactgagcttttcctttactaaagtttcccatgtctaaaaatgggagtagcgtgtctgctctttaactgctttgaagatatacagttttagtttctgtggtcagaatactttaggtgtaagaagaaagtactatcaagttttgttgaggaaggtgataattaaaatgtatatttggagttcttaatttgattatatatatatatatatcgtgtgtgtgcgtgtgtgtgtgtgtgtgacggagtctcaccctgttgctctgtggcccaggctggagtgcagtggcacaatcttggctcactgcaacctctgcctcctgggttcaagtgattttcctgcctcagcctcccgagtagctgggactacaggcatgtgccatgacacccagctaatttttgtatttttgttcagtagagatgcagtttcaccatgttggccaggctggtcctgaacccttgactgcaggtgatcctcccgcctcaacctcccaaagtgctgggattataggtgtaagccaccacacctggctgatttaatgatatattttaaaataaattgattaaattcttcaaaattaaacaatttttctcttaaaattttataagaggagaaaatatttttagggagaaagggagaaaaaatttcatcctttctttttgtggagtaaatggttttgaggaaaactgattttgcactgctgacatctggttacatcctccttgataaagccagttattcttcaaagagtagatactttaagtatgatgaattatttaattagcatttattgggctcagtcctcctcttgtctcctctcccatgttttgctttttcaattctcaagggtaccacttaagaagtactgtggtgggaattgtgccctggtctaacacgttaatgcatcttccaaagcacctaccttattagttcagtgaagagagcaacaccttacctgctgagaaacagagtgtccctggggcaaatagcattattttatccttcttccaaaattttttgtatagttataataattaaaaagaacatctagagcatctgtggagggggaaaataaatcaccagagaaccaacaaagctttagtaggatcccccaacctgagcttagtggagatgagaaactagtggatggctgtgtcaggggatcaggagtcctctttagctctggtgtggctggtccacacatactccctgccattccctggatagctacatcacctggggtaggcagccagatgctggcaataatttgggatacagtttgataccccatgtgatttgtctttgatgggcatcaaaagttcagttgctgcttttggttttcattactgatgagtgcattaagttgaaactgacagcttctcagttttaatagggagtatggtaccatgttaccaagaactagataattttctgaaattttgagccattgtgtgagaggtagtcaaatgaataatactctagcaatattaagtcatcaagatactgtagttaaacagacatctctttgataaaaaaaaagtgagttgtagtcttttatgtgcatctcaggccattgttggtaactggtcacatgtgagattaaacttgggcctgttgttttggtgtgtgatttctgtgaattggctgagatttgaatagtaactatggtcattcaaaaatggctgttcacatctggaccatttctcaaaataagcatctaattattactaaatcattgtgtcagagactgctgtttttgctgttagtatgtttggcattttagtactctatttggttttcctttttattattatttgtcatatgaaactaggtaatttaggaacatgagccattttcctttcccattaataacattaatctggttattagatttagctgcatcggattttagatgctttcatcttaaaacaaaaatagaaatacttaagtatgtgcacaaaaacccacctctaagtctgcacttagagcattgaatgtaaaagaaaaatattgcatgacattagataagtagaaaaccacagactgctgaagtcacaaacatggaaaaataattatggattataggcattatactggaacatagtcatacaggagcttgaaaaagtaaaactcatgtaatgtatttgactcatcttaccatatcactttttctttttttctgataacacacattctgatgtgaaatttccgtttgagttccttggctgttagtagttgacattgtaatttttagtatcaagataatattttaaagtaaataaggaaatttttttcttctgcatatttatatactagtacagaaatggagtaaaaatatgcaatggttatttttaaatcctcagatttcttattttcccttcagtattggtctatttgttagtctgtagtttgttcagaaaaaaaattacatgtgagtcttcagtgatttgttgttttcattgtcacaatggaccagattcatatcctgtataaactgtggggagtctatggggaaaattaccatatatggaaactttccccatagcatccccttggagttacacaggatgtgaataggattcattgttgttatggattctgagctggaaaagtcattgatcatgtgtattttttaaacattaataatagtcactgcattaatttatgttcaaatactgttaaattttcaatatgagactatatggacattacaaattgtatagtcatttatagactataaattgtatagtcattttttattcctttttgaagagtattgatatccttccattttttcctagtcaatataaagcatgagttaacataattattaatgtttttaacaagaaaatgcacaaatgctatattatttaaaaggtcccatttactgtgctagaatagtaaataataagattttcaatatattttatttgtattagtaattaattcagatacttatgagcaaaaaaatgaatatgcaatttaatgcatgtttagaaatggcagcaaccacatgccagatgcagcaactaattgcagagactctggctttcacttgcttggattcatatcatggctctaccgtgtactaccagggtttaaccatctaccatctaagcttacagtgtgacttatccaatgaactctctgtgttaggggaactggcctttgggggcctggatatctgccagggtagggcttatcaaggggtgtttgtggagagagagtccagcagtggaaaatactggctgaagagagatgtcacttcttaaggctgggtgaagactggaagttgtatgatgggaatattttaagggacccaataggaggtttgaggggaggagactgtatgaaactaatgaaatgtgaaatgggtcagggttggcaaatgccagatgccctgtggcaagcatcattgattggtcatgacactcttgcaggattagcatcagccactaaaggttggaatgttgtccactcagaacacttcatcagtgcaaatgttttccatgtaagtatgagtaatagacacataaatatttaaataaacatacaaatacttaccaaattaagaataaagggctgggcacagtggctcacgcctgtaatcccagcactttgggaggccaaggcaggtggatcacaaggtcaagagtttgagaccagcctggccaacatggtgaaaccctgtctctactgaaatacaaaaattagccgggcatggtggcgcatgcctgtagtcccagcactgaggaggctgaggaaggagaatcgcttgaacccaggaggcagaagttgtgatgagccaagatcacaccactgcactccagcctgggcaacagagtgagactccgtctcaaaagtgaaaagtaaagtaaagtaaaagtaaagtaaagtaaagtaaagtaaagtaaagtaagtaaagtaaaaagtaaagagtaaagtaaaaaaaaataaaatataaataaaataaagttaagaatcttaagtgttccagaaatgtctctctttagactctgggcgggacatggtggcccatacctgtaatctcagcactttgggaggccgaggcatgaggattgtttgagcccaggagttgaagacaagcctcggtaacaaagcaagaccctgtctctaaaatgaatgaatgatataaaataaacacaccagtctgtgtcacattatggttctcagtaatgtcaatgtgttaatgattcagagccaccactgggctcttctgaatgaaattcctatcagttgacaataaatccccagagtgtagcagggtacctagcatatatcaagtgctcatgttctttaaaatttgaatctgctgtggagtaaggtaatatcattgaaaatatgatgtgtgggcttgtagggtgttaatattgagtttaataaaattttctaggccaaggagtttatcacacataatgggtacatgtcagaaacatgccagtaatcagctcttgtcatccttcagagcaggaacaaatgacccaaacaaaataatagcatatggacttttattactaagcccaaatttgttagtgggtaaactaccatatactgataatttgccatgtactggtaagttgactatgtctaatctaagtttgcttaccattcttaaaggttaagtaaaaataatgagttactaataatcatcagtttatgtacagcatgaaaattgagaattgtttgcttgcaatactgatataatttcaggaactagaaaaattattttacttttttttgtgagcatttcagactgttaagattgaggcttttggcatattttgggcagtagcaagcccgattgtaaagcgtatagattaggaaatcacagtgactccattggggtattctttactacctcctccacctctggcttcttctagaacacctagttttcagggggaggctttggtagggtctggcctggtggtacgcatggatggtccaagcccggacttgtctcagaagtctgaatttctcatctgaaactttcctaggtcttgtgttggtataatgatgtttcagttacccattgctacacaacaaactacctcaaaacatactggtttaaaacaattatgtattattatctttcacagttctgtgggttgactggactccattggtggttctcatgaagggtctcttgcagttagatttctgtcagtgctgtagtcatctaaaggctcacctgaactagatctccaggatagctctggcatatactatcagttgaggttagctgttgacttagggctcagctggggttgtgggcaggaatgcctatacagttgaccctggaacaacttaggggttagaggctctgatccctgcacagttgaaaatccacatgaccttttaccactaaaaacgtaactactaatagcctactcttgactgtaaatcttaccgataacatggataattaacacatattttgtatgttaaatatatagctataaatatatatgctgcatatataaatatttgtgtatatttctttatgtggacatatgttttcatttctcttaggtaaatacctaggcatgccattgttgagaaactgccaaaccattttccaaagtggttataccgttttacattcccactagcaatggatgggagttcacttgcttcaaattcttgccaacatttagtattgtcagtctttttaatttttgccaattttgtgggtgtgtaatggtatattgtgattttaatttgcatgtctttcattcttatcatattaaacaatttttcatgttctttttggccatttgtgtatcttctttcgttgtgtttgttcaaatcctttgcctgttttaaaaatgaggttgtcttcttattaccgagttttgaaggttcttcatatattttgatacaaatcttttgtcaggtgtatgtattgacaatattttcttatagtctgtagctttcctttttattttcttaataatgttaagtttttaattttgatgaagtccagtttatcaatttcttctgtcctatgtaaaaatattttgcttatgttattgtcacgaatatttttctcctgtattttcttccagatgttttatgtgttttgcttctatgtgtgctatgatccatctttagtacatttttgtttgtaatatgaggtaatggtaaatgttcattttttttttttagtgaaatgaatattcacttcttctagcaccatttcttgaaaagactgtcatttctccatggaattggcaactttatcagaagtcagttcaccctatatttctagtctattttattctagggatctgtatatttatccttaggccaatactataattgttattactgtatagctttatgatcaggtagtgtaagccctccaagtctgttctttttcaaaattcttttggctatatttgatcctttcatatccctatgcatttttaaatttgcttgtcaatttctaaaaaaagacctgggattttgattgagagtatatttaatctataaagtaacttggggaggtttgacattttaacaatattaagttttgcaattcatgaacatggtatatttgtcatttaatttaggtctttaatttctctcacaatggtgaaaccagttataaaattaaaagaataggttatttttcattgatagaagaatacttatttggagtggaatgacttatattacccactgaatatatgtttctagggaacatatagtaaatgtaaaagtggtggtattagtaaagcatcattaatttgaatttggaggaattatttgcacttgtaaaaatcttaaataacctggaaagtgagatttcactaaacagatgttgtcatgaagaagtcttttgagggtatgtcttaacaaatagattagaattgtttatacatacaggcaaaaaacaaccccattgagaagtgggcaaaggacatgaacagacacttttcaaaagaagacatacatgcagccaacaagcatatgaaaaaatggtcaatatcactaatcattagagaaatgccaatcaaagccacaatgacataccatctcataccagtcagaatggccattattaaaaagtcaaaaataacagatgctggtgaggttgcagagaaaagggaacgcttatacactgctggtggaagtgtaaattagttcagccattgtggaaagcagtgtggcaactcctcgaagaaccaaaaacaggattaacattcaacccagcaaccccactactggatatatactcaaaggaatacaagtaattctaccataaagacacatgcatgcatatgttcactgcagtactattcataatatcaaagacatggaatcaacctaaatgtgcatcagaggtagactggataaagaaaatgtggtacatatacaccatggaatactatacagccataaaaaagaacaagatcatgtccttttcaggaacatggatggaactggaggccattatccttagcaaactaacacaggaaaagaaaaccaaatactgcatgttatcacttttaagtgggacgtaaataatgagaacacatggacagaaattgggtaataacaaacactggggcctacttgaaggaggagggtgggaggagggagaggttcagaaaaaaaaaacccacaaaaaacttttgggtactgcgcttattactgaggtgacaaaataatctgtacatcaaacccctgagtcacgagtttacctatataacaaaactgcacatgtacccctgaacctaaaataaatgtgtgtgtgtgtgtatatgtgtgtatatatgtgtatatatgtgcatatatacgcatatatgtgtgtatatgtgcatatatatgcatatatgtgtgtatatgtgcatatatatgcatatatgtgtgtatatgtgcatatatatgcatatatgtgtgtatatgtgcatatatatgcatatatgtgtgtatatgtgcatatatatgcatatatgtgtgtatatgtgcatatatatgcatatatgtgtgtatatgtgcatatatatgcatatatgtgtgtatatgtgcatatatatgtatatatgtgtgtatatgtgcatatatatgtatatacacacatatgtatatatgtgtatatatgcatatatatgcatatatatgcatatatgtgtatatatatgcatatatgtgtatatatatgcatatatgtgtatatatatgcatatatgtgtgtatatatatgcatatatctatatctatatctatatctatatctatatctatatctatctatctatctatatatatatattttttttttttttttggcaatggagtcttgctttgtcacccaggctggagtgcagtggtgtgattttggctcactgcaacttctgcttcccaggttcaagcaattctcctgcctcagcctcctgagtagctgggattacaggcaaatgccaccacgtgtggctaatttttgtatttttagtagagatgaggtttagccatgttgaccaggctggtctcgaattcctgacctcaagtgatctgccctcctcggcctcccaaagtgctgggattacacgaatgagccaccacgcctggcctagttaaaatatttttaaaattaaaaaaagaatggttttgtacttagaacatttaaaaattatgtttatgtaaatgctacttttatggcccttagaacatttgttctttctcttgtttgtcgtatcttaggaaatcactttattatatttatatatattttactccagttcttgccaaatattcacatttctttaattagaaaggtctgaatttatgagtttttatattcaaaaacaggatccccttttttattaagctggttctgtagtcctgttgagttatcgacctttttgagactctaataaatctatggatccttatgatcaagagatctgaaaccagacttttctctaaaaacagattcaggatgacatttgtcacctttaaaaattaaattgaatttaaatttattttttaagaactttttctaattatttggcattacttgcagtaattttcaaagtccttaaacttgaagccatgtttgatagagattgaattgacctgaaacagcatgttatgtatgtgcataatagatatgaatctataaacatattcatccacctttgttttaggcagcttataaagcagtaatcctccaacaatctctagttaattagtgtagtcttttgaaagctgcaagggtgaatatacttagtggattatagattcatctatgctgactttctcaccctttttctaagttagttccaggcaggcctactctgttagttatttttattgtaaatatataacgcagtgcttaagaacctgggctttgggtcaggcagataagggggtctagttttactatgttgctttgggcatcttatctgttagcttcagtttgttcatctgtaaaatggggataatattaacctcatgggattgttgtaatgcttaaatgaaataagtaaaatggcaagcctttaatggcacatgataagcaattgataggttaattatttttgaagatttccataccaggaacacattacatagcagcatcaacatgctgtgtatatatttgatataaaataaagtacaagctagaatagaaatggcagcattgaatgtacaaatggcaaataatgagaaaaaattgttttaaatggaaaaacttattaagtttggttcctgtcgtctggcagtttacattctaaggggatgagatgaatgaaattataattcatgcatgtctgctttatattgatttgtattactgtttgtatacatgcttttttttttttttctttttggagacagagccttgctctgttgcccaggctggagtgtcgtagtgcaatcttggctcactgcaacctctgcctcctgggttcaggtgattctcctgcctcagcctcctaaatagctaggattacaggtgcccgccaccatgcccagctaatttttgtatttttagtagagactgggttttactgtgttggccagtctggtctcgaacctttgacctcagttgatccacctgcctcaggcttccaaagtgctgggattacaggcgtgagccagcacgccgagcctcatcctgtattttttaatgttctgttgtactttataatggagggagcatctcttctggtttacatgctctggagtcagtcaatagactgaaatgctcattctactagctgcacgaccttgagtagattaacttctctggcttcagtttcttaccctgtaaagtaggcttatactgtgtcatggagctgctatgaggtcgtttttattgttgttgttcttcttcctttttttgtttagagacagggcctcactctgcacccaggcttgagagcagtgacacaatcacagctcattgcagcctcaacctctgggctcttggtgatcctcctacctcagcatctcaagtagataggaccacaggtgcacaccactatgccctgctaatattttattttttgtagaggcagtcttgctctattgcccaggctggtcttgaactcctgggctcaagcaatcctcctgcctcggcctcccaaagtgctgagattacaggtgtgagccactgtgcctggcctgctgtgagttttaaatgccttaaaatatttgttgcctagtaaaggctcaatgaatgctacctactgttattaggtattattatattagtcatttatgttattgcttatccttccaattgcattcaatatgcccatttaaacatttgctgtatgaaaatctatgatgtgggaggggttaaaagttatttaaagacagaacatcagtggttctaggttttatgctcacctcacctaatatttagtctcatctctcagagtatcttgcttattaaacacaataaggtcaataccttttctttattcatgaaaatgtctgaaatgtgaatggaatttatacccttgtaatggtatcatattttaacttaatatttaaggagactctaaatactaataatcactcattggtttatctaatttatatgtctgtagctttgttagatttacttaaagtcatgcatataagttctttttttaaaaagctttatgatattttgatatagatgtcatagcatgctttgcattatttgacctccatttagatggattaagtggaattttcttcgctgaggaatttcataaaccctttttgacttttaattgggatggacagagttatcactatgtaagaagggaaataatacacctaagagtttactttctggtttgtttcttttaggatttatactaacatgcatccaagatgttttgtttagttgtgtaagggtgatccggaaacagcattgctaccctccaagacttatgcttagaatgaaaaacttttactgtggtgtcgcaacatgaataattttccttcagactttcatgaggccaagaccatgtttacatttaattccatgcagaggactggcaagctgggcagttttttttttttttttttttttaaagatataaaatacacaggtccctgagtgcttgggtcttcatatgctctggaattaccagctgcacacctgactatagtctgtttgtttttaatattaaattgaccttttccagcctctcttgttgaggaagtggagtctgagtaacaccagctgtgtgtggtgtcaggctggaacaataattcagggatgcagaatatggctcgcctttgtttcctgaaattgtgcattgatttcttttgtcagtagactgtttcaaatgaatggaagaaacattttctatttttaatttttttgaggggtggcagacttctttcaaaagcaaataattcatctgcaaattcaaattctatttggtacatctaatttgcttaaagtaaaacacgcatatatagtagaaattttaactgagtcaatttcatagctgtcagaacctttctcatcacagcaatttgattaaagttttttttaaggctttttcatttttaataagggaaatatctccattataaccactgctgccagcaggaggacattggttttcatgaatatttttggaattttctctacctcacatttttaagtagataaaactgagttaggtttatagagttaatttctcctcttctttggcattgaatgtactctaatttgtagctttaaaaattagaatcagtctttttttttttcctgagtgaatacatttttttgtaggatagatggttcttaaagaatacgttagttcaggatctaatatgaatcaataaatttttgctgataatatgaacgaccagatgattgggaattcttgagaagtatacaagaagtttatagctttattactatttcacaactgattctggaggtttcttaggatattagcgttataagcctgaggtaactggtttttctttttctgacctgggtgcatttgtggagtctgaggctgacaagtgaaatagttactagctgtttaataaatctcccgaattgtttggtactgtttggcaagcttactccgcatattaagttttgactttcctgtgttttattggaactctttgttcctgaagcactaacatttctattttgtctttcatgcagttagccacctccctaatggtgaccagtcctctgcaggcaatcaggtcactgctacaagtgactggctgtcagcccaaatgatgcagaatattttatcatttgtaatgtgtgtggccctcaaaaacataatgtctggaataagggataacatgacatttatcatgatcagtggaactggttaatctggtcaggaaacgactgaatattttacgtatttagctgactgggcttttattttgtttatttgattttgagaattgacagtaggaataagcctgggtaaacagcagtgctaggctctgcactttttgttttctatccagctactgtgcaaatgagatatgataatttaaggccccttttgggagaaccatgttaaaaagagaaaggaagcagggacaggggcatttaggtggcaattgtctttcactggggtagccatatatcatattcccatggtatgatatatcatatacatatggtatgatatgatatcatatacttttggatttggctgcccacttggtattatgagatatttgcatcataataaaatgctctgcattttggtagaaagccctagttgcttgaatctctcaatctaaactcagtttcaaatcctttcctaggggtatgagtaggtgtgataacagtttcagactttttttctttcagcgcttcagcctaaaggccgcttacagaattcagcaggtgtgcttcctaataagcttcctccttctctaacacaagtaaaaagccacaggttggacccagcattgtggctctaggaatgctggcaatacaagtggagagagcagctctgccctgaacagctgccatggaagtcgcatggacaaccggagcagttgcctgagccacgttttgtgaggcagtcttccccctaaacattggtattttatactggtgattaggataatttagcatttgggaggaaggtcctgtgaccttgtatttcatatgaaaatatgcagtattacatttttatgttatgcccttaatgcacagccctaccacaaaagcttcccaaggagaggcaatttcaggctgatgaggaaaggattttatgatgccatttaaagaaagaaggcagtcaaatgcaatcaattagaatgaggtacaaaacagatgagctaatggcaaaagactgatccaaaaaggttggccatggcatctaacatcaccttgtaacctgagttacaaatagaccttttctttcagaattgagatacgggagtgctgtgatcttttcacattgtcctattggggctggtgagaatatgttttattcagttttcatgaaactattaaaatgatccattatatgttcagcacattgtgttgcacataaagacttttttttctattgttctcgtgttccccaaggtcttttactgctagcctatgcttctgaatgtgtgagggatcaaatgagacttccgattatatggcaaatagcatcatcttgaattttgtgaaattatttctggataggattaaatccagtatctgacattatggtttagctcatcgcttcccaacctgtaagctctcttctcaatggccagtggatgctttgggaaataatttaaatctgcggtgaaataattggtccagataattgtgctcagtgtgtggagatgttgatgattgatatcttgatataagctgtgttctttaaaggggactgcttaggagaaggggctggactttttattgctatagccttaactgaaaaaaaatctgatggtagatgtttgacaataaaaagatagatccaatgtgataactttttaaagaataattttctgtaattttcctggagtcatcttcattactaaaggtcattcccaagctaatggcaaaaactcccagtacactaaataaagggaccacagcaaattgtagggtttgtgacagttcctactgctgggaaaggcttgttcactcttggttcctgcattaacctatgcagggtagttttagtctaccttgttaatactactttttctctgttgggtattgattaacacctagtgatgctgtcatttcttaatgctagggtgagagctattttttagaacacaacagcattttaatctttccagtgtctaaagcaattttttttaacatgtcagagttcattttcattgtggatgtcttaataccaataaaaaaggaaggaagaagaaaaagaaggatctgagctatgaagtcagacagattgggattgattttggttctgcccttgactgggctagtcatcttgggcaattttataatctttcaattgaggacaatattctgctcataaacttgctgtaaaggtaaatgagacagcatatgtaaatatatgcttagtacagtgctccacatatagtaagtgttgaatgcatagttatataagtataaatgtggataaacatgtatcgagcacttggaaggcagtgtattaggggatttacactataggcagatacacagatatatgtaaaggggggagtgtgtgtataaaatttagtgaacgtttctagctgtgtctttaaagcagagtgccctgctcaagaaatgaaagattttatgatgattaataacatccaaatccttccactcaatgatatcttctcttaatatgtcttacagtttttgagtgatttgtgtaaaaggatattattttatatatattacttacaatctgccttttttcatttaataatatttaataaatacttttcataatactgaatttaacagccacagaatactttgttgtagtttgaaacatatttttttagctaatcctttatgagtggttacttaggttttctttttttgcatttttttctctataaatagatgtggcagacattcttcaggttaaatctttgcacgtaaccatgcttttttccttaggatacattcctggaactagaattggaggccaaaaggcttgccaaactttaagatacctgcttcctattaccaggttatgttggaaatttgtacttctttgctatatatttaaaaatattggctgggtatgatggctcatgtaatgtcagcactttgaaaggccaaggcaggaagattgcttgaggccaggagttcaagaccagcctgggcaacatagggaaaccctgtctctaccaaaaaataaaaaattagctgagcatggtctcatgtacctgtggtcccagccactcaggaggctgaggtgggaggatcacttgagcctgaaaggtcgaggctgcagtgagccctgatggcatcactgaactccagcctgggcgacagagtgagaccctgtctgtaaaagcaaaaaaaaaaaaaaaattttatccaaactctgaatttgtaaagacatggaagaatgcactaatatcatttgctttctgccttttatgtaggaaaaatacatctttttattttatttttaaaaatttatgttttttatgttaaggtggctgaaaacaaatccctcctctctacactgcacttcagtacttcccagtagggtgtgtagcacccttgcttaggctgagatcttggtaagtctgacttgaactcattctgggccagttatcccacatcttctgtagtcgcaaatcagactctcttgcctggccaagcatcttgcaaatcttggacaggtgtcccaagggaaataatctgtcatggaagctagaagagcccaagaagagccatcatgcttgcacatgaaaacagttcattgtaagaaattcagtcaggtaggatttggatgttattaatcatcataaaatcttacatttcttgagcagggcactctgctttaaagacagagctagaggctgggctcggtggctcacgcctgtaatcccagcactttgggaggcagaggtgggtggatcacgatgtcaggagttcaagaccagcctggccaacatggtgaagccccctctctactaaaaatacaaaagttagccaggcttggtggcagacgcctgtaatcccagctgtttgggaggctgaggcaggagaattgcttgaaactggaaggcagaggttgcagtgagccgaaatcgcagccactgcactccagcatgagtgaaagagcgaaattctgtctcaaaaaaaaaagagttagaaacattcactaaattttatacacacatacacacacacacacacacccttttacagatatctgtatatctacgtataatgtaaatcccctaatacactgccttcctagtgttcaatacatgtttagtgggtaggtatatatttgctcttcgcatagtaaataccctctctgggcagcacatttcaacggagcaggttgcttcatagtaattctttaggggatggtcatgggtaaagctttttaaggattcatctagtgatccaattcatttctttgccactgggtctagttgtacttgttggtcactatgaagtgctgattggtccaattcctcttgggaaaaacatttactgggaggccaggttgctgatatatttaggcttccatatttgcatttaaaataatctatgcaataatgtcattgccaaaagggtccacaattaactctgaattaatctactatcttgaagaatattctttactaatttcattctgtagaacttattccatggaactacacacatacacatcccatcaaaccttattattcacctttttgcctctcttcttccctacttccttcactatctacccctttgctttccttttctctggattgagtaaaagttaccattggtagatggtgctttgtagaatgtttaaggatttctctggggaacagcgcttcagggctgtatctgtcttgtggtgtgagggccctcaacatgaacaagaaagcctgagtgatgtttgtgcaaggatatcagctgattttcatgtaaggagtttcgagatgtgtcatctggcaatgtagaattgaatctttaccacatgttcatttttctacactgagaatgaatgtaattctagtagatgagcaagcagattgattggttattcattgcaaattctgctattactggagtgttctgcttttctcttccagtgaagcctagagatgtttagtgccaaaaaaccatgttacagtcactaaattagccagagctataagacagtggtatggatacttttaaaggattaatattagcaaagaatgaaggtctgcaaagtggttgctactgggagaaattatttgattaatgcttggtgctaactggaatgttttcttctttttcatgttttcctataaattgtttcccatttgctttattacttttgacatctatcttatatatctatatataagatcacttttcacatataaatgccccttctctctgcatatatgtattcgctgcatagggtatttcaataaagcatattttgccttaaagaaaaataagaaagcctctttccctgaactgtgtacccatacctgtggtaaacacagtaatggcccccaaaaatctctatgtccatgtcctaatctctgaaacctgtggatatgttatattaaatggcaaagggaaattaaggtttaaaccaggcagaattaaggttgataatagactgattttaaaatatggacattatgctgaattatccaggtaggctcagtgtaatcacaagggtccttaaatgtcgaagaggaaggcagaagaggtcagagtaatgcgatatgagaagaactcaacctgcctttgctgggtttgaagatggagagagagggccacaagccaaggaatgtggatgaccttacataacctttgagaaatattcttgcataataaatacacatacgtattttctcctctttattttacacaaacaggaatttacagtccacacttttgtattatttgagtttttgcttttttaatcaagtgtttaaaaaagatgtagagactatctttagatcaattactttctttttaaaaacagcttctagtagtcttttgtatgaccatactacagtttatttaaataattctctactgatggaactactaggctattttcagtttgggctattacaagtctttgtgaatatacacaaatatatttgcagcagaaattccccaaaatggagttgatagatcagtttataaatttaaaggtcaaatgactaaattactctccaaaagagtcatccaatttatactgttttattgcctctgtctgggctagagtgtaccttgattattaattataatgaagtgggaagtataagatattaaaagacagagattagacgagtatcactctgtctttattccctattaaatataattccaaacacggtggcatgattgccagtgagttcttcaatgtgtctttttccttatggcattcttcactcttgtagacattttaaattttcatgtagtcagatttataaatttttcatttatggcttttgttttgtgacttgccttctccaagattttaaaaaaatatatagacctcccacctttctttttagtacttttgtgctttccttttttacttttgaatctttgatccagttagaggtttttttcctttaagggaaaattcatgcaattaaatattaaaatgagatttgacataatctctaggtcctttatgttaactgtataatatattttagcatagtggttccactctatatatattctttcatcatgattgtaattcatacataatttttttacttgaagtttttaatataattgtttaggaatggattaagtaatgttttgaacctcattgcaacacataaaacaattcacctttttgttttagaactaatgtaatccataaaggattaaatagacatgtaataatgagttttcattgaatcatcacaaaacacatgctattaataatctttggatattttctagctctctacttcctcacgtctgattacagcaatttgggggaggaaaatgtattcagtcttagtaattttttattttgacttaaagcctcccagtggaggaataaagatgaattatttttgcttatagtcttagagttgttgttagaaattggtgttgatgaaaataatgactaatgaagcaagcattggtatgtgttgctgggacctttgagactattccttttcagtttttccattgtggcctaagaatattctgtctgctatttgaagaagtcatgtttgagccaaattaaattttcaggtcaagaaatatttacttgattaaacataaattacttttgtgacaactgcctcatattcccaagtcaacaagccttctcagaagaggtcagggagtttcctatattgtttaattgcctttaaccaatggaagcttgtcataaatggggtctaaagggagcctgacctcatctcccaaggtgaagaagtgattgtctacaccatcataagacaaagatgttgctattcattgcaatccctcagattatttcataaacgttacttcagttcctcagattttattattagtgctatcaatttttaagtccaaacttgcaaaataacatcaccacacccctgtgagatagcaagtattatttccattctcagttgcagattccagttgagtattaatgcctgttttgcctgaagatgaagataatgatctgtatttcttaactttttagccagttttccttaattacatttgcattttttagggtcagagagtttttgagaggacatactcttatcagggactactaagaccaggacttactctgcatcttgaaccactctgcctcttgtcattagttttcaacctacgttgttctttctcagtacacatccctgggatcggttcttaaacacttaccttttccctttccttctctcttagatgtcttttttctttggcttcataaagaaaagaaaggggatcattggcagttttgatttacatatctgatggaatttcgttttagtggcagggattggcttgcatgagggtatctttccaacaaaacaaatttgttaacatcactcatttgcttaaaagcctgataaagtcagcatcatttgaaagctcggcaggtactaggtaccttctaggtgctttgtatattcatgtagatccctaaggtaggcgtttttttcgagacagagtgcagtggcacaagctcagctcactgcaacctctgcctcctgggttcaagcaattcttgtgcctcaccctcccgagtacctgggagtacaggtgtgtgccaccacgcccatctaatttttaaaaatatttttaataaagatggggtttcaccatattgtccaggctggtctcgaactcttgaccacaagtgatcagcctgccttggcccctaaggtaggggttttatcataccatttcattcaggggaaaaggaattcagaaaaaatttaaagatgcttgtgtaaggtcacacaactgttgtcagtgccaagagtcaaacccagcgttctgtgacttcaaagttaatgtttgttcattcatttagtctcacctctctaaacactgtgtatttgcagacatctcccgaattcatatctctagtctagacctccctgagctcaaacctgctcacccagttgcctagtcagcatcttcagctggatgtctcacaaatactatatgtgagatgtgttccaaaactgatttctaatgcctctcccccctactactcacccagtcatcaccttctcaggttgtggctgcttcatccttccagttattgagaccaaatactttgaggttatccatgactcctttatttctgacactccacatgcactgccagtaagtgttgttgactttaccttcaaatgtatcaccattgcctccaccattactaccttagtccaagacaccgtcttctgcctgggttactacagaggtcttattattggtgacactgtcttcacctttgcttcccatcagccagagagagctttttctaactccagtcagaccttgtcactcttctgcttaaaccctccagtagttttccatcaccctcagaattagagccctagcagatctggccatgatacctctctgatgttaccttccatagtattccctcttcttaatcagctctagtcacataggcctgcctgctctccttggatacaccaggtacactgctgccttagggactttgcgcttcatggtccctctttccggaatgttctttctccatatctgcatggctcactcccttatttctttaagtctttgagcaaacggtatcttctcaatgaggcctgccctgaccatcctacttgctagcactcatctctcgtaccctatttaattttcctccattgcacttatcactttctaatagatgatacaatttacctattaatgcatattatctatcttccccagcttctagcctcccattcccaaatgaaagctccacaaggacaagggtttttgtctgcttggcccattgtatgcctggcattaggtcaagacctggcacgttgttgctgaccaataaaacctgtggaatgaataaatttactcacaaagtattaagctctgtgctgagactgagggatacagggaccatctctggctttcaagtttttaatggattctgctttttaggatttctacctttcagttaaagggaaatcaagttctagaggggttctaacccccagtggtgaaagcaaccagcatgtgttgagcagttgttttataccagatgtttcatatagagggataatgtattcattcacaccttacaacaatcccatgaggaatatgttatctatgttttgcagatgaggaaactgtggtttagggaaattatgtaccttgctgaaaaccagcttccctgtaagtggtataaggaagagtcagacccatatctgtctgttggtggtgtttttttttgactgtgtcatgctgcttttctaacagctccaccatcacctgtagggtgaaccctgtttctttcccgcagcatataagacgcttccctgtctgtattcagcctgtcgggcaaggcttcgtttttctgtctcctctgggacactgccaactccaacttctctatgaagtcttgcttttcacctaaaagaccatatgcttgcagtttcacacctctgcaaagtgttttccctctaactgaaatggcttttcttcccttttctgcttggtgaatctatgcttgtcctttgcattccagctcatgtgttacttccatgaagccttttttagcttctctcagggacatagtgggtcactgcatgctgctcccacacagtaccacctgttattcctacactgtgttccagttagtctaccagaaatggggctttcttctattcttctttgttttaccaatgcctaggacagggcctggactataccatataacaagtaaatgtttattttgtgatgtaaaggtgatttgtgcaataatgggtaatggaaacacttagggatttagaatttaaacatggaagaatgacaggtataatctgataaaagtctaaatgacacctcagaaattctctgtagatgaggcgctcattcatgtattcatggctataaagtagttattaagtacatggacttaatgggttcaaaacccagtccttacatttactgcaggtttaatgttaaattatttacctctctgagcctcttcttcatctatgaaatggaggataatattgtacttacctaacagtgttgccaggaggatttaatgacagagcctgccgcatattgaacattaagtaaatatatataattacagcaaagttttctggaggagttagtatttgtactacatggtcttggatctaaattgcattggatacattgaatgaaatactaaactaaggacatcggtcattaaaaactagggaagcccatggtttttgatgttcttatgggttcatccttcagagtgattcctaccactcatctttttttccctaggtaaaaagccccatttgaagttataagttgaaaatgttaaacatttaagcaaagaggatttagaaattgtttttatgacagaggaaacagaacctgggaattgtgtgtttcttcagaacgacttaattacagggagtgacaactttgttgttcatgagatggattgttttacgaaatagagcatttgattgtaagaactgaatcctgcccagaatctgtctggagggccctttgatatggtattcacatgatataattatatttagagagtcctctaggaaaattttagaaccatgcaaatgtgcatgtctagctgcaatccaattttacattaatctagtgtctagccgtttatactctgtgcattgttagatagcttcctaggctggcaataattaaagggtttagattaaacagatgtaatgtgaaatctgtgacatttgaggctaggttagctagcttaataccaggtgtttggaggctggggatgtttttcgtggttataagtctccatgccaaatttttattctagaaattggcctgagagggcatgttgagaaatcgaatgcagaagtaaacaatgacttcagaaatcagcttggaagtcagggatttattttctatgttgtgcactattaatatacagttgacccttgaacagtgcaggggttagggatgctaacccatgtgcagtcaaaaatctgaatataacttttggctcccacaaaacttaactactagtagcctacttgactggaagccctactgataacctaaatggtcaatcaacgcatattttgtataagtattatatactatattctcataataagaaaatcataaggaagagaaaatatatttactgttcattaagtggaagtggatcattacaaaggttttcttcttcatcattttcatgtttagtaggccgagaaggaggaggaaaaggaggagttgatcttgctgtctcaggggtggcagagatggaggaggtgaaaggggaggcaggagaggcagggacattcggtataactttacaaaaatacatcataatttctgtctgaatttttgctttgtcatttatctaaaaatatttgtatatgatacaaatttgcaagtttcagcgtctggatcatagaatggtccatgttgtaaaagaagcccaaagcagtcttgaataatcagaatcttctggtagattatctaatgtcagtttgttttctggcatttttatgtcttcttcatcattttgcattggtttggaagcactcatctttatccagttgccttctgttttattcctctggtgtggtgtctattagcttttgaatttctccaagatccatatcttgaaaccctttacccaccccaccccacctgctcctttttgccatatctgcggtctctttcatggtttccttgataggctctgtcgtaaattctgggaagtcatgcacaacatctgaacacagttttctctagcaggaagttattgtttcaggtttggtggctttcactgctttttgtgtaacagtgatagcatcttcaatggtataatccttccacactttcattatgttccctttgttggggttctcctcatagcactgacagtcctttccatagagtattgtgtgtaatgagccttaaaagtctttatgattccatgatctagaggccgaattagagacactgtgtttggaagcaagtagaccacttcattgtccaatatcgaaagaacttttaaaaggcagtcttttattgacaggtacttcctgacttcaaggacagagcattgatggaaccaatccagaaaaagggttgtcattgtccaggccttcttgttgtaaagttaaaaaactggcagctggtgtttatcttttcccttcagggcttgggcatcagcagctttataggtaagggcagtctaggtcataaacccaactgcatttgcactgaacagtagaagtcgcctatctctaccttaaatcctggtgattccttctcttccttactaatgtcctttgtggcatttttttcccagaatagggcactttcgtctacattgaaaacctgttcaggtaggtatcctttctcttcaattattttcttaatggcacctgggaactcatctgctgcctcttggttggcagaagctgcatctcctgttatcttgacatttcttaaaccaaacctctttctaaaattataaaaccatcatttgctagcattaaattctctagctttagatccttcatcttccttttgctttaagttgtcgtgtaatgacatcactttttctcaaatcatactatagtccacaggtatgcctttcttatagcaatccagcacccacataaaagctgcattttcaataagagataaaaagatattttgcaaaaagtgcatgtgttttgtgtctgctggcatagctgtagtgacagcttcatgaattttgttttctttgttttacaatgattcttactccagattcatgtatctcgaagtggtgggcaaccacagctggagacctcagtcacatatcaagcagttcacttttttcctataatgtcatgacttttctctgcttcttggggtcctttccagcatcactagtgacacttcatatgggttccatggtgttattaaagatttacagtattgtactaaacgtgatgaaaaatatgccagacctggccgggcctggtggctcaacgcctgtaatccctgcactttgggaggccgaggcaggtggatcacgagatcaggagattgagaccatcccggctaacacggtgaaaccctgtctctactaaaaatacaaaaaaaaaaaaaaaatagctgggtgtgttggcaggcacctgtagtcccagctactcgggaggctgagccaggagaatcacttgaacccgggacgtggaggttgcagtgagctgagattgcaccactgcactgcagcctgggcgacagagtgagactccgtctcaaaaaaaaaaaaaagaaaaaaagaaaaatatgccagacctgtgagagatcacttactgctgtgatgagcaattcactggagagacagactgctcccatggagatgattaatgtcacatgttgttttaagccaatcctccaaacaaactcatctcaatagcaacagaagtggctacgaaattattacagtagcacagcatgcactacagttaattttatacagttctgatttcatcctgcatctttacaattgtttacatttctcctgactgcggatggtgccatgtatggtctgtgtttgtgtgtgtaggttttgataaattttaactttttataatttgtgtatattttatggtagtgaatgatatatttaatagactaccgtctctatatattttacacattcatgacacatacctaacttaaaaattctgaggcctggtgcggtggctcacgcctgtgatactagcacttaaggaggccgaggcgagtggatcacgaggtcaagagatctagaccaccctggccaacgtggtgaaaccccgtctctactaaaaatacaaaaatttagctgggcgtgatggcgcacgcctgtagtcccagctactcgggaggctgaggcaggagaatcacttggacccaggaggcggaagttgcagtgagccgagatcgagcatctgcactccagcctggcgacagagcgagactacgtctcaaaaaaaaaaaaaaaaagaaaagaaaatattttcaggctatgcggtttgagtttttcaaatttttgtaaatctccaaattttttttccaatatgtttattgcagaaaatttgcgtataaacagacctacacagttcaaatttgtgattccagggtcaactgtacttgtagaaataccacaaattacaaatgaaacaaagtattcttcctttcattaaaacttactgtgtttaactgctagaattgcaacagtgaacaagatggaaatggtcccttctgtcatggaactcatagtttaatggatatagcagacaacaaacaaataggcaacatatatgtatttacctaatagggtgcagagatctaggctaattggtctcttaacacagctaaggtggtcagagaaagcctttctgaggagttgagattcaagatgtaggcttccaggaagtcaggcttgtgaaggaagagcattacagagaggggctcagcatgtgcagaagccctgagagggaaagagcttgacctttgcctgttcagaaagaaacagaggcaagggctaggtcacacaggggctcatatccatggtgtggaatctggggtttattctgaatgcatgggaagacactgaagagttttaaaactcaacagggtctaatgtttgtattatatggaaagtggacaggagggaatagatagagcaggagtggaagcaggaggccgctaggaagtccttgtgtaagatgagaagtgatggtggcctggactagaatggtcaaggtggagagagagggaggattcattcagatcatacttggatggtagaactgatggagcttgttggattgggtgtggggagtgagggagacagagaaatcaaggatgattcccaagttcctaacttgaggaatgagatggatgggagtgccattagctgacataaattatctgaaggaaatagagaaggacatgcaacaaaggccaaaggaaatttgaaggttggcaacccttagcagagtctagccacccacatgtttttattcccattctcttgcttcttaccaaaataaaagcttttcatctgctgcagactctttgaacacagtgcagcctctgtgtcatcaataatttatgcagtgttctcaagtaaaagcgttagtgtccaaggccttgtgattctgatctggtttcccagaaatatttcacagggcagatatgaaagagaagatttaaaaacaaaaaaaaaactccatcacttattgctgtggtgcaatgtaaagggccataattaagttatccccagcatcattctcctttttgtaggtatgtatttcaactagaaagattatctttcctccaggacctgttgtactagcgcctgaactctatttatggggaactaaacaggttgataagttttgctttcagctgatttttttttctctatgcaccaccagaaaggattttagagttatatctttgcaactttcagtctgacactggtagttacttgtttcaggaaggtgattattctcatcaggtattattcttttaataataactttttttgttatgaataaaatatcttcactgtagacaaattggaaagtagagaatttgtacacaatcacttacaatcccagtgccaagaagtaacattctcttccagtctctaaaaaatctagggccaggagcagtggctcacgcctataatcccagcactttgggaggccgaggcaggtggatcacgaggtcaggagatcaagaccatcctggctaacacggtgaaaccccgtctctactaaaaatacaaaaaattagctgggcgtggtggcgggcgtctgtagtcccagctactcaggaggctggggcaggagaatggcgtgaacgcaggaggcggagcttgcagtgagctgagatcgcgccactgcactgcagcctgggcgacacagcaagattacatctcaaaaaacaaaaaaacaaacaaacaaacgaaaaaatctagtcagtgtgttgcttcatactttatgtgcaattttatatcctcatttttctacttaacattctgactcttttctgtatcttatcaactattactcaaagacaacattttaaatggctatatgatattccattgcatggaatacttaatcattttcctgttgttgagcatttaagttgtttgttgttcttcgtagagaaattttaaattaaggaaaaaaagccagacagttttttacagagcacattgttttaacgaaacaaactaaattttctactcaaaccaaaatagtttgtaaaaaccactgtctactccaggcagctatagaataatgatcagggcatcagaacaattgcactaaaaaccctagtctcctggcaagccatttccgggctctcaactcttacagtgtttttcgatgctctcgaaggtgccagagttaaacacggactactcttgttagggaagtcagctctgttactcacggggatctttgccctcctcctttgaagcttttcagcatttccatttgttgcttgtacctctggatcttgccttgcaacaatgactagaactagggaaagatagggacagccctcttaccacagctttgagctgccaaatttgagctgctttatcctcatcccagccctccactgtgccagtcccttgggtctcagcaggccacctccttctggccacccttcagtcagcaactgttgattgagcaatttccacattccagaaactggctagatgttgggaataggatggtcagatagatgtagatgctcttataatttatgattggtgggaagtaattatatgggagggaagatagagagttatgtatggtgtgggagagtgatgtactgatgttcttcatgggtgaagaacagaacagaacagaggactagacggtttttttttttttaagacggagtcttgctctgttacccaggctggagtgggatctctgctcattgcaacctctgcctcatgggttcaagtgattctcctgtctcagcctcccgagtagctgggattacaggcatgctccaccaggcctggctaatttttgtatttttagtagagatggggtttcaccatgttggccaggctagttccaaactcctgacctcaggtgatctgcccacctcagcctcccaaagtgctgcgattacaggcatgagccaccgtgcccgccggtctagacagttttgaccttagctagctttcccacactctgagcactctctacttactgtattttaaaatctgtgcgcacacccctttaggtatgatctgcttttgttaaaactgtaaaataaacacaaaagaacacagccagtgaagtggaggcattgttcagtaaggttgtgtctctctactggcctccattcttggaattgtcaagctggtctccagtgttgcagcacaagtctcttaaaatccttcagagatcaggaactgctctttcttactgctgtgcctgtgacacaatgcgtcgcacatgcatcccggaggtggaggtgggtagagttgagctggtaatttacttaggaggtgacatttattgttgagttttcctcttcttcttcaaaggacaccatgaacacagaatataagtgaattctgcctttgttaggccattcctttatcacactttgtctgtgctataaatgtgctatgcttgaggtgtgggctttggtttttggtttatttggtaatatgacaaatatgtcttcatgggtgaagaacagaacagtttcacctaagttctacgtgagcatttccccagcacattgtttttttaaaaacaaccagtatctgacagatgtttgtcactgaactctctgctggacatgccaggaaaatgcagcaaatacatttggatttcagtaatacatccatctcatgatatttctttacaaagatgaagaaagggctacatacaaggaaaagcagatgaattaggaatattaggcattgtgtgtggtggtaatgtggtatagggaaccccagtcatgcattcattggttctaagttaacatttttcctccacttcttattaaatacatggccttggacaatttaattgaagtaatcagaattatgtataatagtgattaatagtcacccagtaattgctcaattactaaaaagtaattcactataccaaggattcagtttgattgatataatcctctgtgacatgtgggtactgttgttatctcccaatttatttatttatttattttctgctccttaatttttttattttattttttaagatggagtcttgccttgttgcccaggctgtagcgcagtggcatgatctcggcttactgcaacctccgtctcctgagttcaagcaattctcctccctcagcctcccaagtagctgggattacaggtgtatgacaccacacctggctaattttttgtatttttagtagagacagggtttcgccttgttagccaggctggtcttgaactcctgacctcaggtgatcctcctgcctcggcctcccaaagtgctgggattattccccaacttatacatgaagaaacttaggtgcagataaattgagtgaataatcctagattgtacaacttctctttgctggacccaggatttgcactcaggtcattgtcaccaataacctgtgctccaaccactacactctgacctttaagtccttatttgctcagttgggaagtgggaatttatttatctgataaaatattaggtgcttttggtgttcatatttgggtaaattacaagtctccccctttctggtactattgcttctttttattgaaactggcagtaggactttttgttccggcttaattaaccaggtgtattagtcagggttccctagagggacagaactaataggatagatatacatatatataaaggcaaatttattaagtattaacttacacgatcacaaggtcccacagtaggctgtctgcaagcttgagcaagaacagccagtctgagtctcaatactgaagaacttggagtccaatatttgagggcaggaagcatccagcttcctgaaagatgaaggctgggagtcgaggccagtcttgtttgtcttttcacgtttttctgcctggtttatattcactggcagctgattagattgtacccaccagattaagggtgagtctgccttctcaagcccactgactcaaatgttaatctccttttgcaacacccacacagacacacccaggatcaatactttgcatccttcaatccaaccaagttgacactcagcattaacaatcacactaggtgagatgggaaagctgtgccaggtgataaaagggtttttgtgcagtgctgctgagtatatttcttgctcagagttgtgagagttacatgagattaaagaagataaaataggccaggcatggtggctcatgcctgtaaccagcactttgggaggccgaggcgggctgatcacctgaggttgggagtttgagaccagcctgaccaacatggagaaaccccatctctactaaaaaaaatacaaaattagctgagtgtggtggcacatgcctgtaatcacagctactcgggagcctgaggcaggagaatcacttgaacccaggaggcagaggttgcagtgagccaagattgcaccattgcatccagcctgggcaacaagagcgaaactccgtctcaaaaataaaaataaaaataaattaaaaaaaataaagaagataaaatagaagaaagtgtaaagtagaaaggatcttacacaaaatctttacacaaggatcttgaagaaatatagccaatctattgacttaaaagctgagtaaaattttactacattgtaattgttcataaaacacaggatcaatatgaaaataggatttgtaattcttaagtatttcccttttttgataattggcttcctcttaagaattatgatgctcaattacacatataagagattacatttataagagattcctttacatcaaggtcaccctgagggaggattctcttggtgtattgaagggtcctagctctgatcctgcccatttcaatatagtgtcagtatctgagatacagtcggtggttatctgtttgtggatgatctaaagctgtagatttagttttcattgagtctttatatttttttctctaatgattttgaaaggtagactatttaaaatgtaattattttaaattgtggccaatttaaaggttttcatatacatacttagagctgtatttcattacctaatttatgtcattatacttatgtattcaagtagaataactccatttattcttcatatatctgaaagtgactttcttttgccagcatctttgagtgatagctaacccagtataaaactaaaactagatttgaaaattccttaggtcaaggactgtttcttttgttaccctgtttttcacatggtgctcaaccttatgtttgtatataattgatactctttccatattgttgattcgttgtgaatttttaaaaattaagagctaagacttaggaagttttaagatacttgtttacatgctgtgagttagggcttctcctaataagagattgtatgattgagttatgtgctaacgtgtttctgcttgattagttgacttcaagtgctcaaacacagcaaataattgcccaattgaagatgtctaacattattagatattaagctatttcagacccatactaaatcatccatttgaatatagtacaagaaacttctttattgggacttatttttcctctttacaaaatacctttgaaaagagatagtgatatagtagagtgagggaacctgagttccttgactatgtagtatatgaacatgggcctgtcatattaattttctgggactaacaatttgtactattaagtaaaagttaccaatcaaaatccctttctatttttttcagttaccacctgtaaagtctggtagttatagtaatcctacctgagtgggatgttttgcagaacctcagttgtttccactcctctgacttaggataatgactgtttcttgtgtgggggccacagatgccaggatttagatatgctatcattagaaagcaaactaatttttcacaggtttctactttttaattctttattgttatatttgctagtgagtgtcaagagaatcaggaatattgattaacctgtgtgaatgagtagttggaaacacatgtgctttaccttttggaactcaattgttctttagccagtcaggttatctatctaaataagatagggaattcagtaacacatttgctttgtgcacaagagcggttatttcctataatgtttgtatgatgatattttttatttttattttccagtgaaatataaacatgattttttaaagctttatctgtctttggaaattaatgatcagtttgcataaaagcacttgatctggaaaacttcaaatatgttctatttaataccatctgctatatatcttttctattggttgttatggagacttatttttcatgaagggacatggtgctgctttacttgaagattgaatttgctttgatttcatagtgcattatggtaaaattgagcatcataattcttaagaggaagccaattatcaaaaagggaaatatttaagaattataaatcctattttcatatccatcctgtgttttatgagaagtcacaatgtagaaaaattttactcagcttttaagtcaatagattggccatatttcttcaacaactactgtgtgatggtatcaaagaaatagcagatatactgcactcccctatttattgtagcactattcacaatagccaagatttggaagcaacctaagtatccattgacagataaatggataaagaaaatgtggtacatatacacaatggagtacgattcagccataaaaaagaatgagagcctgtgatttgcaacaacatggatggaactgcaggtcattatattaagagaaataagccaggcgcagaaagagaaacttcgcctgttctcacttatttgtaggagctaaaagttaaaacagttgaactaatggagatagagaatagaaggatggttaccagagattgggaaggtggggacacggggatgtggagatagttaatgggtacaaaaaaagaaaatagagtgaatagacctagtatttgccagcacaatgaggtgaccatagtcaaatataatttaattgtacatttagaaataactaaaagagtgtaattggattgtttgtaacacaaaggataaatgctggaggtgatagacacctcattgaccctgatgcctggtattacacattgcatgcctgtaccaaaacatctaatgtaccttataaatacatatctactatgtacccacaaaaattaaagataaaaagaaatagtagatataatttctgcttttgaataggttattatttaaaaagaaaatagtggtcaaggcaagaaatatgtctttgcctatttgatatgctagaatggacagaaataatggcaaagtttcattcttgtgtatgtgtgagaatgtgtttgtgtatgtaacatatggaatttctggcatatatatggatatatatgaaattcctactaattttagaggtatagatctaaacttgttctggagttgagaattatgtcatccctcagagactatatttcacagaaatactgcttctggtcagaagtactgtggatcttaatattaaatcagattcttggccaggcacggtggcttttgcctgtaatcccagcactttgggaggccaaagtgggagaatcacttgagcccaggaattcaagaccagcctttgctacttagtaagacttcatctctgcaaaaaaaaaaaaaaaaaaaaaaaaaattagctacgtgtggtaatgtgtgcctgtagtcctagctatttgggaggctgaggtgggaggatcgcttgatctcaggaggttgaggctgcagtgaaccaagatcgcactaccccacttcaccctgggcaacagagcaagaccctgtctcaaaaaatcaaattctcatataccaagtaattgtttgttttcttttaatatattcctgaccttggactttacacctccaccatttttaggatttgtctgattagcttttaaaattttgttctggattttacagggtttgatcagcataaccagttgacacaagtgcagtgggatcttttggtgggaaagtctgggggtacctgaggcacacagaccttgggtggggctagacactggctggttaaagaataagagtctatgggtaatggagatcaaaataggcctgagagctacagaatcagttgcagaatcagttgtaaaggaaatgtggagaaggcaagcagaatatcaggtaactcatgactgcaaagccgtaattatagaaacatttcgcttatacagaccctagtgtttaacttcagtgttcattgaagaggaactggtatgtaagtgatgctacatcaacatggcacaatcttatcaagtcattacaatgaaaaatatgaagactaaatgcttgacaaatacatttaaggtgtaatgttaaatagaatagaacccacagtgtgatttcaaggataataaaattgtgtgaaagctaatagtcaataaagtaattctattaaaatgatagtttgcagggttttaaaaataattaaaataatgtttttcatatatatcaatttttttctcaatcctgtgattaccatgagataaaataatgtttaatataatattgcctggccaggcgtagtggcttacacctgtaatcctagcactttgggaggctgaggtggatggatcacctgatgtcaggagtttgagaccagcctggccaacatggtgaaacttggtctctactaaaaatacaaaaattagctgggtgtggtggcgggcgcctgtaatcccagctattcaggttgttgaggcaggacaatcgcttgaacctgggaggcggaggttgcagtgagctgagattgcaccactgcactccagcctgggcggcagagtgagactctgtctcaaaaaaaacaaaatataatattgcctttcccataaataaatgggaaaataaatccaattcctgcccttttaaagacaattaaaaggagttttaggtcctgccattttaaagacaattaaaaggagttttaggtcctgccattttaaacacaattaaaaggggttttaggtcctgccattttaaagacaattaaaaggagttttgggtctctgagatgtgtgggctgtggggaatcagattggccatttggctttttttcctgcagtcttaaccacaaaattgagctctaaggattcctacactaaatggggaagcaggaagagcaagtcttaaaagattcaagtccattggctcacccttctcactggccagcctgcttaaatttatttgaacctcactttctacacttttgattggggtaggggaggggtagtaggaataatttatgatgctttttacaagtaatttgatgcaaattatttattatgtaaaataattagaaacccagagaacatttatgtaaattatctgaatcccagtctcagtgataagaaaaacttagatgtaaatgttctacttttcagaagaccaaagggcctgaattttatatctgtaaaggcacaagggaagaatataaattgaattagtaattaaaggaaggtctgaatccacagacatagcaaagatggaggattatatatatataagggtaatagagagggacactgacattaaaaggaaatgtgtagccattactgtgccagaaaaagaaaaggaacaatatttatattggttgtcacttggaaaattaatatgtaggatgaagcttaagaatctaagcacattttcagattatatttctggattgtcctgattcaaaaggataacttgtgtgtgactgatttgatggtatatgagtcagaagctcaggctgccataacaaaatttcataggctgggtggctcaacaggaatttctttctcacagttatgaaggttgggaagttcaagatcaagatgccagctgacttggttccctggtacaaggtctttctttctggcttgcagaaggccactttcttgcagtgtcttcacagggtgaggggggaaaggtgggagagagggagagaggaagacagcaagtcctctggagtctcttcttatgagggcactaatcccattatgagggtcccttgggcgcttctctcatgacctcatctaattctaattgcctcccaaaggccccatctccaaataccatcacattaggggctacagcttcaacgtaagaattttggaggaatgcaattcagtccataatagatggtaattttgccagcaggtaccctatcttatactttttcagcccctaagcagggagctcattctaattgtagcacatgtgctctcatggagatcagagtcagtattgtttgattaaaggtggtagcttactaatcttttactcactgtgatatgaaattcaatcatactttcgtagtagtctatggaatttatttcagtgagctggtctgttagaatgctaagcagcagtagcagtgccattcatgtgtttatttttttcccttttccttttctggaacattatatttaatacatgttaaatttttctaagatacaataaatttatgaggtctccttaaaagatataatcattaatacaatagtttatcatgggtaagttaaattaaatgtagattcttcataggaaaaaagtgaatgtttatgttcatctactctgtatgtcaaacattggatagaaaaatggtacatcctgaacttggctagcactcctgtgaccaactcagtttgtctattctgtgccaaaataatgggttaattctgccattttagttggaattattagtgccttaatccccctacatagtcagatacagtggagcataggatgctggaaactttcctttagttttttacatctttcaagtagaagaaaagaatgttaagaaatcccttggttttgacctttgcagatgctctcattaatcaatagtgatattttaaagaattgatttttttaagcatacggatattgtcctatagacagaaaaataatcaaaatcaaagataaaactggaaatagaatcttgtttgcttttttgtttctttgcttttgtttttgtatttcactgtgttcttttttgaggtcctagacagaattaaattagaaatctgggtgataagactttttaaataatatgactgatgattttatgtgaattataaaatatagttccaattctttttttgctttaagcccaggacaaagattaaatgttttcacaatgataaagcttttgtttctgttcatttttgtttctttcaattgataggacatggagaaagatttttgcatttatgtttgtataaagtatttcagggccaggcacagtggctcatgcctataatcctagcactttgggaggctgagatgggcagatgacttgagtccaggagttcaagacgagcctgggcactgtggtgaaagcctatctctacaaaaaatccaaaaattagctgggtgtggtggcatgcacctgtagtcccagctacctgagaggctgaagtgggaggatcatctgagcctgggagggtgaggctgaagtgagccgagattgtaccactgtactccagcctgggcaacatagcaagacccggtctcaaaataaaataaaataaaataattccatctgctgttttcttggttttatatctcttcctatagaagcatagttaacttgcttctttgaaggtagctgaatttttaaaaacatacactaacatggaaaatacctttggtactacatcttggggacgaaatttaataccagtatgtgccatttatagcaattcccgacaggcattacttatactaatgtgtatcagtgttcttgtatgatttgaagcacaataattttcagaacattaaatttctatttagggaaataattagatttcctcatatttcttcagtaattaaataatagctatgacaacacaatatagcatttatttaaaggcattttctattttattacctttggtttttttaatacggcattttattcaacaagaaaaagctactacctttttctattgaagataaacattaaaatttatgggacaatatacatgggaaaagttttttttcttttatattatcctacttaacatattgtaaataaacatatattcttttgcttttcttttagttaatgctttcttagaaaaaatttaataaatgtgatgtaattattatgaaaagtcagaaaaacattaatgaaatatcaaggtaattaaaaaactacttccctatgcttctgtcaggggcttccagcaaagtctcaaaagattttgcttttttcacaactgtttaattaacttgagaaaagtcccaagtgtacccttattacaaacatccttcagaaaagtggtgactatgatgtgtatagtggtgtcttcaccagcagcaggaccaacgtgttggggtttgcaggtgaaatttgactgtaatttatttacttcagtcaaattttaatgctgtaatacagataattttgtcatgaactttgccaaactatctcctaaaaccaattctcttatttgttgcttcataaagctgttttatagcaaatgtatactgttcttcttcaggtctgtacattgcctggtctgggcttctttaaggaaaagctttctcttaaaatactgtttgcttcccagagatgtgtctgtaggagaggattcacctgcaaaaattttaagagtttcccgggaagtgcgtgccatggaacaggagttgatggatccccactgtgttctctacaggccatcgtatattgaagcagcttaatttatcctcattaaaacaaaacacaccttgaccttaaagggggaaaaatgactaatctcattgtgtatattgttttcctttgggtgtatctcttaaactgtctaacacttataagcacactgcctgcaactctgcagtcactttcacatatattaagacagttaagtcttagagtaacctttgaggaaaaggtattattctaactatactgataaagaactgagactcagtgaggaagcatttgccaagattctatagcaagttatgaataaaactaggaatttgagggctttttggttcaagtctttttttttttttttttttttttagacggagtctggcactatcgcctaggctggagtgcagtggcacgatctccgctcactgcaatctccacctcctgggttcacgccattctcccgcctcagcctcccgggtagctgggattacaggcacccgccaccatgcccggctaatttttttgtatttttagtagagacggggtttcaccgtgttagccaggatggtctcgatctcctgacctcgtgatctgcctgcctcggcctcccaaattgctgggattacaggcgtgagccactgcgcccggcctgaagtcttttatggtacactttataccagttcactcttccttttgtattctatccagtgcaggctgcatatatagagcagaataggaaggaattctgcctcaagtcctttttatttctgtgtatctgtcaaggttgttagaatctctgcgatagcataatccaagtcattattatatttccttcagagcacagcagtggccttctgactgtactatgctcctcacctctcagcagccagtcatctttttgaaatgtaattcagatcatgccatccttctgttcaaaaaccgtcagtgattttccattgtacttagaataaaatccaaagtacttattttggtcttcaagacccagcacgttctggctcctgcttacctctccctcacttgctcagtatcatctgaccatggttcctgaaataccttaaactcttccttgcctcaggaactttgcacttaaactttcctttgtctgcaggtcttcaagttccttaaattctttgactccctccaactgatccttcagatttcagcccaaatgtcatttcctgaagaaatacattctcctacttcctaaactaagtcctcctgatttattcatgttttttctctctcctgacatttataatttgcctttatactcatttagaaataacatttagcaagcccttccagtgtgccaatcacctgcctttaaaccttatttgtagatgaggaagtaaaatactttcccagattcccacaagtgttgaaccagggtttaaacccaggtttcctcaacaaaactataaactctgggaaatagaccgtgtctatgtattattgtagctccagtgcctggtatttagttggccctcaacaaatagatattgaacaaatgaacctgtagcaatgactttttttttctaaatagctttattgaaatataattcacatacagcaatatctgccctttaaaaatgtgagattcagccaggcgtggtggctaacgcctgtaatcccagcaccttgggaggctgaggcaggtggatcacgaggtcaggagttcgagaccagcctggccaatatggtgaaatcccatctctactaaaaaatacaaatattagctgggtgtggtggtgtgcacctgtagccccagctactcgggaggctgaggcaggagaatcgcttgaacctggaaggcagagattgcagtgagccgggatcatgtcactgcactccagcctgggcaacagagtgagactgactccgtctcaaaaaaaaaaaaaaaaaaaaaaagtgggattcagtggtttttagtatgttcacagagttgtgcaaccatcatcactatctaattttagagtattttcatcaccccagaaagagactctatacccattagcagttactttccacttcctctcaccattctctggaaaccactaatctactttctgtctctgtggatttgcttagtctagaaattttatataaatggaagtataaaacatttggccttttgtgaatggcttctttcatttagcctaatgttttcaaggtccatccattttgtaacatgtatcagtgctccgttgctattactattattttattatatggatataccatgttttatttatcccttcttcacttggtgaacatttgggttgtttctactttttgggcttatgaacgatacttctctgaacatttttatacaagtttttgcatggacatgtgttttcaatccttgtgagcgtatacctagtagtagaattgctggatcatgtgataactctatcatttacattttgaagaactgctgaactgttttccaaagtggcacaatgactaagaaaaccagagcttgacagcatttaaagtagtaaaagcagattttattcaggactattgcaggaggggaaaagagaccccagtatagaactgagcttggttctgagtacaaggaaaagtaggggttttatagccagggagcagggtgggtaggtgtgtgtcagtggattgaaaattactgagaagataaaatgacctaacaggagtctggctgaatatgggccagagtgatgagctgtctcctgggggatggttggggttggggaatttggtcagattttgagggtgactagaagggtgggagattgtggctaaagatttttgcaataattggacgatgcaaagatggacacaaagtttaaaagttgagatctacttgggaagaggattttgaggagcctgactaaagtttggtcaaagactcatacaatctttgtcagacccaaaacagacaattcagctacagtgctttgtctcaactttatgagcaaggatgcttcccttaaattctcttaaattctacacagtgacatttcattctgcatccagtggatatttgttgacatggtgttggctgagctgggatatagcctatggagaaatttcatgaagctggcaaagctcctgttattttctatttcatgcttacatattagtgttttgttaggttgtttttctttttcttttttcttttagatctacacggaaagatttggcaggtctgataatttaggcctctggaaacctcagttatgctataaagagtaaagggcaacatcatatgttattgtagggttcacagtttaggatgcttggtcttattttggtaaatactatttctattataaatgcacatttcaaaaataatgaatcatatatttttctttttttttctttttcactattctttcattttataagaagcatttcctttttatgtcttagggtaggtagtggctccaatctagcactaagttgtttttattactattatattatttcacttaccgaagtacagagtaatttgtttacaaattaactagcaatggctaagaatgatttaaactttctcacaaattgtttcatcctacgtttttctactttaccaccacctatctgcagtatgttacacatcttcaattaatgcaaattcaaagttatttttataattgagcggtgctcctgaaaataattggctgtcctggggagttggaaatccagagttgttccttactctattagaaaaatgaagtcttccttttagtgactaaaacagagcttcctaaccttcaccaaggttaactgcatccttttctgtgcagtgagcagctgacgtggtgtgccagctctcattgtataggcttttatcacaggaagtagattcaaatgattgtaattgcttgggttacattaatattcatggcacatgcctcttaccttacatggcactcattctctgtgtatttaattaatatgccattttgcctttcattttggcatggggagccatgattttagagggtgtgaaacagcgagcagctggggaaagaatgaatacccagaacccagtgccaggattaacatactgatgcagatattctgagaagggatcttttgaggcaggttaaaaggaaatgccaagtggaaccaaagccgaccttgcactagcacgtgatactagtcaaggaggtgcttggcttcactctgctgcattttgctcttggattgccagctgcttcaagccagctgcttcagcacagctaaaatgaaggaaagaatattatcactatatattttgtatttgaaaatctgctggtaatttcaaaagcttagaatgttgacagtagcctgtagatgaaaatttaaaacttagtgatcaaagtatcatatccttcctccctttgcagaattatttttaaaagattgtggcttgcctgtttggacaattttcagaacacagggggaaatcatttttcactttttattataatatgattagatgtaattgaattttagtaagtacattgcaacaatgaatttcaatgggcatacagtataacttaagttttctggatgtagattttgcagaaagaggaagtaaatactggaatttaaatgccattttccaatggacattccaaataggagcttgatacgtaattcagtttttcccttctgctgtcagttgtcccattacatcataaacttgatgtctagcaagagacaatatcactcctttttgtgttcctttggttgattattaactggaagatccccttgacttgttacttctgtggagactttgggtgctcatcaagaaacaagtacttaagagctttagtaattgatatgaacccaccaggtgcatgtagaagcacagtttggtttatgggttaccagagtgcccctgttgagctttgctccaggtcctactgtatattttaggctcttcccttcagttcagtgcttctcaaaggccctagagacagagataggaacggatgcccttggcagctggaccacaggcaaaagcagctcactgctgaaacactgtacccttgaagtccttttaaattaggttaattttgcactttaccctgcaatatatccgtgattactttaatataaaacagttaattttctaatcaccaaatgaaattgatgctctagaaaggcatggcatgtttaaattggggcttcttgatgttatatgtacctgctttggagaatcgtggacttagtgtggctgtagggaaaattcttttagtcctttctttgaaatggacctgatagatacaaataactttcaggacatttggtgatggaatttggttaattagcagcttgtttcagctttctactctgagtgttgtgaaaagaggccagacttaaagtccagtgagttcaagacctggttcactattaacttgtgatgttgtacagtttattaacatcttcaggcccatttctcatctgtaaaaggagacgatgaaccataaaatataaagcaccattttccaaattatattttgtgaatgattacttgcaaaaggtattctaagggtggttgtcagggaatgggaggagggggaaatggagagttgtgatttaaagggtataaagtttcagttttgcaagatgagaaagttctggagattggttgcacaaccatgtgagcatattggttttgtttgtttgtttgtttgtttgtttttgagacaagtcttgctctatcgcccaggctggatgcagtggcgcgatctcggctcactgcaagctccgcctctcgggttcacgccattctcctgcctcagcgtccggagtagctgggactacaggcgcccgccaccatgccctgctaatttctttttgtatttttagtagagacggggtttcacggtgttagccaggaaggtctcaatctcttgaccttgtgatccgcccgcctcggcctcccaaagtgctgggattataggcgtgagccaccgcgcccggccaatgtgagcatgtttaacagtagtaaattgtacacttagaaatgattaagatggtaaattttatgttatgtgcattttttgtgcatttcaccaccatctaaaaaactatattccagcctgtaatcccggcactttgggaggccaaggcgggtggatcatgaggtcaggagatcgagaccatcttggttaacacggtgaaacgccctctctactaaaaacacaaaaaattagccgggcgtggtggcgggcgcctgtagtcccagctactcgggaggctgagacaggagaatggcgtgaacccgggaggcggagcttgcagtgagccgagatcgcgccactggactccatccagcctgggcgacagagcgagactccgtctcaaaacaaaaacaaaaacaaaaacaaaacaaactatattctaaaagctccatctttaaataaatactaatttgtattacaccctcctgctagagaatgacactgcattcagcatatccaaatgtcttagacatcctgcacttaaaaaaaaaaacttttaaactttaacccagtatttctcaaattccttctcccaattaatttaacatttaatattctatggaacttacacttgaaggagtcccatttgggaaaaagttatctgggatctttccagctcaaacatgtttttattcttcaaagacaccatatgaaaatatgggctttgccaaagtaagatatttgataaatattaattcaggccttccgaaccttttccatatcatggcatgtatagaaagtaatatttgtatggcacactggggtaaactgacaaggtggcttagggctgaggagtgcggtaactcagttacacccttggataaagatctctaaccaggtgtttaaaaagttatcactgaggaagctgcatgacatagcttgttctccagatgtcattagttagcatgtttacacagagaagcattagaggcagatcatacaaaactctatgctatttggtttgccttggcagcaatttattttccactttagagaaaccagaaactcttctgattacctatggctgtggatattattggtcattagacctaactggcaatccctcgtggtataagagtgagggataagaggtttccaggaggataatactcttccacagtctatttaatatactcaaatgatgaattcaacagcctcctatttttaaagcgagagcatatatcctaatgtcataagcagaataattctcatttaatgggggaaatttttttcaacttcacatttcctagaggaacaagtatttggtgtagtaatagggattggatgtgggaagaaaaggacatttatattaatacattcttaaaagaaatacagcatagatcagtgagtgagatcaacatttgtcacgcctcaggcctttttctgaagtcatcttcagcccttcctctccactctattcctcagttggtatcattctatagtatcacatcttctgaatggcttacttaaagattctagactgatggaaaaaaacaaacaaacaaacaagaaattgattagatttgacaacgacctacatcattgttcagttagtatttttattcagctcacctagaaactaagcagtcatgatccacttagtaacagatgttttgatttcagaattgccaggtcttccccagattatcttttgtacttactgtcattttcccctttaaacaactttttttggccttagtctttactgtcttttctgagaatcctattagagtttaagatttaaaactagatgtagaaatacatccttgcttagtgtcagggagccactgtgaaatcccattgacaacctattctgggctttagagccagaagtttaattaccacctattgagcgagtttgatttgtcacttcttgggttctggccaggcagagctaattcctcctagcagagcaaggtcggtgggcaggagccagaattgagaaagtgacgcagtcacttcagcttgtccagcttcaggcgtagatgaagggagttaagtgtgccagattaagtccaaagtggcacacaagcatgaggggcaataagggcacctggtaaaccacagcaagagggagtctgcaactaagaaagggggagtgtggtgactagcaaggagcaagcgcttgcaattttcagaagtccaggcaagctgtgctggcaccagacaggaaacattgcggctgcgcttcagtcagaggctggcttcagcctttgaaggagactgacagggggtattaagtagttactggaatgagacctgtaaaaaaggcagaataaaatcagtaataacaactgaataataacaactgaagaaatcaatagactatttaaccacatctgtaggcctctacacaatctagtactgtggagtattaaatgaatgagatagatttagaaataaaaaaccattcatggtatattaaggaaaattcaaatcatagtatattacataatatgttagtgaaaggaactttgggacatggtagtgtagaactctgttcagatgaatgacacaaacaccttaggcatactttatagggacagatatactttgtttgccttttgttttcatccatctatcctgaggaaggtccacaattattgaataataactgcctaaagtggtaacatgtctctggtactcctgaaaagaggcagcttgttgtggagggcagtgtgagtggttagggccacaaactttggatcccaactacccgggtttaactctttcttctactgccactactcgtatgactcaagtccttaacttctctatacctgttaccccatctgtaaaagggggacagtagtagtacatacctcagagggtagttatgagaattaataataatattttagaaatctgtggaaaagtatctggcctataattagccctataaatgtttgttaagcaaatacacaaataaaatacatactttcccagcttccaggaatcaggaactaacttagacttttcttttcatctcacgtggatattgttctcgtggaatgttgaacatttcttgaagtattgttttaagcactgtggaaaaaataatagttaaaattgttagcagatcatggaattggatttttgacctcaatccttttgaaattaagaaaaaaattacactagtcactttaaactggttgttctatatgtttgtgctctaacaatatagaaactagatattgttatatgatttcctagatacagttaatctaggctgggcatggtagctcacacctgtaatcccagcacgttgggaggccaaggcgggtggatcacttgaggccaggagttcgagaccagcctggccaacatggtgaaaccctgtctctactaaaaatacaaaaattagccaggtgtggtggcgcacacctgtactcccacctactttggaggttgaggcaggagaatcgcttgaacccaggaggcggaggttgcagtaagctgagattgtgccactgcactccaacatgggcaatagagtgagaccctgtctcaaaaacgaaaaacaaaaacaagctactatcttgtttagatagcggatcttttccccctcatagagagtgctttggcagttaggaaaagtaaatcacaccgaaactgtttatggcgacccccctcaccccacacactgtgagctagttagacagaagataatgcaatttacaaatatctgtgggtggccaggcctgattagtacatgtaaaagaaaagtcattagatacactgtgacttcaaataatgaggcagagtaataggatttgttttaataagattttgagagattaaacctcctaaatctttgtagttctgtcaggtaaagttaaggaaaccagcactccacaacataaacaatggtgttctatttagaacccctgcaaaattagatgtgattggcttctcctaagacattgagttgtagttagttgacaggtttgttggccagtaagcagtggtgctatggtgaatagtgccctttttgtatttgtattctttttggtacagatgtataatctcatagaataatttcaaattaattagtattgcagctgaactatgtgatgctatcacaatttgggttagtgggtgaatttagtagttttgggtgctgttcattctttctagcttaaatccaagtaactgaatatttaaaaactttcttttgttgataaaggtgataccagtggtatgctaatatggtgaggataatttttattccttcctaaggatttttgtgaggaataaagatgaaaataattactctaaaacatattgcaaatctattaaaatatatcctattcatgaaaatttatactaatggccagtatccttaatgttacttaagttcataagcactcatagttcaaaggtttattttttcttattttgaatatatattatatgccattgaactcaattaacatagtgacaatttttattttgtttcatggtagaagttgtacctacagaaataaaggagtggaggtaggtagagaaggattagaatgggaggtagagcgagataatgtagtggctacacgtttctttgctcccaaattaagatatttggactaattggaagactgagaagttcagcctctcagcacagcccattgtttccctgccatccactcctctggatgtcaggaagaagtgagagatggaaagatgtgtttgtttgctctcctccacattgtactttttcctgcttccaggcctgtctgtgtgaggcctgaaccagtgtgaaaaaagagagctggagaagaacatacatcctgtcatctccctgcctttagagttttctagaacagttgcttcgtaaattgcaggggattcccataagtcaataatttatcctgatctttctcaaaaataagagaatttcaagatatctcattttgaaaccagcccaattgccccatagactgttctttttgataaacatagaaattgacccttctggcattaaaaaagttgaaacttatatttgatttctcttgagttccttcctcaggaaactacctttaggcctctcacacaaagtaccaaagaactgaaaccagatccctgcaccatatgccaagagatcccctcattcaccatgtttgcttctttgcccctcccaacttcctggtttcttacacattgttacattgcttacctgctatataaactcctggtttaatcagtcagggagatggatttgagactgaactcccatctcctcagctacagcacctgattaaagccttcttccttggcaatacttgccaccttagtgattggctttcagtgtggcgagcagcaggacctagaccaaacctccggtgtttcagtaacaatttaaaaaatagattataaaacaaaggtggtacagaaactatcttgataaatctgtggtgaaactgaaagtagatttttcatttccagattatcaatttgggatttagctgatcaggataccaatttacaaattagccaatccaatatatgtgtatgtatacacatacacccaaaacttcttagtatttcttgctagtgaggcaggatatttccttgaccccttaatgggtctcgcaacaggtgccttgtttactcagcctgctgctctcaactccttatgggagggagtatgcgagcaaacaaggtaggaactggagtgcatgagcgctggagtcagctggccacttgggcactggcaggatcaaactccactcagacccactgccttccaccccttgtgggagggagcacccaggtgagtgggtacaggagctggagtgagcacttttgggcactggtaggagcgaactctgtgcaggccttgtggcagcatccaggcaggatccctgcgactcctgaagccccaggaggcatgttacagtgcccttttagctctgccatccacggatggcttaagtgttaacagctcagagggccctccaccctttcacatgaggcggctgtcctctgccagtgagggcaaagggccagtgtgacagccttttgtatctgcattcatggctcctgagctcttgtctggcacccaggagaaacaagtttacacaaacgaattggatggtaaatgtggggaatttttcttgatgatgaaagtggctctcagtggaaaggggagctgaaaaggggacagggggctatgtaatcttcccctggagtctggctgtctccagccagattcttttttgaagtaatgtcgtcaagctgtgtctccgaagtcaagccacttctctgcgatgtccagctgtagtctctgatgtccagaggcttctcctttctctgctgcctgagtctagggtttttataggcacaggatgcggggtggggcagaccatgggcagtttaggaaaagggaacatttgagtgggaaaacagggatataagttctcactttgggccgtggtttcaggtttttcagctggagggtggggctttgccatggacctgcccttttctgtctagaatttatctgcctcctgtccccatcatcaggaattctcagtgatttataaatattgtcttattattttctgtaacatcacttagaggaaggtagaagtataacatatacatctatgacagggtatggctagcacacatatttattgaagattctaaaggactgtcctcaaaccagagaaagagtcacatttaggaatccagtaactctgcttttatgctactgcagacattgtgttaaataggtgttataatgcaagccataatagctccagatgacaatttcattgagtttaaccatttagaatggataatatgttgtagtagtaataatagttattataggctgcatgtggatttgcctcattttaagcaaacctgaaaaaaatacctatgttatcaaatttttggatttttgccaatgtaatcagtgtgggtttgagttctgttgtgaaagaggtattgatttctttctttttttttttttttttttgagacagggtcttgctctgtcccccaggctggaatgtgatattgattgctaagaactatatttattagtgagattagccctttgtgatatgagttgcaaaaggttttggattcttcacttaagtgctatgctggagttgtcattagagatttgtcatttgtctcagaggtgaaaagagccttgtagttcaaatctctcaatctatagataagaaaaattgacccagagacattaagctattagcccaagagagaacaaatctgatccctaaatcttttctaggaaacaaggttccatgtggctagaagggactgaaggacagagagaagaactcataggtgcagccatgttcatgtagtagttttatacaactggcatcaaatccaaagcatagcttgtaactccttgatgttgagaaggtgcagctgggcattttaacaatttaacagtagaatagaaaagcaaagatttcaaaaactataattatgtttttacaactttagttttaggagcattgctcattagttgctaattaatccatatatctggtgaaacagatgaatagcatgtatttggttatcatataagcattgtgaatccaagttaacatgttactttcattctttctaatgtaattattatgctattatcaatttgttaccatgcagtaatcatgcagttttaagttactgcttaaaacccagagtgaggcatagaaatttatgtcgagctggacagagctgaatgtcagccacatggtagcaagatagatgctttgcatcagggtcatttctactattataaagcttgaaaaaggatagaacaagaagagtcatggttgtatggatgttgttatgggtttgaattagcatatgtaggacattccagtacaattaataaccactcagttaattggttggggtgaattctcttttagtgtttcatttaccttataattagctgtaactcagcaattaagtcatgacaccagcccactgtgacactgaaggttggaggatagtgcttgggtgcattctgctcatattaagtcagagttgttggtttcctaagtgcctctcattctcttttaggttcttcaataaatctatgtgttattcatatgtagtcacaaatgcactgaaacaaatgccgtctgccccaagaatctgcagattccacatctgcagattcattcagtcaatggcatattgaaaataatattctgaaaaaaatgcatggttgcgtctgtactaaacatggatagcatttgttttttactcattactccctaaacaatagagtaaaacaatagagtaaatgctatttatgtagcatttatattgtattaggtattatgagtaatctagatatggtttaaagtatacaggaggatgtgcataagttataagcaaatactatgacattttatgtaacagacttgagcatcctctgcttttggggtccacagggtgaggggattcctagaaccagtcctccatgggtattgagggacaactataatttcatacaggattttgtgattgtagcaaactgtaaaaattgtttcatgttcatgtactatctttctaaaactagaattcaggttacatatacacatataaatactttttctcattggttcttttagaaaaactttttaagacaggaggattttcttcttgatgttgttgctgctattattctgtcaacttattcttaaataacttgttttaactgaaataaaactgaaatattttttgaaaattcccctaaattcctgctttagaaaatagcctgtattgtttgtttttaaagctatatatgcttttatttgttaccaaaataaaacaagtgtgtttaaaaatatttaagactagagaaaatggaaaaagtgtgtaaaataaaagttccatgtaattctatcctccaaagacaactacttaatggattctagttttatgtcatgcttaagaaaccttttcttccactgattaaaatacaccactagtacatagagtagaaaatttcaagtctgtagtgaagaaaaaaaatcacttacagttctaccatttggagttgagcactattggaatgtttgtcattccttttttttttttttttttttttttttttttgagacggagtctcgctctgtcgcccaggctggagtgcagtggcgggatctcggctcaccgcaagctccgcctcccgggttcacgccattctcctgcctcagcctcccaagtagctgggactacaggcgcccgccactacgcccggctaattttttgtatttttagtagagacggggtttcaccgttttagccaggatggtctcgatctcctgacctcgtgatccgcttgtcattccatttttcagtgatacatgttacagaaactgtccttatgtttgtgtacctatacagatagctaacgtatcatctatacactttaaacaaaagatgtcaaactacacacacttatataatttgctttctaaactaaaatggagtgatcattttcctgtcatttataacttgatttttaatggctgcatactattctatcatatagatatttaatatttaaccatttttcttgttgtatatttagtttttaggtttttttgcttttgcaaataatatatttatagatatatttttgctgaatatccttgaagataaatatttttacatgcctattattatctccttaggctaaattcccacgtgtgtagtgatttttaaagaacaacaaaaatatgctcaattcacatgtatgaacttatgggattgatgagtggatgagaaagaacccatcagattttcagaatgacttcagcaagtaaatttgaagattccaaatttcaggcttttaatttaaatagataatctagctttaaacattctgcatttaggtacttaaatattttggttgaatatatattaataatcaccatatttgtgcagaggaagcctattgtgcatattttaataccaaccttatttatgccattgagttttctatccattgattttttggaactgtgtatatcacaccaaaatccaaatccaaagtgaaaaagatagtcaaacacaggtgttgtgggatacacaaaaacaagcaaaactagattttcttggagaaaaagggtatgatgacttcccaggatgctttaaatttctttcttgtttttagctgacctcactctaggaagagaaaataaattatattagttattttatttccaaataaaagcaaaaattataacttgaaaatataaaagggtattacctcaaatgttgattaaaacaatagttatatgactagaataaaatttggactttaacatgtagaaactgtaatagctactgtttagtgtgctcatagtaggtacctaacatggccctaagaacttcttctcattcttattaatctttattaaggccaggataataatatatgcatggcaggtctgaatgcttcaattttaaatgcttctcaaattattcatctttttgatgttttagatccaggaaacctttggatgcctccccacaatttattaaattttttcaatgtgttaatcatttcctttattatttttatagaaattattttaagtgtgatttggcacgacctgtagcagaaattttaatcatttcattcatctttttactatcatagtttatctgagacataatgatttttatgacttcaatgacacctgaaatgaaaccagtactctaaagtagtttttgtttaacatgatttgattcttttagaatttatgttttgccagagtgaatgaggaattcagatataatagtgactgtacagtaatgagtttcatttctagctagctatttttatccaaggaattggtattctctaaaatgacaattgtaaaagatgactaaaattatttttgaaacatttttagacttgatataccagggttccactagagaaacagaatcagtaggctacacacacatacactgagacagacagagagaaatagagattgagagagagagagagagagaggcaatgagttgggttccaggattttgggggctggctaggcaagtctgaaatgggtagggtgggccattaatcaggaagggcaggctggaactcttgtgtctaagctgaagcggctgtctgcaggtcagatttctttatcagagaagcctcagctctgctgttaaggcctttgaatggattgaaccaggcccacccagattatctaggataatctttacttaaagtcaatggattgtgtattttaatcacatctacaaaataccttcacagcaatacttagtgtttggtttaatagctaggggcagtagtctacccaagttgacacacaaaatctcaccatcacacttgatatctgaaccagttcaatgctcatatagaaacacccacttcattaataggtagttataatttatccatgataaaaaccagaaatacccaatttgactacttaatgctggtactagtttgggctatacacagtttgcatgttacaaaaagtaaatctacccttgaaataataatatttaccagagttgagaatattgaaaagaaggtatgctaggctatatttaggatttttataaagtttcgaggaatggcagcatcattgggatactgatcgacttcccaaatgatgtaactggacaaacggtcatttaaacctgtgcttcttaagcggggctcataactcccctgaaatatattcttattttcttctgccattagaaggactttagtagaaaataccagagaagcattgcttttatttaaggtaaaccaggggtcagcaaacccttttctgtaaagagccagacagtaaatattttcagctttgcaggctgtacagtttgttacactatttaactcagctgttgtagcatgaaagcagtcatagacattacataaactaacaagcacggctgtgtttataaaatgtatttactaacacaggcagtgggctggattttgcctgcagactgcattttcctatccctgatgtagacaggtctggtgtgttggttaaatagtcgctctgtttgtaataccatacatatctagtgacaggatgtatttcagcacagtttaggaattggtcaactattgaacaccttccatttttctgctattttattttattttatatttttattttattttatgttgagacggagttttgctcttgttgctcaggctggagtgcaatggcacgatcttggctcactgcagtctctacctcccagtttcaagcgattctcttgcttcagcttccagagtagctaggattacaggcacccacaaccacacctggctaatttgtaatatacatacatatatatatttttgtttgtttgtttgttttttgagatggagttttgctcttgacgtcatccaggctggagtgcagtggcacaatcttggctcactgcaacctccgcctctctggtgattctcctgcctcaacctcccgagtagttgggattacaggagcctgccaccatgcccagctaatttttttgtatttttagtagggatggggtttcaccatgttggccaggctggtctcaaaactcctgacatctggtaatctgcccacctcagcctcctaaactgctgggattacagccatgagccaccgtgcctggccacatttctctgctattttaataagaacatagaatagaataagtataggaatggggtagtgttcaatctattaggggattaaagctattatatataaaattattagcacacaatatagagttatgatatatattttatatgattatatagcatgacttattaaatatatgtaatgaagcatattctcttaattctcaagaaagaaaaaaagtaagcattcatgtttgttttgtggctcagcacagaagctaggccaggtgcagagatttccttgtgagcatatggaggcagcactaaggcaagctggtggctgccaacttcctggctttggttccgcctcccatctcctccttattaacaaacgacaataatcaaagaaaaaggaagctgaaacattatttgagcatgtatgtagaggacataggcatttggtagaatatcatagacatccaaatacttgagtctgagattctaaattcagtagcaaaaatgctactttttactctaacactatgtagtcaatcatagttcaggcacaggctaagaaaccagcagattttccaattcctagaaaaatgacctagggaatagcacttaccatctttaggtattagtttcttcatctgttttagtcatgccttgtgttagtgatctttaagctggagcagatcaattcccatgtgttagaaagatgactcaggtggcagtgtagagtttgggttagattgggtgctgagagatggcatctaggagacaggttggggggatatgatcatccaggtaagaaaaaggaagattggaccactgagggcaacacagatggaaagaaatccaactggaaatacctgtgaacacatgcttgggtacaagctttatgtgaacccagggtgagtaatgctgtgggatccttccagtgtaagaagcccttagaacaatggttaggaactcaggcttcagcaccagttgtacctgaattcatatcctgggtctgccactgtctatctgcgtgactttggacaagtgacttaagtgatttaatcttcactttcttatctctagatacagacaggataataacacaaagttgtgaaaatttactaagacaccatgtaaagcatttagcccattgctggttgttttatgaagattctatgagtgtttgctgccattattattattcattattattatttgtgggaggaagtaaagttcaagtaccaataataattttcaaccattacaaattgtgattatataaaagttttaaaaatttctcaggaaccagggagcattctatttttcattctaatttgagaataaaattatattttatgtttttacttttctcaaaagcggtaggagcaaatcagttttaggttgtcattttttctgtttccaggtttttagaacagtagatacctgttctctgtaatttggtatgtctatctgtgtaatgcttaagtcagtcctggcgcttgttcctaagaaaaggaaaataagaggcaaatacatattgattctgtacaagaaaaagaataaaggaagggagaaaaacaccaaacgtcactagtgctctgtgacagaagagaaaaaggttgtgtttcataatacactgaggtagactttatattaaaaacatactctccccaatactctgcaagttggatttttttgaatatttcttttcatcagctaggttcttattttattttattttctctgcagctgttggtctgtctcatgttacattcccatcatttatgtatctggttttgcctgtgatgaagctgagaaatgtctcattttaatggtttctgtgttttgtgtctgtctgttttccagttttggggagacatttaaaccagtagtcatgtcatctcatgtaatgacatgcctctctgcttattctcccttctgttaccaaacaatatttatggctagcgtctgtatgcatgtgtgcgatgactatttgctatacagttgcctagagcactgtgaaactccacatgttcaatggagtgatttctttttgtttttctgcatgctatcaagtactctcaaagtgttccttcggctttttgcatgaaagatagctagaggatagaaagggacattccagtaaattctactttgtagcaaattgaatatagaggtttttcttccagtaatgttttcctcccgatttttatgtagaaagtgttttgttaaaattctggaaatgaaactcagaaaggaaattaaaagaaaagggaagaattgcatcaattatgacagataagagattaacgtacttactaagagcttttataaattagtgccattccaatagaaaaaaaggcaacacgaactagtaattaaattaaatttaaaaaattaattaaagcattaaaaactagagaaaatagacatagaattttaagcctagctagtaatcaaataaccaaacttccctcctctcccctcccctctcttcccttcttctccctcccccttgttttcttttcctttcttttttcttttctttcttgagcaggggcagggaggaatggtttctttcttttttttgttttattttctgtattttaaaaaatgttttgggaaaacaactttgaaaagcaaaagcaatctccatccattttggggatacacatttgtttgtttctatagtaacatgatggttggccttccagtggtaatactcatttgtaatacaactgggccagaggtaccttctgagttcatggcacaggatttcttagagtgaggttgactgactcattcaaacctaggactgtagcttcattaaccttgagttttaaccaattactgatccacctcaagaaacattgtctgcattctaaggatctaggcgttagacaattgctaattaaaaacatgaaatttctttctttttccttctgcattacagatgaatagattattcaccatgagggatgaccattttggacactatttgagataataagaatagatgtttaagaggggaaaatgccatttacatgggctaggagcatttttattagggatgaatttagcttgagatttgtttggtaacaaaaagcacctggaatttagatgcatcttttaatagattttttttttaaactggcttgccaatatttgaaaatatcagtgctccagtttccaccgactgttacccgtagacattacgtaaagccagatgcatttgtgatttaaccggagttcacagcccaggacctgaggagataattttaggtactttctggaaaaataactggtccttaggtacaaatgcaaagccaaacgtagttattggaattgaaaataataaagccaagggcttattttggacaaccatgcagctggagcagctgaatactaaaatagtggcctgtgtggtggtttcccctgtggcttcttatctccgtgggttacacaccctcacccaggggaagacagccttcttaatgcagcttgcagcaggccttcttttgcggggcagattttcctcagaagagaagtacattagtcattgaactgttagagaatataatgaaaagaaaaacctaactttggatcagatttgaattttactaccccatggcctgtagctgcttctctgactcaatatattatcttcctttaaggcaaactatttagttttcagttagtagagggtttcaaaacaaagcaagtagattaataaaaagtgtaaaaatcagaataaatagaatagaaaatagatttatttttattttgtcatgtaatctcggctgataaaacaggaatatacatatgtgtgtagtggtcagtttcaaaatcatgccagttaaagttctctgtgttttaatttttcttaaaggcatatataaaaaagaatctcagagaaaggagacacattcataatgattaaccatacatacatctttaaaagtttggtgtaagaatgaaccagtattatacttcatagaagggctgattgttcttgcagcagaaaaaagatatgagttttattcataatttacttactaactcattcaatgccatttatctttaacttaagtcacacttaatgataaatgctctcctctttactgccagactgcctgtagaagtagctgagctggctgccttaatttccttactattcactgtctttaatcacttcaaatttgactttggccccacttcaccaacatgcccagactctcgccctttatgtcacattgggaaagccacatcctgttgaatttaactctgcaacatctgatatgctcaactcccctctctggtggtattataggcgctcccctctgaaataattcccgcagctgcacattttacacactctaccccattgctaccagatgtgtctgtctttgtcacatctctggttatgaatggtatcttctttctgcctgctatatgaagtccacttttcttggcttggcatttgagccagcattctctcccactgcttctcatccgccctgttttccaatccaattcctttatgtatgctgtgatatctacctagagtccatactctctcttctttcctctctaatctcatgttcaaagcttatccttctttccaagcccagaaggaaggacatcccattcattaaccttctctaaccctcctagctggaagtaatgtttacttcctctagattttatctgtacttctcttctgagatgtttcatattctgtgttatttgtgtagccatctcattttcctgtctcaagggtaggatcagtctcattatcatgttattttctgcccccagtgtctagttcagtgtatgatactttttataagctaaatatattttagatattaataaatgtagagcatatatgaaagatgttttagaatatagatgttattccgttatacttgttaatattcttcttacatttcttagttatttccatgcattttagatttaacaattatctgttcaaacagttgattattgtgagtattttgaacccttttattaggttccagcacattaagtaacgaattgccgtattcagctttgtagcatgtaatcttccaaatcttactattaaagtttctgtaatattttttggtataacttccagtataggaagagtaaatgagaagctagtgaacaaattccccttaagataatggaaaagtcctagcacattttgcatggctgatgctgtgaagagccctttggagtactccagtatgaagacaagaacaaatgggagtgtccttttataccactcactccagccaccccataagagcatgtaatagctctctacagtgacactgcaccttgcaagaactgagcaatccaaacatttcaattccccagagcaccaagcactaagtaagaaaaaaaggccagtgcgtatagtacatacagataagcataaaataattaccaagggaaggccttacctttggccctcaaacacagctgttattttacgtagttccagtgcacatcttttagggctgtacttagcacccttctcaaggaaacattcctttatgcacactctgtcactcactccatccagcccatggctgagttaagagtactagctctatatttccagcaacaccagaattataattgcctgccaatttgtctccatgtctgcttctcccacaaaacctagagctccttgaggataagaactatgtatatatcatatatctttgtatcaccagtgttttacatagtacctggccacacgttgaatatgaatatctattgaatggccaaagctggtcatgcgcctttgaaatcacaacagatttttaagtagcacattgaggagaaaaggcagtttgaagcaggtacacaacaaataataatagttaatatctgatagtgtgtcaggtgacaaaaataacatgaagaagacttaaaacaaaacaaaacaaaaaaaaacctgtgcgggattacttacttttggaggcaataacctagagcacttcaacagtttgttttttgtttttttgtttttttttttttttgagatggaatctcgctctgtcgcccaggctggagtgcaatggcgcgatctcggctcactgcaacctctacctcttgggttcaagcgattctcctgcctcagcctcctgagtagctgggactacaggcacccaccaccacgcccggctagtttttgtatttttagtagagacggggtttcaccatattggccaggctggtcttgaactcctgaccttgtgatcctcccgcctcggcctcccaaagtgctgggattacaggcatgagccaccgcacccggcctcaacagttttttaaaaaactttcttgcatgctaacacagtactgtagtttacattcattttgatgacttagagttaccagtcaaagattgaaatatgttctggccattctttttaagggtgaagtcaagtatgtaatgcattttggaaagattccgttgtgaaattgtttttaaaagtgtctggtttaataggataaaaccttaactatcccacatgactaatttctgagggttctacatagccatagtcttgctatatgaggataatataagtatatctgggaccatcttgatttattaatgtgtagtagtcattgagtcttcctaatatggacttcagactgtacaggtagtctaaggatagaaacacacacacacacacagacacacacacacacacacacacacggcaaagtcccagccatcaaagacttgtagttttgtcagatttatattttcttatgaaggttattatcagaagtcctgggaaatggttgttataactttcctacctagaactctgccccttgtagtcatttagcgtttatcaaacattgagtactgtgtggaccaggctctgtgctgggtgctctgtgttggctgatggaggattgagacacagtgtgtgtgcttgtagggaagaggttcccagagcctggagcaccttgtcttagcaaagtttctatttctcttcaatgtaactatgtggaaggtttgctttgtgtacaaatagacatttattttttcttcctggtattaaatagtttatgagaaacagacaaacttgtaaaatagtcttcaatcataaatgaaagcatattttaaataattaaaaatataataagacttacttaggtctttcctctgttcttgaccagggtggagatcttcattatcaagtttcctgtaactaaaagggaacagatcgtctgagatcttgctccacttgtccttgagggttattaaggtttgtgtgtgactgggcgttggatggtccttcatgatatcagggaaggttgacagatggcctccctccagcaagggagaaggtgccatgaagactgaacactgcattgttcccaccaatacagtttgcgccagtatagtttcccagaccacaactgaggaaagaatgtgctcagctccactcctcagcagagccagatgcccagtacagcagaaacagtgtacctgtaaagttgcctaggcgacatcgggagtggaaggaagagtagacagaatgatttatgagggtttcttgccataggaatgggtctaaaattatacttccatgtcttttcctcaagaataaatgacacaggatttatcaaggggattgtgatacataaaacctcaagaccttatcagaccccaaggagaccagggccaagggcaaggagaggggcagcagaagcaacaaatgaggaaaagaagtgctcgtgctgtgcttttaatccttgatcgaactgatgctctgccttgatgtaaaactgatttttaaaaaacatgcaaatattgtgtatttaaaataggactagaaaaaaaaccacttactgggtgaaatgaagatattttatttccatattaaaaaaacagctcctctcagcatctactttagtattagcacatttgcaaagacagttacatgccagcatgtgaaatagcatgtcatggtagcagagggagaacttgtattttatttatgaacaatcgggaaagaaacgctcggggcacatagagttggtgtatcttagcaccctttctcggcatactgcaattagccagcattatcagatgtcaatgttgatttttattttcatgaattattatgttggtgatggtatcagttttatattgctgcctaacaaatttccgtaaatatagcagtttaacacacacttcttatctctcagtttctgtgtcaggagtccaggcatggcttagatgggtcttctgctctgggcctcacaaggctataatcaaggtgttgaccaggctgctatctcaattgcaagttcagtcaggggagaatctgcttccagtctcactcaggctgttggcagtaatcattgctgtagcactgagggcttgagtttctgactggctgttgtagaggctgcctgtggtccacgtggccacttcattaagccagtaaggaggatctctctgtctgccaccaacatagaatcttacatagttgtttgttagaagcaagtcccgtactccatgtcccacccacattcaagggaaaggggtcacataaagttatgaataactgggtgcctgtagtcccagctactcgggaggctgaggcaggagaatggcgtgaacccgggaggcggagcttgcagtgagccaagatcacgccactgcactccatcctgggcgacagagtgagactccgtctcaaaaaaaaaaaaaaaaaaaaaaaaaagaagttatgaataccagccaaaaaaaaaaaaaagaagttatgaataccagcagagcagggatcgttggagtcactttagcgtttgtctgtcacagggtcattctgaggaaaagttctttcattttaaaagctgtgcaatctggaaatctgtttgaaattagcaggagtgtaaactaagccattagagcttccatttttcattcccttgtcctttggtaaatgaggaagggcagaagtaaagttgcagccttacttaatagatgctgacaggaaggaagagagaagttagtaaggttgaaagaacaatgaaatgagagaagatgatattctctattatcacatggaaaaatacaaatgatggattaaactattccggtgtgttccctaccttactttggaggtctgagaaaacagtctgaggcgaagtccctgctagactaacttatctcgtaatgtgctttctatagaaaagcacattttcagtaactaaatcagaaatgttgctttgcatgaaattgacaatttcttaatccaccctgatagcccagtcttcgggcctggaaggtactgtggccttgaatattcatcccttgcaatgaaaacattgctaaccagcatgcttaggttatggtttaggctttaacatggcttatgtcataaccataaaaagacttgaagaaaaggaataaacaggatcacaggtggttcccatatggcctgtggctcaattgattgttcccacggtatctggtaaggcagtaatcggagatttaggagcacatgttagacttcagggacatttctttgccttctaaaatggctgctttcaaaatcaccctcaggtttagtactaccccaagcaactagaatccagataaaaggacccttctatgaaatgattcttcatttgttttgtagggcatccatatttcacaggactaatcacaatgtggatgttttacatcctgggctgtacactgtagcacagtgcttggcacatagaagatgctcagttaatgctaatatgacagctactactaccattgttaacatttacacattcagctcagtctcccctgcattctacaactatagtaatataagatgccaaatcaggccgggtgcagtggctcacacctgtaatgccagcactttgggaggctgagtggggtggatcagtgaggtcaggagtttgagactagcctggttaacatagtgaaacccgcatctctactaaaacttcaaaattagccgggtgtggtggcacatgcctgtaatcccagctacttgggaggctgaagcaggggaatcacttgaacccgggaggcggaggttgcagtcagccaagatcgcaccactgtactccagcctgggcgacggagtgagactccgtctcaaaaaaacaacaacaacaacaaaaaaaatcaaaagaaaaacagccgtcataatacatattatttgatgaggtctgccgtattaggcactttatctacaatattatgtttagctcttgtgacaactatgcaagataggtattacttttaaaattttatagacaatgaaacaatctcaaatgtacacgaatactttttgtaaagagattttcacccacattgatttaccaagaaagtaagtaaaccaaagccccctattctttatctttttagttgggccgcattgtccatctaggcattgcataaacttgttagagagaagtcctccaaaaatcattttggtaattttggggaagacacacagctgtcctgatttttagaagtgctatttggatccatgttaatttgtctcatcatagtggaaactgagactagccattcactactagtcaatcaatattccatgtatttgtatacagtcactttagatagtaatttcacatatctaattccccaccagtgccttaactgcgcttcactttccttccctgggcattcaccctcaggccccagggctgcggtactctgcatggaatggcctaccgctctacccctcactgttccctagtctctgcagccatcagtaactttacctggttaactttctattcagcctacaagtctcagatgagatgccttttcttggcagaaatttttcttgatcttccattccttttggtgccctgtcccttataatttcctcgtgtgtcctttcccatttgcttatccgatgacttgcttctctcacccattggattgtgagcctcttgtggtcaggggcagtgctctgtaagctgctgtgtccccagaatctggcccagtgtaggcactcagcagctatagactgatgttaagagaaaatgcacatttcatctcagcctcagagcagttctgggaaacagataggaaaccaaagctctgcaagaacgtgggactctctcagggccatcacaacactgttgttggtctcatgtttggtgactgggtctcctattcctggtctctttcctaggcataatgcttttatataaagtcccttccattgtttttttgtttgttttcttttttcagcctaaataacttagtttctctaaacttttctcccagggactcttttttaaccctttgaattattgctgattattatcttaataacttttattttttttccattttgcatgtcatattttagcaaagcattaaaaggaacacggcacaaagcacacccatatttttggatgctgtggatttcatcatgctgcttattccattatatctagtcagtacctccaaggcattaatgctgccttacctccttcattcgaagacttccctgtgcaaggtggaatatacgtaaggaggcaaacagactgggttatatgcctgctctgctttacagaggcctcttccaggagtgtaatacgggggttgctcatactctgaagaagatagtggcaggctattactgtcatgagagccagaacgtggctggcttcttacagacatggcttcataggggcatgccacgtgattcctgagtaagccttctggtgtgaattccctgctcactggggtgattcttcacttcccacagttcaacctgctgtattatcctcttacctatgcttttctgtgatccatagaggtaatttaattttcagtccatgtacctaccctgcctacttagtttcttctcagtgccacacttaattccttcacatttactgattaattaaatgagaagactatgccaggtgaaggttcagcatcttcagaactctacatgatgcattccctgaggctgcctttcaataactgaggtgatattctttgagcagtgtgacctgttagaggtgcccagtcaggtccgatgaaaagccctctgatttgttgaaatagtgcattagtaaagtattatagtttattttcacaaagctagattagttgttacatgttggtttttgttttgcctagccctaacaagtatggaggtgaccttgatgtgtctatagaatatcaggaatatctggctgggtgggtggctcacacctgtaatcccaacaatttgggaggccgaggtgggcggatcacctgaggtcaggagtttgagagaggcctggccaacatggtgaacccccgtctctactaaaaatacaaaaattagccaggtgtggtggcaggtgcctgcaatctcagctactccggaggctgatgcaggggaatcacttgaacccgggaggtagaggttgcagtgagccaagattgtgccactgcactccagcctgggcaacagagcgagattctgcctcaaaaaaaaaaaaaaaaaaaaaaaaaaaaaaagaatatcaggaatatccattttatgtctcaactcacatacctcacagttttctggtccaatttttaggcactttatcaggccctcatatgttttcaaaaataattgctaatgactttgatgaagctaggcaagatattttttggttttagggcagtttgggctatagtttgcagccttcctactttaatagaagaatttttaaactagattctcccccttctcagggtggctttctgcctttccattctagtgcttcacacagaaatgacaagctcacaggggacttatctagaaaaggccgagataaaaataagtacaatgttaaaaaaatctatcttatagtatcatttatttagagcttcctctccttttctaatgaaaggctgctgtagtttccttttgtgctttttttgctgaaggcttttcagtaatattcccgtgtgtcccctgtgatgctaaaagcatgagcttgggggcaggttgactggcattcaggtctttgctcagcctccagccgcaagacaaggcgaataatattgatctcatggagctgaaatgaaaattaacttttctaatctgtgaaaatgctttgttataatccttaaatacatgaatacataggttgaaatagcaagtaccaagtgctgacattatgtccacaattgccacatgccatgtccttatgatttttgccagatgtttaataagattataaatgaataggttattaaatgggcatctcctactctctaggtgtttctgtttctgcttctctgttttctgtttgtatctccatttattttaatgcctaccattatgtgaagtctgccaccttcctatacatggatataccagagaaatacattttaattattaattattattgatatataatcttaaaaacaaatgaatggaatctttatttttaatctcttttaaaaaaactcaattttttttttcacttactgattaaatcttgagtcttttgcctccagtggatcagtgatttttcagcagaaaatctttcctctccattgctttgtgcttttgttgctaggcagtcaacagcagggctactaaagcacttctaatttagacaaatcttttcctctattttagaaatggatttcaatggtgttcagtttgtttgcagaaacctactgaaaggtatatggtacagatatgaatgtttataattacagaataacaaaatgaatattctgctggctttttttttttttttgagatgcagttttgctcttgttgcccaggctggagtgcaatggtgtgatcttgactcacggcaacttccgcctcccgggttcaaacgattctcctgcctcagcctcccaagttgctgggattacaggcacccaccatgcccggctaattttttgtatttttagtagagatggggttttgccatgttggctaggctggtctcaaactcctgacctcaggtgatccacccacctcggcctcccaaagtgttgggattacaggcttgagccactatgcctggcctctgctgacttttaaaaaaataacagggaatgtggggtcactcatagtgtggagggaaattttgagaattttaagcacctctgaatcatattggcagttataagctgtaggggtgttttgtgcacatttgattttttttccttttaaaaaatctccttccttccacgaacaaactgttgcatgggaaatgacatatcactatatatatatatatatatatgtatgacatatcactatatatatatatgacatatcactatatatatatatatatatatatatatattttttttttttttttttttgatggccaggcaaagcctcctcaactcaactgtagcttcctcctcttacctcgcagtaagctgatgactacttctgtgccttcttctaccttcccggaagttccaggtccatttagttcgagttgtaaatattgactgaacacattgtgttagtccagtctcttgtgattgcagatgaaataccacaggtcaaacaaattcatttaagagtaggtgcagtgggaggcgagcttattgagaggatgcttgggtggcacgaaagaatggaaccagtgtacccttcaacatccatgtctttgttgctcagtctcctaacctcctcaacccttgcatctgcttggaaaggcccatgctgtctccttggcatcttgaggcaggtcctttcctctgtttagattgtcctcccatccctcctcctgtccactttggtttggttaacttttagttattcttcaggattcagctgagatgtgtccatctcctggacttcctccctgccacccagcctgggatgcatccctcttaacatgttttcataaaatcctacacccaggaccaatctatgcacttatgtaatagttgctcatttgcttgtgtgtttcaactgcacttggtcttctagagagtgggaactgtgtctgattcattctttcattttttacccattgtctcattcataaacagagaaaaatatttgttgaatgagtgaacgtgggatctctgttcattttggtatattactttgctttctgggctgagctcaggacagatgccaaagcctttccctctaatgacatcaaagccctacttctaaaaccagactggatgtgattcccttctacaaacagattcagtaaagaaatgtgaatactcccacaaaaagcccagtaagtatgtggtggttttgataataataaaagttttgtgtagtatctagatataaataacaatgacttaaaatatatgtataaaatacttgtaagtgaaccctaatcagtgagcaacaaggttaactgaatagtgggtatgaacagagtggtcaagaaggtgcctgggctactctgcctatggaatagccattctttattcctttactttcttaataaactcactttcgcaaaaaaaaaaaaaaaaaaacaaaaaaaaaagaagaagaagaaggtgcttggcagtgaacattcatttttagaggtttatttttcatttatttcattgactccatttatttcgatgaccagtttaaaaaccttttaagtaagttgaaaaaaaccttttactcatcatacactggccaaaaccacaattacttttgcaccaacctaataacttgtcaatttgtccttccttcttaggggtaaccatagtataataatctttaataactatttaatatattaaatatagctattttcagtttattctaaggttgaaatactgcttgttgatgcatcagggactctgatgtgcaggtcccacaaaatgtgtaagagcaccttctctttttggctaacagttttgtaatcaactttgattaaactcttccatggttatgaatccatgaaaaccgttatcaacaattgttttgggagttagaaattacaagtactctattttcttgtatgtagcttttttctttcagtatatattacttgacacctagtattctgagcctatgtaatggtgaatcattttaatgggatcttactatggttctaagaattatcatcatcagaaataaatgattttaccagagagaaaaatgaaagagctggttttactgacatactcatacattccttgttcttctccctttctctctcttttctttttcagtgagcatgtttttgaacacattaacaccgaagttctacgtggccctaacaggcacttcctcactaatatcagggcttattttggtaagtggtggagtccttctcatttaaaaacatgctgattagtaatatgtgtattagtgtatgtacagtaaaaaactctggaagaatatacactaacaggttacagtgattatcttgcacatgtatatatgttggggagtggactcatagaagccttttactaccccattatatttctgaaatatttgaaaacaatttaagcaatcgtatattactttgttgaaggggaaaaacaaatgtaaatgaaatggaaaataaaggaagacataattctctgtcaaattttactatctaagatattgtaaaataaatgtaactcagttcaactaaaaatcatcaatatggggctgggcgcagtggctcacatctgtaatcccagcactttgggaggcgaaggcgggcagatcacttgaggttaggagtttgagaccagcctggccagcatggtgaaaccccatctctactaaaaatacaaaaaaaattaaccgggtgtagtggcacatacctgtagtcccagctatctgggaggctgaggcaggaaaatgggttgaacccgggaggcagaggttgcagtagccgagatcgcgccattgcactccagcctgggtgacagagcaagactctgtctcaaacaaacaaacaaaaccaacgatcaaaatggaatattgtacaaaatcaagatcaatagaaatatagcttagtttttttttaaatgtattgacatggattgtgacaattctaagttttttttcccttcatcttcttttctttctaaatttacatttatttatgcattgcttcctttaaaaaaaatccctaaaatgcaaaaaagcaatatgattatcatttgtatggctctattaccttatctttgtaacagttgcaggtgtgctaaatggtaacacttgaagtagttaattttagtggcctcaaatggggaccatctaaactcagtgggactactctaatagaattaaatgacctttaaggcaaaaaggttttagaaaagctttttttctctgtacccatatacttgtgattaaattatagaaacaagcataagaaaaattttacagagttgatgttaagagaagtggatgatcagaagaaaaacagaaaagctttagagaagggtgcaaacatgtggagcaaagagcataaatggacctagaataatggtggatttcagaagcttgagcttgtgaggagccagagtaaaaagatgaagaaatgtatggaggacagaaacctgcaaacagaggagagggatgatggcagtgtggggaggatctttttgtgtgcagagaacatccaggttcatcttgctttgctgtgtcatatggattgttaaactcgtggcatgagatgtttaaagttggtgttaaatgtcctcccacacatctccattccgagtttcagggtcccactcttttccaattaatgccctcactttaacagtagatacctggtgagcctgagcatgtacctatcattgcaggtcagccactcacataagagcttgtgtctgattttccacaatttccagctctttctctacaagagatgagactctcactaagggcactcttagaagattcgaagctcagtatgtgcttctggagccaggagttagaatccctgagttcgttgttttcatcaccttgtccagtgaacttaggagcaaccaaccaacttcattatattccttggttctccacatatggtcaaaggtattatgtgtagagttgctaaactctttgcctctcaagagtggtgaatcaggagtatcaaatgcatttattttgcataactctctaaacagttcacgccaaggactgtcagtgttctccatactattagaagtagagtccttagcatttttgggtctaattatattaagcagccaactccagaaaccccaaaaccaactaaagaaatctatcctcaaaattctgtttctctagaactacttctggtactaaaaatctgttttggataaatgaaaatccaactagaaagcccaatgctggctgcaaagaccaacccaagttgaggtgaagcatattaaacttcctccttaaaatgggttgaaataaggtatatgcgataatttataccatgtcgcctcttaaatactaatctgttcacctgtatgtgtctctgaagttttccctgttctttagagatatgagaaaaataaagaccctgtagaaagtggctccataaagctataaagctggtcactaatttattccatgtaaggactgtattttattctgagattgtgtccttcttactttttaacgttaaaattttcttctgaaatgatggtgatagtgtatggtagtgttattttactattattactttgcaaagaagaatatagcagcagccccacattggtcttcacatttgtcggggcgggggcaggaactcttggcttcagagaacaatcacctcaaaaatttacttctacttaacctgttgaggaacaacgtaaattgtccaaatgggaaatagtaaaaatatttgagtctgacctagagcaatgaatggagaagagaaaggctttagataatctcttcaatctaggggattgagggcagaggaaaattatctaagagaggatttggtggacggaagccagcagaaactgttttgctagaaaaccacagaaaaaattgtggtaagtgctgaaggtatgggaatgaatctctcaatccaaaggtttctaactttattaattaaaaaatattttcattaggaggcaatatacttattatttagagctatgtaagaaactatattaatatattgagaattacatgatatccagagaggacaaggagtagacagaagatgatgagagaaagtaatgaaaaggggagatcagtttcagtgagataggtgatagaagagaaaaccatgaaaaaggaagaagtcaagtgagccctgtttgcagacaacatgatcttatatttagaaaaacctaaagactctaccaaaaacagaactgataaacgaattcaataaagttgcaggatacaaaatcagcatacaaaaatcagtaacatttatatatgctaacagtgaacaatctgaaaaagaaatcaagaaagcaatcccatttacaatagctataaagagcataaaatacctaggaattaatttaataaaaaaagtgaaagatgcatacaaggaaaactattaaaccctgatggaaaaaaattgaagagaacacacaaaaaatggaaagatattttgtgctcgtggattggaagaattaatatcatcaaaatgacaatactctgtgaataaattttataatactctgcacataaatttacttatttaatgcaatccctatcaaaataccaatcacattctttacagaaatagaaaaaaaaatctaaaatttatgtggaaccacagaagaccctgaatagccagagcaatcctgagcaaaaagaacaaaactggaggcatcacactatctgacttcaaaatattttacaaagttatagtaaccaaatcagcatggtactggcataaaaacagacacatagcaatggaacagagtagagagcccagacataaatccacaaatttacagtcaactcattttcgacaaaggcactgagaacgtacattggagaatggacagtctcttcaataaatgtgctggaaaaactgaataaccatatgttgaagaatgaagctggacctctatctctcaccatatgcaaaatcaaatcaaaatggattaaatacttaaatctaagacctgaaaccatgacactgtgaaagaaaacattggggaaatgctccagaacattagtctgggtaaagactttttgtgtgagacctcaaagcacaggcaaccagagcagaaatagacaaatgggattatatcaagttaaaaggctcctgcacagcaaaggaaacaataaagtgaagagacaaaccatagaatgggagaaaatatttgcaggctattcatctaagagattaataaccagaatatataaggagctcaaataactcaatagcaaaaccgcaaataatccaattataaaatgggcaaagatctgaataaacatttctcaaaagaagacatgtgaatggacaacaggtatatgaaaaagtgctcagtatcactaatcatcagagaaatgcagaccaaaaccacaacgagctatcatctcactacagttagaatggcttcaagtgattctcctgcctcggcctcctgagtagctgggactgcaggcatgtgccaccgtgcctggctaatttttgtaagaagaaagggtgtggtaggtgcagtggctcacgcctgcaatcacagcactttgggaggcagaggcaggaggatcacatgaggccaggagttcgagaccagcctggccaacatggtgaaaccctgtgtctactaaaaatacaaaattagccgggtgtggtggcacacacctgtagtcccagctgttcaggaggctgaggcagcagaatcacttaaatccaggaggcggaggttgcagtgagctgagatggcaccactgcactctagcctgggcaatagagcgagactccgtctcaaaaaacaaaacaaaacaaaaactgggtgtaacagaagctggtgaagatgtggagaaaggggtactcttgtacactgttggtgggattgtaaattagtacagccactatggaaaacggatgtttctcaaaaagctagaaattgaaatagcatatgatccagcaattcacttcttggatatatatccaaaagaaaggaaatcagtatgtcaaagagatacctgcagtcccatgtttattgcagcactgttcataatagccaaaatttagaatcaatttaagtacccatcagttgatgaatgcgtaaagaatatgtggtatatattgcagagatgaacagaaaacttccccttcatccttgaaaggttgacagaaaaattaactgacaaatggcagattaataagagaaaaggcataagaaatgtattattaacgtgcacaggagaactacagagtgattacccaatatctcagtggggttaagaagcttatatatgatcttgaggttacagaaagattggggtcttggatcctggcaaaacaagttatggtggagaaacaagttgtgggacggggaaaagaggaattttcttgagggtaatacatgattactagggagaatgattgaatcagggaacagaggttaatttgtaaatagttctctttggaatttgaatgttccacaatggaatgtttttcagtgatgaaaaagaatgttctgttatttgcagcaacatggatggaactggaggtcattatgttgagtgaaataagccaagtacagaaagacatatattgcatattctcactcatatatgggagtttaaaaagtggatctcaaagatacagagtagattggtggttaccagaggctgggaaggtcacgcaggctgcagtgtactgcacactgcacagcttattgtaaccttgacctcctgggctcaggcaatcctttgtctcagcctcccaagtagctgggaccacaggtgcgtgccatcatgtctggctaatttttaaaattgtttgtagagatggagtctccctatattgcccaggctggtgttgaattcctgggctcaagcaatactcttcctttggcctcccaaagtgctgggattacaggcgtgagccaccatgcctggctgaggtttattaataggtacaaatataccagttaaatagaataaataagatctaatgtttgacagatagttagggtgactatagttaacaatctgttgtgtatttcagaatagtcagaagagaataatttgaatgttcctggcacaaagaaaagaaaaataaatttaaggtggtagatattccagtgaccctgatttgatctttacatattacatgaaggtatcaaattatcacatgtaccctgaaaatatgtacagctattatgtatcaattttaaaaagccatggggagaatcagggattgttgacctgataggactttgatcattcatccctaagccattcgtttttcagagaagaaaatcgagactaacagaagaaagaaaaggaaatgttttttgtttttgtttttgtttttgtttttttttttgagacggagtctcgctgtgtcgcccaggccagactgcggactgcagtggcgcaatctcggctcactgcaagctccgcttcccgggttcacgccattctcctgcctcagcctcccgagtagctgggactacaggcgcctgccaccgcgccgggctaattttttgtatttttagtagagacggggtttcaccttgttagccaggatggtctcgatctcctgacctcaagatccacccgcctcggcctcccaaagtgctgggattacaggcgtgagccaccgcacccggccaggaaatgttttgtctaagctcatgtggttagtttgcagcaaagtcaggcctagaacctaagtcttcatgttcctaccttaatattcttttttttctttcaaagcttgtttatttttatttttaaatttttatttcaataggtttttgggaaacagttggtatttcctgagtaagttctttagtggctatttctgagattttcgtgcatccatccccctagcagtgtacaccatacccaatcccaatgtgtagtcttttatccctcaccctcttcccactctttcctcctctgagtcttcaaagttcattgtatcattcttttttttttttttttttttttgagttggagtcttgctctgttgcccaggctggagtgcagtggtgctttctcggctcactgcaatctctgtctcccgggttcacaccattctcctgccttagcctcctgaatagctgggactacaggcgcccgccaccatgcccggctaattttttgtatttttagtagagacggggtttcaccgtgttagccaggatggtctcgatctcctgacctcatgatccacctgcctcggcctcccaaagtgctgggattacaggcgtgagccactgtgcctggcccattgtatcattcttaatgcctttgcgtcctcatagtttagctcccacttatgagtgagaacatacttttggctttccattcctgagttacttcacttagaataatgatgtccaattccatccagattgctgcaaataccattatttcattcctttttatggtggagtagtattccatggtgtgtgtgtatgtgtatatatatatatatgtatacatacacacacaccacattttctttatccacttattgatgagcatttggactggttccatatttttgctattgcaaattgtgctgctataaacatgcgtgtacaagtatcttttttgtatagtgacttctttgcctctgggtaggtacctggtagtgggattgctggatccaatggtagatgtacttttagttctttaaggaatctccagtgttttccatagtggttgtactagtttacattcccaccagcagtgtaaaagtattcccttttcaccacatccatacccatatctattatttttttactttttattatggtcattcttgcaggggtgaagtggtgctgcattgtggttttgatttgcatttccctgatcattagtgatgttgagcatttttttcatgtttattggccattcgtatatcttcttttgagaattatctattattcatgtccttagcccacttcttttttttttttttttttttttttttgagacagaattttcactcttgttgcccaggctggagtgcaatggcacaatctcggctcactgcaacctctgcctcctgggttcaagcaattctcctgcctctgcctcccaagtagctgggattacaggcatgtgccaccatgcctggctaattttttgtgtttgttagagacagggtttcaccatgttggccaggctggtctggccaacttctgacctcaggtgacccacctgcctcggcctcccaaagttctgggattgtagacgtcagccactgcacccggcccttagcccactttttgaagggatttttttctttcttgctgatttatttgaaatccttgtagattcaggatattagtcctttgtcagatgtgtagattatgaagattttctgccactctgtggggtgtctgttaattctgctgattatttcttttgctgtgcagaagctttttagtttaattaagtcccatctatttatctttttttttgttgcacttgcttttgggttcttgttcatgaagtctttgcctaagccaatgtctagaagggtttttccaatgttatcttctagaacttttatggtatcaggtcttagatttaagtctttgattcatcttgaggtgatttttgtataaggtgagcgatgaggatctagtttcattcttactcatgtgacttgccaattatcccagcaccatttgttgaatagggtgtcttttccacactttatatttttgctgtgctttgtccaagatcagtcgactgtaagtatttggctttatttctgggttcttcattctgtttcataggtctatatgcctgtttttatactagtaccaagctgttttggtgactgtggccttatagtatagtttgaagtcaggtaatgtgaatctccagatttgttctttttgcttagttttgctttggctatgcaggctctttttaggttccatatgaattttttggttgtttttttctagttctgtgaataatgatggtggtattttgatgggaattgcattgaatttgtagattgctttcggcagtatggtcattttctcaatgttgattctacccatccatgagcatgggatgtgtttccatttgtttgtgttatctgtgatttctttcagcagtgttttgtagttttccttgtagaggtttttcacctccttggttaagtgtattcctaagtatttttttatttttttatttttacagctactgtaaaagtggttgagttcttcatttgcttctcagcttggtcgctgttggtgtatagcagggctactaatttgcgtacattaattttgtatcctaaaactttgctgaattcatttaccactcctgggagctttttggatgagtctttagggttttctaggtatatgatcatgtcatcagcaaacacttgacagtttgacttcctctttaccgatttgaatgccctttatttctttctcttgtctgattgctgtggctaggatttccagtactatgttgaatagaagtggtgaaagtgggcatccttgtcctgttctcagggtaaatgctttcaacttttcctcgttcagtataatgttggctgggggtttgtcagagatggcttttattaccttaagtatgtcccttctatgccaattcttttgaagagatgaataaaattgatagaccattggtgagattaagcaagagaagaagagagaagatccaaataagctcaattagaaacgaaataggagatattacaactgataccacagaaatacaaaagataattcaaggctactttgaacccctttacacacataaactagaaaacctagaagagatggatgaattcctggaaatatacaaccatcctaaattaaactaggaagaaattgaaagtctgaacagattgaaatggtaattaaaaagttaccaacaaaaaaaagtccaggaccagatagactcacagctgaattctatcagacattcaaagaagaattggtaccaatcctattgaccctattccaaaaaataaagaaggaatcctccctaaattattctgtgaagccagtatcaccctaatgcccaaaccaggaaacaatataacaaaaaaataaaactacagatcaatatctctgatgaacgtagatacaaaaattctcagtaaaatattagctaactgaatccaacagcatgtccaaaaagataattcaccatgaacaagtgggtttcataccagggatgcagggatggtttaacatatgcaagtaaataaatgtgatacaccatataaacagaattaaaaatgaaaatcacatgatcatttcaatagatgcagaaaaaacatttgacaaaatccagcacccctttatgattaaaaacctaccttaatattcctaaatagaggcaacttcagactgggaaaatgcttggtaaattcttactaaatatatgccccaaacatggcaatcttttagcatatatgttttgtgggagggagaagggaaggcattacaagtctccctctgatgattatcatttacatttacaatagtattttaacattttcattcaaaacatcttggaaatatttttaagtaagcaaatagaaaaaaagaacttttctggatacaatttcatactgaaaccagtaattcactctgatgctgaaaggtaggcttttgtcttttgtttatacattcctcctctcagaggagggtcactgaagactgttacctacttagatgatgccaggcactgatctaaagcactttgcatgctaactcatttactcttccccaccgtacaacagggtcattgctaatggttgtttcctttttacttacaggtaggctcaataggtagaataggccagttagtaacctgccttcagtcacacagctagcaatggaggagcagggttggaacccaggccatcttgtgcaggcagcctgcactctgtcactcatttcactgcctctgtggtcagctgtttttctagcctgctgtacaaatggtaggtctggactttattctagcagtagcgtggtgtagattcacaggctataaattaattacctccgtgtgggttgtttcctttcactctggtgagctaggcctaatggttgttttcctttttaactcaaagatggggaagccccaacagcaataaagggatttccctagagcctggctgcctttgcagatctgggctggtgaggttttctgtgcccctgctgaaccggatgatcattgctgggctatcttatggtacatttgtcttgcagcattctcaggaagcagaggatgcttccgactgataggaaactttgagcaaaggaaaacctctcctgtaggaacattttgaaaggtctctctcaaaatgctggtctgtagtgagagctaaataactacagtgtgtacagctttaggctcctgctttagagcttgttgacatgcctagcctttagggactcagctttgccaggcctcgaaatgaacccagggtaaggtttctattcagccactatccttttctgctgagtgcatttcagggagaggcagcattgaggtaaaggatcaggtgctctgcaaaatagttgtgtgcatggaaatgcttagcagtttgcttcctggccccagggagataattacctaactgctctcacctaagcaatgtcctaggagcctgccatggacatttaaagtacacggctgaccctggggaaattgattatttgggggcctcaggatttctatgctggagactaaaattatcaaattaaatttgatttctttggaagagagagctaaaaacaaagaaaaaccctgatgtttcctctgtaaagaaaaagtcaattaactgaacagatatacaatgtacttaaaaataaacaggtgtatattttattagatatccctaatacttcttagttcacaaggtgaaagctagcaatgactttgttataccatctagctcactcttcccttttagttcctatgcctatacccatccatccagctttttcccttgcttaatttcaagatacccctctgcctgcttggcacaagccttcccatcccagtccagttccatccacaagaactgcacctgtcatcacagtccagacctgccaagttagtcttatctgctagcaaagacatgcccagcctctgcagggagtgtttattatagtggagaaaatctctggattttgcttcgcttttgagagtggtaaggtggatatgtgcagaaaatgctccccttaattatctcaaaatgttgatagaatgcatacaattctgtatgttgcattgacatttatacatagattcctatatccctattaaaatgtgtgtgtatgtatttcattggatatagggatcaatacacattttaataggatacaggatatgtatatttgtgtatatgtatatagatatacatatatgtacatatatatgcatgtgtgtgtgtgtgtatatatatatataacagaggtatttttaagaggcatccagagcataatttttagaagtcagaatcaagaacaggaaatggagaaaatcagaatggtaaataaaataattaattcatggattaaatgtaaaagaagtgtgtttttgggaaagtggtagcagatgacgattgaataggaatgagttataacaaaagatctatttattgagttaccactccatgccaggtgtactatattaagcactttgcatatattatttcatttagttctgattgaaattctgagtggtgggtatgaccagtgtctttatattgctaagtaaaaacagacacaaagtttaaataatttggccaaggttatatagcagttaaatcatgagatttgaacccagatctctctgaccttgccttccatcacctcttattcaaaagtaaaggagcggagttgaagattgctatgtctcctttcattcctttttcatccatctcaagaagttgaacagcactcaggtagcactttaattgatagccatatggatcacccaaaataatggtgattctggaacgaagagtggaaaaagacacagggaaacttgattagaagggctcttgggggattggggtgggaagcagcccataaatgtcaagctgtgtcatctctgaagcaccttgtctcttgactctagaataaagaatgagagagatgctgtgagggccagatggctggggagcctgcagacaatgagaggaaataggctcatttaaccttgtcaaattacagcttcttgtgttcaccacggaagtaaatgatcttctgcaggggaccccgtgtcaggcaaagaaagtagattgatacctctcgtggactgattgtggatttcagcatttgggtagaacagattaatgataagatatggcagaagtgaagaaggtgaatgagctaatggcggataaagggacaaaactgccattttggctttttcagcttgcatttcagcacaaattgagagacttgaaagtcatatagttgcagtgctgaggcaggaatgctcagaagcaatccactttaaatcagtaaagacctaaggactaggcattcagaaaacttgtgacttacctacgaaactttgctaggtaaggatggagtgaagactagaatttaaatttccaccactctgccctagcatctttctgcctctcataaggtttgcctgggaaggtggatagcagcagggtgtagcggttgatattttcattttaacagacacacagaagtgggtcaggtagataagaaggagagagtggggagagggaaagagaaaagaaaaaggaaaagaaagagagaagaggaagactgcaaccttctttggaggaaacattttttctttttctaattggccatgggttaggccagatttgtccagcctagaacatagaccaatgcttagcacatttatcattatatttcatttgtgtgatcgtttattgtcttcttcctctttagaataggcaggaaccatatctgtgtttctgtgtgctactgtatatgaaatgccagggtaaatacttagaaaatatttgtcaaatgcacataagatccaaggaatgaatgaatgaaactgactgcatcagaattatctgggagcttgtttaaaatgatagattctgagcaccacccagaccaactgaattagaatctctagaggagggacctagaggacagctggcagggcttgggatgaatgacacaggctggcttttcccaattctcagtggtctccagggctttgttcaggagagttaccctcccttttaggccatagtagttaatgctgcggtggaaaatctcatcctgtgaacttagagacactgaggtggggatggaccattggctgttgaccttgaagagagccttacttccctgtgttttcttaaagtctcggcaacaggtggccacaaaggcgggtggaagggcagagtgccagtttacatagcccccgcaactgttgaggggaacaggtggctgcagagggattggctgagatctaggaagcaggaggccaagacccactcagttgctattccatattcctaaacaaaatatacagaaaccaagaatgtaaaaaaaaaaaagtttgatctgtcatgaggaattaggaaggactttgaaagagtcaatatggtaaaaagaatatactttaggatcaaaaaagaaactaaaaatgttacaggtattactgtaacacatgccaactgcctgggtttatcttcttaagcccagataatcccttttgccaaaaaaaaaaaaactgtttaccaccagatatatttttgaagacttggagcaggtgttgatttggcaatctttctatctaggagtagactgccataaagtttcgtattccttcttcagtctctgccatcactgtatctatcctcctgtgacatcattgtctactttaattcttaagaagcacttagccagtttcaagctttgacatctttctatttcccatgggtttaatggtgttggtgtggaattactaagcttttgctgtgtggaaatctggaggcatttttgagtgtgataatagggcatagggaaattcctgacacatggagtgttttatgtatagaatatgcaattcaaaagaagaggaggacttattggataggaagaacctaggcatcttgaacaaagagtctacttttaggtctgcaagattgatggaaaggccttgtttattgttcctttgtctgatttttgttccctgcaggtaaatatgagacaagtttgaagcttaggccagctggaaacctgggtctctgcccccagctcccagccccagtgctccttggttatcctttctgcttctgtcaaataataatgaaggagctcactgggcattggtaactgggtccttgccaaatggatctttgttttaaatacgatctgggccctgagtatagcttctggcccttctgccttgtaagatataggtccaaaccacttcctcagccctctcattcccaattccatccccacttcccttattcccagaagatatacctaacctgcacctccactgagatcagtgtcacccagtttttatccagttattgccttctaacctgggaaacagctcatatcacactctactttccaaaatagaatgtctccccctattcattcttctttctctttcttcctatcttagagcaagaagtgagaagtggtaggttactttttttttttttttttttgagacacagtctaactctgtcacccaggctggagtacagtcccgcgatctcagctcattgcaacttccgtctcccaggttcaagcaattctgctgcctcagccacccgagtagctgggatgacaggcacccaccaccacgcctggctaatttttatatttttgtagagatggggtttcaccatgttggccaggctggtctcgaactcctgacctcaggtgatctgcccgccttggcctcccaaagtgttgcgattacaggcatgagccaccgcgcccagccggtaggttactttttaaaggcagaatggacttgggatcatgtctctgggtaatttgtactctttcccaccatcagtttctctctttccactggatttttttcccctaacacaaacatgtgtgaacctctctttttcataaaaaacaaaatgaacacaaaaccttttattgatcccactgttgatttagacaatctcctgttacatcaaccaggccagcccttatcatccacccagtcaaccttccaaatatccttccattcagtcttctagtcatccctccctttctctctccatctcttcatccaacatcaactgaatgcttacagtgatcttattttacacattagaaaactaagccccaaggaatcaagaaaagcaaccaaggtcacatagcccagctatctagtttaaaggggttttgcctttaaactaaatggtaaggttcctgttgacttcctaaatcccaaaccagcttgatactttttagttctcgtcttacttgaccctctcaggggcagagcatcaacaggaaaaaagcgcaggagaggttaagtttttaagactatgaaatgcatatttatattttaattttttggttgtcagaccaaaaactgttttgttccactgtgacaggcccactgagctactagcatgtccaagaagtgcttttaaaatctaaatttgtttatgagagctttgctgtttacattgtaggtatgcaccagggaaaagaattcaaagtgacaccaaatatgtgcgcattaaataacaccatctgcccatttggatctgtgcagctcttttaaaatactgtgaggtgctcgcccaaagcctgacatatttcaggataagggaaagatttttatgttaagaccctacatgaagacactgtttgaagtttcagaaggctttgagttcttcccttctttctttcctagttgttcattcaatatttattagaaggacggggtccttttttattctagtgccccctgtacacagcagaggtccatctttatacttatgttctctgtacacagcaggggctgtactattgcagtgatatgacagacctgagaaggccctccttttcctccccaagcagctgcatgaataacccagtctttactgaggtctattattactgcattagaaatactgggtagaaggtctatcacctattacaaagcaaatgtccagttaatatgagtcattttttaccttaggatgaataatctggtcccatttgatagactactacttctgaattggtttttataactaggaaagcacagagggacagtgtcagagggcacttggaagtaaagatttgaaaaaaggaatgataggctacatctgtctgtttatacgaagcaagggagctataaagtcttgatagagggccttggtaagatagtgacagagagtaggggctttaggctaagtgactatttaattagctctgtgactttggtcaggtcattgtaacttgatgggtagttctcattctgcatctgtaagtggactctacatagtcctttaaggtcctttttagcgctgacactttatgattctgctggaagaactgagaaatctgaagaaacccagggtttgtgtgtgtgtgatgggtacaggcatgccaggagcctgtgagaggtattatggatctgtgacatagacttgtagtggcaggggctaagtctgtaatcctggagcaccgcttgtgattggtgtggaacatgtagtgctgtgtgatggaatcaatgaactaaggactggcaggtgctccagcagcacaatatagaaagcagaaaaatgacttggggcacagaattttctgggtcctttggagtcttctcttctaataaatgcaaagccatgaatctattgagggccttgttgagtggtcaggattgtacagtgagcagtacccttcatcatgatgatttacagtactttctaccaactgtctagtaacaggcaaaatgctgtagtaacctgaattatagactggcataaagtggggtgcctcatggcagcatgtgaggtgtgctgcccatgggagggatgtgcatcattaacatagtaaatggcagctttgctattacttttgaaaaccaactgcagcaggcaccgacttaggtgttttacatggggttagtatgaaaattcaggacccttgagataaataacaaatatgatttccacttacagttgaagaaaccgacgttcagataataactcacctggggttatagactcccttctagatccatggtgtgtaaatttatcattcctgagctttcttcttttatgcaaaatcccattcctagtcattccaaatgttacagattagtcttgtcctttcttaacttgatagtatattcccccgtctctgcccagagaaaatacttggatgttttaacatgtgataattcacgataggttgagcactttaaaaatttgaaaatctgaaatcttaagtgctccaaaatctgaaactttttgagtgctgacctgacactcaaaggaagtgctcataggagcattttggattttggatttttggattagggatgctcagccagtgtgatacacatattccaaaatctgaaaatattcaaaatccaaaacatttctggttccaagcatttcatgtaagggatactcaacctatagtcaaaaagagtaactacctgggattaaatcaaggtgtcctgttataggattggaaacatttcgtttgattaatacttccttctggtcattcataaatgttccttatatctttttagaaatctttaatagaacaaaacagggaaaacatcagttttaaaattatatcccaaagtccattccagggtagataatcttgtttttatggaataagtaagggtaaaggtaattctatgttaattgcacattttatgttataaaaatgtagctatcctatgagactctgggatatgattgattcttaaatttcttctgtggaatgatttgtgactgcctaaggaaacccccagtcagggaggagagaaaaagatgtgggggagaaccgctttgagcagtggtaggaagtgttcactgtagagaggcagagatcccaggtaagaagggttgggggaggtcacttgcttttccagtgcttaggaggtcctgacttcagtctaatcatgtaagcatcattgttctttcattactgaaagttacttcttttcccttttgtaattcacagtacataacaattagtaggcttgtgaactaggaaacattaatggtgtacaacagatgcttgtgtttatagagcacttctctgcaagtggaataatgctgaacctcagtggctgggtgctatccatgtgggaaacgggatacagctcattcttttgttctgtaaaaccagtatttccttaaggaggtcttaccaagcacccccactccttcctgccccgcccctaccccgattttgctcttaagcattttacagaggtatggtttttatcagaatataaagtgcaaagaactggaatatttcataagccgtatttcaaaaactgacttatttatatacatttctggaattgtctttcagctatggtgattttgttatttgaatattatatataaatttggagaaaaattatattgagcagttcttaacagtgttcttttatccatgattgatgttatagttttttgaaaccagtattaagcagagaaaaccacactgagaattttaaatgttattattaaatttactaaaatctaatttttagaataaacagtttttgaaataaaatatacttaaggtggaattagtaaatgtaacatgttttatgggcatgtgtacagaagtcgtaaatgataacagtgaccataaacacgcttatttttctgttctagatatttgaatggtggtattttcgcaaatacggaacttcattcattgaacaagtctcagtaagccacttgcgcccccttctgggaggggttgacaacaactcttccaacaattctaattccagtaacggggactcagattccaataggcaaagtgtctcaggtatggaatttccttcagtttgcaatattatttgcttactgttactaaattattattgttactcatactaagagattaagaatgttgttatttaaacattaggcttcagagaaaaatgcagatcattttcccatggagttgacaacctgtatcagagagggagggtataaacatcctagggaaaggaaatgcttatcttattaattttaccctcctttttttttttatgtgagagtcttgctctgtcacccaggctggagtgcagtggcatgatcttggctcactgcagtcttcacctcttatgctcgggtgatcctcctacctctcagcctagcaagtagctgagaccacaggtgtgcaccaccatgcctggctaatttttgtatcttttgtagagtgggctttcgctatgttgtctagactggtctcaaactcctgggctcaagtaatctgcccgccttggcctcccaaagtgctgggactacgggtgtgagccactgtgccgagctaatgttattttttcccatttgacttaaccaatggtcatttaggtcagtgttcccaacctgatgctatagcttccttgtccatagtttctcagaccacagtgaatagattcattttcttctatgataattgcagaatcttgtgtctaactagatctgatcacatcactcctctgcttaaaaggtatcattggttcccattccactgaagataaggcccaggttccagattccttagcacagcatgagctgcttggcaactttggcttctgtcacaatccagtccctttcccatatgtcctgttttctagtcacatgaagccagtttttatttcttgaacatgccatgtttctcatgacgctctgcctacaagtctcccttttcccttattcatccatccaaatcactatccaaatcaaatgtcacctcctgggaagccttctctgatagtctgtacactatctctctacttctgttaatctttaatatttttacctttagcaacacatcaaattacattgtaatttttaaggtatggctttattgtagtatctctagcatcttgcagtgtctactatttctttgaaacaaagctgctgttacagcactaagaatagcatcaacatttatataaagaataaggcttaatcaaggcatccactaagagagacagcaaaataacagggacaatgggaagggtatgaactcttcattgcattgagaaatgatatcaagagatttagatcaagtagagagagaagggaaacttcaatgaaaatataaatgtattcactataaaaaatgatctctaatgaggatggtttctgttttcaatttgttaattttctacaatgttctttgtcattcaaaggctatagtgactcaagtcagacaagagcacaattaatctgtgggatattcacagcacctgcaaagtggtagcagttatccaccactgctcatgcctggtgactgaatgatcaagattcctcattagaataataaacagcatttattatactagctggataaagtaatgttttgctttggtgaggtctcttttcctttcagagagtggatgagtttacaaagtctcagacaattttgttacctggctgagcaatgccatcttttatatgtgtaccctttaggataaaataaattgtgccaagaggtgtccagtactactcatagctggctggcagagtctattaaaagagtattgacttaaaatctggaacaaaatttatgtatacactaatccttgataattataacctggttagacagttatgaaatgtggatgggttattctagagaggaagaaaaaaacctaatgtggctttttaaatttcttctttatccttcatgttttagaactggtggctctctccttaaaggggcaaactacttttcccagcttaggtcaggatctcctcctttgttttccttagatttgtatgttttcctcatgcaaccagagcacttaccactttgtctccttcaatagacagagttttccatggggataagaactttgcctttaaaaaaatcatattcttaaaaacctatacaagaccaggttcataagaagtacttagaaaatgtttactgaggtgacaaagagactgagctaggaaattcttcccacctgttttataagaggagaaagtacaggccttgcatgcactcatgcattgattcattgagtttcaaagaaataggatgctacaagaagctagaaataaagccgtgccttaaaaattataatgcaattttgtaagtgttgctaaaggtaaaaatattaaagattaatggaagtagagagatagtgtacagactatcagagaaggcttcccaggaggtgacatttgatttggatagtgatttggatggatgaataagggaaaagggagacttgtaggcagagcatcatgagaaacatggcatgttcgagaaataaaaattggcttcatgtgactagaaaacaggacatatgggaaagggactggattgtgacagaagccaaagttgccaagtagctcatgctgtgctaaggaatctggaacctgggccttatcttcagtggaatgggaaccaatgatactttttaaacagaggagtgatgtgatcagatctagttagacacaaggttctgcaattatcatggaagaaatgaattcattcactgaggataacctgtggaaattctcacttttgtttgtattttttacttggctaagactgagcttttggatattattactagttcaatgataatattatctaccagtattcatttaatattaacatctactagtatttactgagtgcctactatgcattctatatttccattcatttcttgtataatagataacagcatttattttctggtatcataacagtgttcaaatagttatccttagaaaaatggaaattaacttgtcttaagtatatttaggtctccatctgcccacttcttgacatttgggcttctgatatttggctgactcagctaaacaaacatgtatgctagtttggaagtgccagataccactggaataataccattgctgtttctgtttttttgtggtgattttgatttttgaataagaaaaatactaaaagggtacattaggtacattgtctgaatttatctctacttttaatcactttctatttcatagtctcatttcaaatgctaagtatcaagaaggtccaaagctgagggttatcagtgtattttcttaaacttgtttacaaattcccattgccttcataataataaaatgactattgccttaataacagaagggtgaatctattgattttcttggagcatcataagatggccctttgctgaattgtacatgaaatataacatggctcacaaagtctcatggatgttggcaaaggcagtgtaatggtattttattgattatttgagaaaatcattgaaaaaagtaagaataaaggggaaatatcagttataaacattgttctatatgaaaattcagtgtagctctttccttaaggaataatttgttttgaataaaagctgaaaaacatggcctacctaagaacgacttgggatgggggtggtggagtgaggagtgagaaaggttgttatggttacaggcagattgtgcatatatttttaaacttctggatttgtacaaagtggcctgaatgcagacttgctcacaatttgcagtgatctttatctgcgggccagtggagaaatgtagttaattatacagtttcttacttcaaacttcagattgtttggctgaagttagcatttgtgtccattccactggttttgctttatttgggagctaaactgctgttttcctctcagatatgcagtttctgataaaccctgctgatatattctgccacatcaccatgtttctcactaccatttcttaattcagcttagtttatgagctgatgataaataggcatttaaaagggcccagtaacattctgaatttgagtttataggaacatctgtttgataatttgccttgttctcaaataagatgccataaagacaaaggtttgcagtgtttaccttcttcaggataatgggaaaagtggagagtgctctgtcacatgaaaaatatccctgccaaagtcaagtttaaattctctgagatactttaatagcctcttgcatagaattggatctttaaacaaactggatagtcacttggcttcctgtcacgaatcatctccttttaatcttcataagtatatatgtatattccaaattctaaataattttaataattctatataaatgtatatattctaaattctgaattaaattttattacatggccagaagcaatttaagtgctgattaaattcagatcataaagaaaaacaatggcgatgtagaaatttaggtagagtaaaaaaaatatattcaagaccttcgtcggtcccaaattttcatagcactagaacaaataattttatcgataagaagccatttggttccaataataataactaacactcttagtgtctgctatcagctttatatgatattgtctcttgtaatcctcacaatagccccaggaagcagatattattattatctctcttttatagttaagggagctgaggtatagcaaggtgaagtaatctgtccagggtcacatggcggataacctgggtagtcttacttcacaatccaagttcttaagcactttaaaaaattgaattgaccttgtccagaacctctatgaggtgtataaaccaagattaacataattattaagcaattaaaataataattttagtaaaattctgtactgcagtggatgacattatttctgaagtgacattaacctaacttactgtaggaacagttcagtggcaggattgccagtggttgacagctcgggctctggggtcagacagatgtggtcctaatcttctgtgtgtgaccttgggcaagttgtttaactttgctatgtcttagtatcttaatctgcaaacatgggaatagcagtaatgtctactgcataaagtcatttcagcattaaatgaggtcatgtggaaatgtcaggtcagaggacagccatttggcagtgtgcccagatgagctgatttctctacaaatacgactgtggagaatggcagtcacttggaggtatggctttgtggtcagccgggcttactcactagctgagtgactctttatatccaggccattcagtgctttcatttcaaatatatccctcagcaaaactgcaaaatgctacatgtcaaggacctttcgggctgctctctaatagtcttaatgagggtaaactcaccaaaatctaatggatgtgttgaaagtgattatcttagccagtgtttttcacatctttttaaaatcctttgacactaaaatttgtgctctagtacaaattaggtctccagttaaatgatgataatacctaaaatagttttagtagctagtgaacacttacttagtaaagttatttcataatttccacattatttggtagggttggttgacttaggtgaaaaatgaccaatgagaagtgcatgacagatgctgttacagatttaaccatctcgacagtattcttgaagaaagtggtacattatcttgaataggaggccaaaataatggtcttaaaattcacatttacttatatcttttgttatttcataaagaatttgagatagtaacatatttgttgaattgaaagctacctacatatttttgtgcctttacttctaatcattgtttcaaaataacattttgaagttatgaaacagttaaagcttaattatttaagaatatggatatttttactaataatgattgctttaaattgatctgaataatgtagagaattgggtattcatttctgagatatcaaagctaataaacatatgcacaatcacttgtcagaaattgactggcttggggttaattttataatacaagccaatgaaactttagctagcacccttttctgttgtactttgaaactaaagtgtttaaaagtgttaaaaagttcctaatgtttttccaggggagtttttaaaaattgtttctttagtgaaaaatctaactgatggattcacaatatttccaaaatatgatgttgcagggtttaacaggtttgttgcatgtaatggataagagtcgggcagtctggacaccaggccttaatctcatttaccatagaccttagggaaattagcttttctgtactttttacttatgtaaaaagggtgtaatatatacccctaactaatgtatgtaaggaatgtagataaatcgagctttaagcccctttacagaaaggatccatgaaaatcaagctcatagcaacaacaaaagttgctgctactactgtttgtaataacattgtcatgcttatccatactttagattctgggaagatgtggtaactttttagtataagaaacccttctgggccttgaattagcaatttataatttttgaagtccccatgactagggattttctatcttttttttaattttagaaaaaagttttcagagttaaattgggtgtagaataatattttctttctgtgtgattaaaagctctgtgactatagagccttttttttgtttgttttatgagaattgagttctcttctcttgagtattgtgacaaagggaaaagtctgtggttctctcagaatatttattccctctgtagagcttcttcaggtgggtgccagttagttcaatacccttttcacttttctgccaaggctaaatgttcctctaagacataagctattatctttttttgtaacccatggcctaattgagagattaatgcataattacccactcaatacatgtttaaaccacacagtcttatgagtgatggggtgggcattgcagaagagtagaagagtatgaaaagacatgaaataaataagtatgattgtgatggaaggttttagtagggaatagtgagagggagggctgaaaaaaaaggattagagcttgcttttagaagtacttagctgtagatagtaaacattattctttaggttctttgtctctcacaaagaagcttgtaatgatctcattatgacaaagtagggaatctcttccgcagactttgggaactaagcaagtgctattcaatatttgctgctgccctttttcttgaatttcattcttgcatgtgtgctaaggatggaacatttctgtcagcacttgtgagtagagactgcactgtgaattgctgcatatggaactatagagagcatgtttgttgtatcaagggtatatttttaactatattattattgatattagcaagttcatgatgaagtcccaatcaacttctagtgcatcttgagggcattaaaattgttgatgttaatggagaatggaaaattcctttttggaggtaaaattttaaatctgatttgaaataaggaatttattccttaaaggaacacataagaaactcttaccctctagagatctaagtacttcctgacttaaatcttcatattctaatatgcttggcatttacatcctttgtctctatcactaaaccatcacatagcctgatatttatgaggtatgttacctagagtgattctagattgagtttttgcagacaagataagattatggaacagagggacaaagaagaaattaacatagctgtggcctaattttaaagcacaactttgacatgtgctcatgtgtgacctctaggttgcttgtttcttaaaataaaaatatacctgtcttgcaccttcaatttaaagggcataactaatgaagacatttcttagatacttcttcattacatgttttattctcacttagaacagtttacatctgttacaattacttagatccttttttctaagttttagggatagttaaactgaatgcagcacacatatatgacaccaatgttaacacagatttctttttaagctcagttctctaatggaagtcataaaagcaatatttcacaatgtttgctgcaccccctgctggctgtattgtgacacttcttaaataaagagcatctttagatactgctcagtgaatactttaggtatatacatgatttatctttggagttattttttgtttagaaataatttcaattgcatctgatatataatagagtcgaaattttaattgaaaacagttttctttgtgatttgtcaattgatgtttaaacagtgtttatccttccaggtagtatgatgatgtatttgttggagacaaaatatttgccctagcctttttactaatatttcagatgagattctgtggaggagaagcatctccccaaatgtccttgttttatagtaaataattctaccacgaggatccttatccataaatctatattcatgtttattttgtgctagatacagatcttgcaatattcatgaagctttaagaagagcactttgaatcttaaaagagattctctgagcaggggttggcagtggtgaggtccaggtagttataatagccataagagcagggattatggttattgagctcaccagtgtgtttcaagccatgatctggagtcaaggtgttagtgattcctctaaggggagaaaaaataattacaggaagcataattttgtagttaatgccatatgaagtgacagccatcaaatctcagtttcacaagaacaaaattcagagatgctaaattaagtggacaaagatcattttctaaatggcaagttaagctaagtgacaaaaaatttagggccattatttataaatattgtgtaaattttaagtgggatcctgccctaatttagaaataagtacatcttctttaaatgaaaacacgtattcctgttatgtgtatatcctttactattttaacaaatatttgttgagattacacacatgttcccagagtgctttgtgttctccattatcacactgtgttgaaattgatggtttacttatttcctccagtgggtgctcaaattaatgctcagtggatggatggatgttgaatgtacaggactgagggtaggatcctaatgaatcaccacgtggccttcaatgtcctttggatttctgcaataattgctcacttttttgtacatatgttgttggatgtggtttttgctggttgcacacgcacatagatgttttgaatactattaactgatttttttataataaaatcttattcatccaaaatctagtattctgaatcagtagaaagtcttaatcatagactgttttaaaagaattgtagtttattagtcatatgcttaccattataacacagtcttaaagttaatgcttggcttttctaagttaaagtccttttgttctaaatttctgtggtcctggtataataaagaggtatgacctattaggatgtgctaacatgatgatattagtatgatgattagtatatgtatctgtgcaagtaaatgatattaaaatgctttgagacaatttcttttaattgcatttcttcctacaatatggtaatcttattaattttcttattcctttcctgtaaggcaaaagcaaactggtaaattatcataaaatcactgttagcatgaacccaaattaagactataaggctgtttgcatattatactctatagtttgtcttgtcatgtacaacgttattatgaggtatgttttagactgacagaaaatagttttacttctgcctatacttttatctataaggttttagaagtaaattcatagaatcagtttggacctcttgaaataattttaggagttatgaactagctgattttggcatgcatcttgatttggcaagtgaggaaactcaggcccagagagattaggcaaaactttccaaagtcccggagcctgagccacattttgtgattaaccacccagagtttttccacattgcttcccatgtaaagggtagtgaatagaattatcttatcaaatggcaggaagggtgttttgctgaattaattagcttgtagtgtcactgaacttacgcgtaacattttcatatttctctttgttgcagaatgcaaagtatggcgaaatccactaaatttatttaggggtgctgaatacaatcggtaagcattttgacagcttgggaaacaaatgggtctggttcagagagcaaagacagcagcaaatgtttttgctggttcatttaggggtcattgtaacagtctatgtagtgcgtccattttttaatactatcttcaaatgttttgatttttctgttttataaatattttagcactagatttgggataatgtacaaaaatgtgtagtttttagagtttttgtattaacagttattcttttcaatatatactatacattgaaaacattttgaagcttacctggaatatggttatagagatgtcgcagaagttatgttggaatttagtttagcaaagtaattaggcaaattagaattttcatagctttaggaaagtgtctattcataatatgaattagggaaggttttcattagcaagggctagtaaattttaagacaaaaacacaggagaaaatgtttatttcttttgactgatataattcctgaagggagaataagatgatttttaaaaattttttttattcattagcaaagctattttagtattcagttaatggtctatatttcaacgcctctgcagcttaatattttataggtcttgcttttctctctcaaaagtgtctaatcatcttatttctcctttgcaggtatacttgggtgacaggacgagagcctcttacttactatgacatgaatctctctgcccaagaccaccagacattctttacttgtgactcggaccatctgcgtcccgcagatgcaagtatgaaaaatccatacatccttctgaatgggagggctttttggcttaagtgtcaagatttctgcttttagaatatccactctgtaaaactccaatgaataaaatattaaattgttgattgactaataagaacccagaactctgataattaagtaaacctttatcacaatgaagtatttatgttgaaatgagtcccctcataataatttgaatcatgatttttaaaaatatatcgaagttggttttatatattttaaagaaatatgaatcttatatgaagctaatgaagttcttggttgagttagcatgaaggccttatctcctttatgatattcaaagtagaaattggaatttactggattcagatgattaatgaatatattttagtgacttttatttgcctatttataggttaactagcatcgaatggggtcatggccttggctattggagtctagatgtgtgttccatctgagaaaatactttgtttagtgtgtattttacattacttgagtttcagataattcaactgaaattttttgttataaaatttattcaaagtaaataggtgaaaaaatgtttttgaaagggaacctctacacactctaaaataatttataaaatacaaatttataaaataaataaggagattgttactcctttgtaaaatggtactctttgctatggtagaaacatcatggtacagtaaatattcccattgagcttcccaccatatgttcagaaactgctctgatgtataaaagctaggtttgcaggtaaatttgggatataagtacacatgttaagcaaaagcttaagcattttttactgacccacgcataattcttgaaatggtttcagaatgttctaacaccaagagtctgtgttaagtgcttcggaaaatgaccaattatgttgtatctaagtgaatgaaaaggttggtagcaatgtcatctcaaaatgcataaaatatattctccaagaacaaatgacattaatgtgcaaaagacacgcaaaatctctgttagagtgccttttcttgatttccttagcctgtagttttgtgagcacaaaaaaggtttgctatcagcagttgaaatactgtggaatagcacattaatacactaatatgactttggagattttggccaaccctcttagcaatgaaatatgttcttgtaatttaagctgacactcctaatttagctcttgtcctctactgagtctacctaattatatgtatggattgacttggtgttttctctttttcttaaatagtaatgcagaaagcctggagagagagaaacccccaagctaggatttctgcagctcatgaagccttggagataaatgagtaagtgggggaaaatcttgctgttaaaaaggaaatctcatcctttgctgaatatattcagttgccattgataggatacttaaattaaactgcatttgaactggaggattatttggggagttattactctatttaaaaaagttttttttttaaatgaaggacagccaccatgtggaggtggttttagtcattttatgaattcaatggctttgctgtgatcctaaattaatttcttgaagggctatccctaggatattgtgaggatataaaataaatacaattctttacatatctaaaacattctgacagggaaaattttccagatgtagaatgctcatctgcactagaacattttctagtagaacttctgctagtggggaaaacatgataacaacataaggtttaaaaaaaaaattttagaaaatacttcaagattaagacaaagataagaggaaatgctgtcttgagtgttgttaaacattctgtgggttaccaaggaaggctgggaaatctcttctggagatctcagaaaatgagaaagattcttaaagttggagtcataaaaactcagggttggcagagaccttaaaggtcacttagctgaaccacccatctggtgcttgaatcacctcaacactatccttgccaagtggtcattgttaaactattttatgatttttctgaagaaggttacagaatcttcttcagagatcttagggaaaaaaaaaaaagattgtcgtgagagttgaaaatcctgccattgtaaccagttgatctacggtttctgattctgtcatgcaacatatttattttccagtttcttgtcatctacaaattcgatatgcctgccttctgtgtgtcatccatatttctgagaaaaatatgaaggccaggaatagagccctgtgacatgacatagaaactaccctccaggttcatgtcttcatgaatcaccatcttttgtattgttcactcaattactaagccacccagttacactgtgactcagctcatatttctccatttggatcttaagaatgccaatcgtagctgcggatcttaaatttatagtaaatctattacagtaaattaagctagcacaatctgatttatttattcttagtgaatataagctggcttctagtcgtcactactttctttttaaagtgcttggagaccattcctttaataatccattagaatatctttccaaatcactgtgttctgtagtttgggaagtctgccttcttcccctttttgaaaatttatgctacatttatcatctcatcttctagcacctctccattctttgtgattcctcaactatccacagagagcaattccatggcctgcctacaaggtctttcggtttcctgggatttgcccatccagtccagtaattcatttagaatggatcaattatttgctatcttacatctttttacccattttagagtttaatttcttctccctttttcagtctgacagtcattctccttgatagagaagccaggaacaaaataggagggagagagttttgctttttctttattatctactgcttttaacaataaaccttccttgttttgatgttattatgttgtttgtcttttttttttacttatttgcctttgtgacatggggacggtgatagggccttaaatataattttaaaatagggaataaatggttgtctttagtattttattttgttttattattattattattattgttatttttgcaagcttcagctaatttggaattgtagctctcctgacattattcttataagctcattccactctcttatagaccatcattacatgccctctttccatcttttaaaatatgtcctttaaaaatctgacctgggagaaatctctgtgaagccgtgttggttacttaagtgccacccctcttttcttcctgagaggatcatttgtgattgcagttacagttgaacatttggaagctgctcaaccctcttaaaccatttttccttctgaatctcatgccattgaatcatgcctcttttctttgaattttttgaagtccaccttcccctctttgattaccctgaactccgaaatgacatagtgactctctctgaatgttcctatcaattttcattttaccaactatttttttcttcttggtcagaattaggtccagagttgaagttcccctaattgcttcctctaccatctgggagataaaattgttaccaaagtaagtcaagaacctgttgggtgccctacttctaaccaaatgagacttctagtggatatctggatggttgacacccccatcaccacactttcttgcttctgtatgtgtattgtgttgtgacaaggatgcatcatctatatcttccatcgagctgagcagtctgttctgtactccccaaccattagcacttctattgctctctcctttttccttcactcacaagctcttagcatgtttctatcccaaactcatgcgtttccacatagatgtatgtttcttggccagtagtgctactctgcctctcctcctaagaataccatttgaaatataaataagcaaagcaagcaagctagccccaaccattcttgggttcccagcccaacaactacaatcttatagctaattcctctgatactgtatctaccactcagtattacaatctcaattttcacttcattacccttgcctcatatttatatgttggcatctgaagccttaagcatttcttctgatgcctgtcccagttattttctccagtgaatcacttgtatagtttcagcatcattatggttctttccaagtcatggatgctgccatctgtagaaattggttttatagctgtttttctgggcatttttctccctacctcaccacattgtttaaagccccattgatggttcctgcctgaaattagagagactggctaaagaccttacagacccttcctaaggctaagattaactagtagccccagcccttacattagctgtgaagttcagcctccttttcctagctggctattgcagtttgtggacagtaaaagtaacatttggttttactttctgtttattttctctcttgtggtctgatggaaataagtagggaaatggccacaagtgaggcagtggggaaggagagtgaaaggatgggtgcaggacctgcgtggtctgttacagcctcaccacttccctattacattccctttctttggcagtgggttgttcctcatatgctttggaaggtttaaattcacaagaactccccatgttcattaattatccttttggcttcccacctaagagggttgttgaaaagattatatgagatgatatatgttaagtgcctggtacagtgcttaatatatactaagcaacaagtggtagctattgttgttgaaggcatgagatttaacttgttagctactgtggctgagtcagattttgagttcttcagaaataacactacttgtaggttcttccagtgttctctgaagcagaaagtcagtgctaactgtaaagagatgttgaagcactgtgttttttttcagtgagtaacttgatttaacgaatttcttattctgaagaaatccttagattgaagataatctgtgtttagttaacagaagtaaacctgtatatagcacctctaactttgagtgttggaaggaactatttaataacagctgttatcatcaccatcactagctgacatttattgagcacttaaccacatgctggctactgtactgagcactttacatgcatcaccttacttaaccttcacaacaacactgtgaacaaagattccatgttgttctccatcagggaggcagagtaagaacttgcccaaagtgacacactaatataaagggtgaagtccacatgtgagccccatgctcttaacactacgcatcctacctctcaagctaaaatacagatgtttcttttgtaccattattttgtgtcagcaactacaaacaggagtgcatgaaccagttggccactctgcatgttttggcgtaactccttgcctttctgcatgagctcctacagtctattaccatgtccttggctttgtaattgatggtggctattatctgaatgaacaggtgtgcaactgcttatattctcttggctgaagaggaagcaacaaccattgctgaagcagaaaaattatttaagcaggccctgaaggctggagatggctgttaccgacgctctcagcagctacaacatcatggatcccagtatgaagcccaacatagtaaggtttcctgcaggttgatgcattgggggatcagaattgtaaaaattattaatcagagcaaatttttagtccagttcaaaatatgattctcctagacaagagaaaatattggcttttgctttgtttttattaattttcttctttcctataagtgcagttagtaaataattaacttacagcttcattgctgtttatattcacattctctttcctgcccatagattcctaaccgcagaaataaatggcagtaacctttaatagtaaccttttttcctcctgagttcttacatatttctgttcatcagttgcttctgctcacaactttaaaacccagatgggaaacaggatttaaattagccatagtgttagcaaaggttttatcttatagatcttctacaacatggattgaaataggacaattaagaatataagttattggtgattgtatcagcatttatctcttacataagaaacattggtattggcttccagagagaaagagccatgagctcctagttatttatcttttttatattaaaataatgcctttttaaactccccaaaaaacgcctttttaaatttaagataactctttaaaatctgagacctttcacttcagtatactaaactgaaagccaatgacatttcgtgggggaacagtatagaaacaaaacaacgaaatcatttctggaattccctgagcccctcgactcatcagtttgtttgttgttgaagcagaaatttagcagtccttgtggtaagagagttaagtatttccatggtccaaccaaaatttgagagtatttccatggtccaaccaaaattcacaaagttattttgtttctcacttagtttctccctcctgaaacttagagagtagggatgtatctccttcatatttgagattataaaattaaatgttaacgttaaacttgggtttggtgtagaaactgactgcattagtccccataactaaggtgccagcaaaatctttgcattatagcctgcatatacatgagtatgtcctcacatgtaccacatcaattcctaagtttttatttttattctgcagcatatatatgctaataaagtctctaatcaccatctatgtctcactttttaataaaaaagtattttagtgtaatgcagtgcattttgaagacatgtagtaaatgtgtattttgtgaactaaatggaaatcaatacataaaattacataacctataatacaacattaattttctttcttttcttctctaaattaaatcttttcaacctgttgcctaaatccatccaaaaatataatcacatttttaaaataatttgtaggtacttggcagattttcagcacacatcttgttctcattgtttaagtcttgaaatgttaggactttggtcttaacatcttttaatagctgcatattatacatgtacttaatctataacaggtgtgtcatattttctcaaacatggtaatttttatcgaggattaagcacatgcatgttctcattggtctgaaaacatatccaacaagacatataattaaataaaagattaagattagaaattgttaacgtactttttaagagtcattttagtgattgttgttacaactatttagcttgtcaattctttctctaacactagggtagtttttcattttgttgcatactctattgtcatatctggaatgtgttatattgccatctaaaatcaactgcttaggggacctggagatgattatgatgtcactagtgttagggaaagaataatataaagcagaagtttaagatgaggcttctccagacttaatgtcaagaatgaaaaaaaaatagttcatcaggatgtaacctgagattcacctctgcatctttaccaaaagaatgcacgcttgaagaatgtggaattcctgcttgtaaaccgtatacactgtgggtatgttcattttcgcagcactttgtggcagatgattttatttattatcaaatattcaacatcctcactcaaaagcatggattaggtaattagtcagatgatttgacctttgggagtctaagtgcttttactttacttgatcttcattctactattaacaaagttgtcagtgctatgaaaatttcctttaggggcaaggcaaatgggcctctgtattttttttttttttaaatgttggtgttttatatctccctcttcaggacgagacaccaatgtcttggtgtacatcaaaagaaggctagcaatgtgtgccagaagactcgggaggaccagggaagcagtgaaaatgatgagagatgtgagtttgagtttgtgtttgggatcagtggcttacagatataggagcccgctgaatggccatagcagtctgtaccagtgatggtgtggtggtcccatgggttctggagccagactgtgtggggttcaactctagttcccaatttactagatgaatgatgtatgttgggcaagttactcagcttctctttgccctagtttcttcatctctaaaatgggaacaacaataacagtcctcacaattacttcttagaattttttcgaggactaaatgagataatacatacaagcttctaatagagtggctggcatattttaaaaatgtcaatagatgtccttattaaacctttggggctgcagctggaagccaataatgagaccagccatgttagcaaactgattttttttctgtgtagttgttaggaagattcgaattaattatgggtcaaattactactctcaaatttaataatattatgagttaatcctattgtagttgtttcaagcattttcctagattcttgaaccaggattctttattagtagtcaagacaaaagaagagagcaaataggtggaagttttaaaacaaaagagaaccaagggaggttattattatgtaactttaaaacaaaacagaggttttaagggaaaccagttggggaacttggatttccgtgttttttgttaataggaaatacttttcataaagaaactgacaccagtatgaattgtatttataggctattttctttttaaaaacaatctcagaaaacctttgtcaacatttcattcttttgctgaattagaaggcatacataactgcctattataaaaatgaaagaaccaagcggcaagataaaagtggcatcttgctcaattctcagctcatggatttgagcacactaggactgcacacttggtgagccttttctgagtttgtctctggaaagacagttattcttgtgaattcccggttactctttggaggagggagcaccaacactcaacgctcacccctggttatttctgcaagttacagcatgatgtgagaaggcccaagtgagactcatgctttggttttggccactccattaggcaacagtgtagcccccaaatctgaggagaggaactagaagggaaggttataaagtatttctctttgactgcaggtgatagatgctctctaggaaagagaatctccctcaattaaattattttgtttgaaggaagaattcaaagaatgttatatggtataagtgctaattttaagaaaaggagatttctgccgagatatgaacttgctctcaaagctttttaacttacagaaattccatcctttgatatacttcatccctctgccagtcactttggctctgaaggagctgggtgttttatgaaggatgaggtatttctctatcttaacctggcccagccacattcagcttttaaacagagttttcttaactttaattagcttggaacaggcatgcattgaggagctaattttggtgattttcttgagtgcttaagcaacttaataggaggaacaaattctgatgattttaatttcaggttttttctgtcagtctcttggttatcataattttcagtacatataaaatttcatgtgattaaaatcaatgcatctacattatgatttgctttttgtttactattattttatacttacaattccattgattgacctagttcacatgtagatcttgggggagagatggatgcagtgggagaaacactaagcaggagtcaaaacacctggatgtggatctcagctttgctctttaccagcttcatgacccaaggcaacttattaataccttttatgtgcttttcatttagtcttctgtaaattggggataatgattcttacctgaaacgataattgactgggagaattaaataagataatgtgaaaacacctgacatatagtaggcatgcttacaattttttttccgatttttctccgttatataaatatgccatcatttgcttgaccattctcctgatggacattttacgatatttctaatttatttttcttgaatgaattgatcactcagttaatttctctcttcctctctcgacatatgtgtatacatacacatacatatttatgcatgtttgtatatatatgcgtgtttcttatattacgtttctaaaaaaaaagtctgtcatattcttagaataccaatacatgtgctcctttttctgggtttatggagcatccagtagacatgggccttctggtataacagtcctgtaaggaacactctcagacatggtagagatatgttttgaagagaaatattcaaagtgctccttccttcagggactgcttttatcaatccttgcaccacaaacagaggagggaaggttgaggacccttctctttgctaaagctgtggctgttcccagccttgcaggagacagttgttggccaggcctaatttgtttggctcctctccggtcatgggtcaagataactgcgacttccctgagagattcactcctttaacagcatgcacataaaccattttgctggaagactttctctgataaaatagctcagtagattccagacagcctgctgatagaggcttaggcaggatgatctaatttcttattaagacacagccatcttctccccatatgcatgagtttaaaactttcctagagcagatttcatagtagaaatagaaatgtcagttagaatgccttccatgtagaaagcagaatcgtttaaagaaatttctctggaaacaccttaaggaaggggaaactgttaattgaaaagagattctaaaaaaaaatgaaagggaattctgggaaggccagcagtagataatttcttatattttcatggcaatacacctgtgaaatattgatgaggtaaacacgtcgactccttaacatcaagattcatcacttctcattttttaaagcaacacgttaattattttgaattcccaggatgtttttcaaaaaaactcattttaattagcttccttttgcaatcacgaatatggaagcggcaccttactgctgaaggaatattttggcagtaagcagagctaagagagcatgctggctttttctttctttctttttcttttctttttttctttttcttttttaagacagagtctcactctgatgcccaggctggagtgcagtggcacgacttggctcactacagccttgacttcccaagctcaagttgtttccccacctcagcctcccaaagagctgggactgcaggcgcacaccatcatgcctggctaatttttgtattttttgtagagactgggttttgctatgttgcccaggctcatcttgacctcgtggtctccagtaatccacccacttcggcctcccaaaattctgagattactggccttgcatgctggcttttgaacatcactgtaatgtaaggtgttatttattattcaaaataaaaagttgcattttctgctttattaaatttaaggaaaggtctttctgcttgctctcatgtttggtaattttgcctcttcaacatttaatatacgatacaatttcttttttccttttgacatctactgtttagctaacctcaagttttccctctgtctttccctggccctatttgagtagatttggaatgaatgtcatagggctgatgaccatggtctagtcccttagccatacactgtcagaactgtcatggataaactaataaggatgggatagattgcctgtatgaaagaactcaaaagctgctgtgcttcagtcattcggtctagagcaggatttctcagcctcagcactgttgacatcttgggtcagattggggagctgccttgtgcattgtaggatgtttagcagcatcctaagcttccacctactagatgccaattgcagcttaacccctgtacctccccagttgtgaaaaaaaaaagatgtctccagaagttgctaaatgtcccctggggggcaaaatcatcccgcattaagaaccactgatctagagaatcttgaggtgagtagatctgtttcagggctgacattgggtgttttttttgttttgttttgtttttgagatggggtctctttctgtctccaggctggaatacagtggcatgatcttggctcactgcaacctccacctcctgggttcaagcgattctcctgcctcagcctcccgagtacctgggactacaggcgcatgccaccacacccagctgatttttgtatttttagtaaagatggggtttcaccgtgttggccaggatggtcttgatctcttgatctcatgatccacctgcctcggcctcccaaagtgctgggattacaggcatgagccactgtgcctggcccagacatcgggttttatccactctgtgtgttaggagtctgggcttcccttagtgtgggtgtaagcctctgaagcacccccagatttgaccagcctggttttgggggctgttttgcccaaatgagattccctgaagatccatcccagggcaggaagagtaaatgaacctggtggggtcctggtgggagggctgacaaagaggagaatgtgatgtgggttggtggtctcccttgcccctcatgcatgcttcgagatcattgtttgcttcatttccctaaaatctacagttcctttgaaagtagactctggcgttatcacctttccccggtctttttgcagtttcctgttgacctctgagccattctccctcactcttgtttcactctgtttgcaacactacctcttcctgtatcctggcctctcatttctcacagatcatcatgctgttcttgaaacattttatttacttgattttagaaaactatactcttagtttccctaaaatctcataatctctttgcgggattttcctcatctttgtgacttccaaaatttgaagtgtcccctggccagtcctgggtggctacattcaatctcagagttttaaatatcatctcaatgacaaacgtttctgtagtgtttactgtgtcctaggcattgttctaggtgctttacaaatataacctcatttaattttcctaacaacccttgacattggtgcttgttaaaggtcatgtaacaaggtagtatttctgagagtgtggtctacaaccacctgtatcagaagtgcccagggtgctagtttagtactcacctcacagggtagatgtcaggattaaacgggataattcaagcaaagtacttgggaccagacttcatgagtaataacgactcattgttgctgttcttactgttattgtccaagagatattgttaagtgaagaggaaaagtataaacataggtataatttgattccattttttcaattaaaaatatatgctaatatagactaatagttctcaaacttcttggtctcagaacacctttaaaataattgaggatccccaaaccttcgtgtgcgtttacctgttgatatttaccattttagaaaattaaaactgagaaatttgaaaagatgttaaaataatggttacaaatacattatatgttaatacaaataacatttttgtgaaaactaactatattgttcaaacaaaaaaataagaagagtgacattgctgttatacttttacaaacctctctagtgtccagatgagcaggaggctggaggctaatatctgcttctgtattcagtctatggtgatattgcccaacaggtgacctcttggagtgggagagggagagtgaaaaaggcaaagaaaaattttattattatgaaaatagttttgatctaaggactccccgaaaagatgtcagacactcctcagtggctcacacttgtaatcccagcactttgggaggccaaggcaggcaaattgcttgagctcagcagttggacactagcctgggcagcatgatgaaaccccatctctaccaaaaaaaaaaaaaaaaattagttgggcatggtggtacatgcttgtaatccccagctacccaggaggctgaggtgggaggatcacctgagcctggtaggtcaaggctgcagtgagctgtaatcaggccactgcactccagcctaggcaacagagtaagaccctgtctccaaaaaaaaaaaaaaaaccaaaattctgggggttccctaaccatacctccaggggttccctgaccatgccttgagagtcacttgtataagcataaggaaaaaccttgattatagagaaagtctttagcattaaaattatagctgtctattttttgtatttaggtaatgttgagtattatatgtgctacttgtattttcttatgatgataaaagtaaaatttaaaaataaagattgagaccactttcaaaagaacaaagtagtggatgcaaaaaaggtagaaaatggccaggtatggtggctcacgcctgtaatcccagcactttgggaggccgaggcggggcagattgcttgagcccaggagtttgagaccagcgtgggcaacgtggtaaaaccccatctctactaaaaatacataaattagccaggtgtggtagcacacgcctgtggtccgtggtcccagctgcttgagaggctgaagcaggaagatctcttgggcctgaagttaaggctgcagtgagccatgattgtgctactgcattccagcctgggcaacagaatgagaccccatctcaaaaaaaaagtagaaaatggggtagacacagggaaatatggatgtggtgaagaaaaacttcatccacctagaattttagcgtaaaaccagacctgtgactagtttattcccaggcatattagtttcctggaactgtgataacaaaatgccccaaactagatagtttaaacaacagaaatttattctctcacaattctggaggctaggagtccaagaacaaggcaggtggcagagccgtcctccctctaaaagctctagggagcaatccttaattgcctcttccagcttctggtgtttgctagcaatctctgacattcccttgtagctgcattaccccagtctctgcctgtcttcacatggctttctccctgtgtgtgtgtgtttctgtgtatagatttccctcctgtcataaggatataagtcatattgtatttatgacctcatcttaagttgattgtttctgcagaaacactatttctgatagggtcacattcataggtactgagggttaggatctcaacatgtctttctgggggacataatttaacccacaatagcaggtcatatataaaagcaaaatacagataccctgtataaatttacattcttctaaaacttcactgctatatcaggtcagctaaaaacatgttttgtatgcctttgaccatgttaaacccactctcagcctagcctgtaaagatgatagctgctaactaaccctctgtgttcttacatttggctcctttaaaaaaatagtcagagggagctccttgtgtcctttctgcattttcatcatcatctacaggattcccagctgagaactacagggtttttagtttttatcaataacctacagagtgagtattacatgtgccatacattctgctaagaaatttacaaatactgtgtcatttaactcacacataccatgagtgtcctataaaattacaaaagtaatttatgctcattgtgacaagtcaaagaattgaggaagttgtgatatcacctacacttctacagtgccatcgcactgtaaaggcatatgtgactgaagactgaaggagatgccaaagttagtcatgtgatgtattttcaaaggccctgaggcagcagtatgtctggagtgttcaagcaacagcaaaggaatcttgggtggatagaacagaataagcccaggggagagaagggagggagcttaaagatcatacagggcttattgatcacagtaaggatttcagcttttactctgggtgaaatggagagctttgcaaggttttgaacagaggagtgacatgaccagtcttaatttttacaggctgctgtgtagcagcagagaagcggaggagtcggtcagcaggctcttgtattaatcttggcaagccacaatggcagctcaggccagagtggtagcagagaaggtggtgtgaagtgatcagattctagatatattttgaaggcaggactagcagaatttgctaattaatcagatatgcagtacaagaaaaaagagaagtcagggctgattctaaatatttgccttgaaagggaaggagtttgtgtcagctaagatgtggaagtctggggtgagagaggttttttgagagaaaattacgagttcagttttgaacatgttacatttgagagagcacctattcattgttatcttaagtagtgacttcttgatctttttgtggactatgacaaatgtatactttgttgggacattttgggggatttgattagatccctcttaaaatatagttggtgaggaacttcaggaagataaaatctaattgatttcagagaaactgtgactataacagtctttgcagaatacagaatgtagtgtcttgtgtgtttaatttatatgtctatagatctctgcttcttccctgttttactcaacactgtttttcaatctgtccatttttgctctatgtacctcttgcatctagtttgcagtttctaactgctgcatcatattccatgttgtgttcttactctattttacttaacctttcctctagtgaaggaactccaggtttcttccaacttcctgttatcccagcagtgctgcaatgaacatccttgtagacatgtgagaaacattcattaggctgtgggattatatacgtgctagattccagtgagtcctgcaatttcactcttcagaatggctgcctatgattaaattcttacgagcaatacctgactatgcccatgtatctcagtactaggctctgcttcaagcacgtctatatttaatatacatatttatatattttaaaaatttattacatatagcttttcatgatgttatttcataatttaaaaatactatgtagtttttttcttccttttcattttgtattttatttggctagtttttactcttattttgcctgattagtcttggcagaggttgtctattttgccagtcttttaaaaacaattaggtttagtttatttcctcaacttttttgtttttattctgttttttctttccatatttgtattattgtttcttctcctcctcatccttctccccctctatcctctgtgtttgttgcctttttaccatttgatcctaagcatttttaaatttcttttaaatttcattttaccctgtatagtatgttttacccctcgtcattgattgatttttttctttacattatgcttagaaagcatacatcatatgatattgatttggggagaatttatggtcacttcccctgaggcctagcatatggtcaggtttaataaatgttatatctgtgtttgaagggaatataatccctgttgggtataaagatttgtatgtatttactagtttgagcttataaaccatattattcaaatctcatatatcagcttattttgtctctttgctctatcagtttctaagaagaatgtgatagaatattcacctccaactgtttattaatctgttttttgcatgctcagttatttgttcctttatatattttgaggttttgttgttgggtgcgtttatgttggtgattattatgacttactgatatgttattatgagtatataatgtctcttatatttatcttccttgaattttttaacatatgttaagaatacctactctaacttattgtgattcatatttaactggtttattgttgtctaaattttataatcaagcttcctataagtttttgatggatcatttggatctgtaaaatttttgatgaatattgtctttattcaaatctgagggttttatacttttgattgctatgtttatcccattcgtgtttatagagagtaacagaataattactgctttttttgagcgtgtgtgctgtctttcatgttttctatgtcgtactttctctcccattgaaaatatcttccactgattcaacattttaaatttctgttttattcttctgatattcccaactcactaagatccatacttatatttatggttcttgatcagttactaagcctatcactatgtcaatatctataaattattcccaaatgatagaattaatttagcatatggtgccctgcttcccaccctaaatcaggaggcaaccatggacatttgtgaacagcttttccttctgtgagatgtgtggggagcactgatgtctgagtttctgctgggctggcagggttgcttctgtgagcagaagccagtgaagttgttgatttctagggtaagcagagaggtgatcactggaaacagacttatttcagacctgggccaccaggaacagaaaccagaaaacaggcaaagccagcaatgcatgcgatgaccagggaggacaatgaattgggtctcctgggtttcccttttaaataatcaatgcaaaagcgttgatcatatccttcttcctggaccgctatctctactgcttgttaagagcagataccctggttagcctttgccctctccttgggcctggggaagttacctttgtgactcaagaatcctcaggtacacaaacctgctttctgggacctcccactgagccatttaaatacaagcttaggctctagtaggacatctttactctttcaccagtaaaatcattactgcctaaacagagtaaagatagttaccaccgaccttcctacccctaaacacccatttctttaaatcaggtgggctgtccttacagcttaatgtatcactgtcccattttccactcttgattcatgatttcttattgttccatggagggtcaggaggggcccttctcaagttttcattggagagatgctctctgctcctactctgatgggctcctctggcatttaggtgtgtagaggtattctcaccctccaatttttgctatatgcaagtatttcattttatcaccttgactgtccgtgtcctacctttttttttttttttttttttttgaaggcattgttttttgagcccattgacattttattctaatttggatggatagctgtggtttttttgtttttcttaaaacttggttctgcttcttttactgtgtctttcctcctttttctttttttaattggaggaacttacttcagaagtctagttatccttggctaaatgttaacatttaaaaccaagcaccaaaaagcttttggaggctgtatgtttctatctagggatgattgcctgatagggtttacttgtggttgcccgggcaactggcttatcatttaatcacacactgccctcaaatgtcagtacctggatctttttttctgtggtggttcatttcctccatggaaagatcgtcaggtcttttccttgtggactatacacctgactgccagtgtttctgggatcaggttgggagacagagctgtgtcgttcattatccagactgtcaccttaattattctgttgttagcaccaggcctcgctcagtccctcactctgcctgatatccctggtttcgtggttgtctgaggtgggaaggagaaactggagtgtctagtcactatgggtatagacttaaacccagtcttgttctctggcttcttctgtgcctcatgccttcaagtgctgaggtcctcagggattctgtttcctttttgtttgaatctctccctgaaagtattttaggaggtaatgttgtccactcttttcatgcagttacccatattccataagctttacattgcctaaaaattcttcatagtgttccatcttctcttgactcttctgtttctggttttagcttttttaagctcttcaggtggccagtttggcatttcagttgtaacctcttttcagttacttccctcctggaacactctttcctgctgtctgggtctctcacttgtgtaatttctcttctgcctctccatctgctccttctccatcttttccctggctcttcctgcctgcagcttctcagtgctggagggctgcagcctctgcctgggcctccattcttccctgtgacactccctttccagccgtctcacttggccatcaattctaaatacaggctgtaaggtaatgactcctatagttgtatttccctcttctctgttgaactccagatttatattcatttgcctacctgacatcattacttaggtatctaataagtacctcaaactcaatatgtcaaaaaaattgaactttccaatcatttatgccaaatctgtttcttcactatcttggctatcttggtaagtcacattacatctacttagttgctcacgtgaaaaacctaggagttatccttgattcctctctttgcctcacctttcacattcaattaatatgtgcaagtcctcattggctttactgccaaagcatgtacacagtctagtcacttcttccaacagcactgctgaaatcctcattcaggttaccactgtctttcatctcagctatgcagtcggtctccagacttccactgtcgcctgtatagagtccattctgatgaaagtaactcaaactacttttttaaaactcagatcagcatttgtcacttttctgctgaaaagccttcagtgatttaccattgcctttagaatagaatgcaaactctgtatgtggtctgcgaggcctcacatgatcttgtccctgcctactcttctgaactcagcttatgctactctttttctaactcactaggctggactcacactggatttctttttgagtgtgccaagcttgcttgatcctttcttaggacctttgcacaggaatagactgatccagatcctcacttggttggctccttcttgtcatttaggctgagctggaatagcactttagagtggaccttccatgatacccagttgaaggagcactatgcacaaacactcatgtgcacacacacactatttttttcttatctatttttcttattttttaattgccccttcacttttgaaattacttatttgtttatttacttatttattgtctgtattccccacctccattacaaaataaattctacaaaggcaggaacttcatcttccatggcacttgatagataggcactcaattaatttttgtggaatgaatggatggatggctgaatgcctgtatggggagtagaggggtacactttccaccccaaatcctcgtaaaactcaagataagaggacttgactaagaatttatgacctcaggctgggcatggtggctcacgcctataatctcagcacttagggaggctgaggcaggtggatcacttgaggtcaggcatttgagaccagtctggccaacatggggaaaccctgtctctactaaaaatacaaaaattagccggtgtggtggcacatgcctgtagttccagctacttgggaggctgaggcaggagaatcgcttgaaccggggaggcagaggttgcagtgagccgagatcatgccattgcactccagcctgggtgacagagtgagacaccatctcaaaaaaaaataataataatttatatatatataaaatatatgtattatatatataaaaactatatatatatatatatatatatatatatatatatatatatatataccatgaacaaatctttagtttctttagtgaacacctctctgattatagagcaggcagtcattttatttccattaaacttggggcaatgagaagtgttgctcagcccagctgctctgaagtcaagtgtttaattacataaggctactgtcccacaacccactcctgctttctgtctctgccaactccaaatttggaacctctgtgaggctcttctcagaacagctatagcttcctctgctgtggcttaatcatgtcccacttaacagtttatcttggaggaaattgttaaaatctcttgactctgccagccattcctcccacctgctttcctgttttcattacaggtatagatttctctccttcgacaccattttctaataatttcaataggttttgttgcaggggagaggagtagctaggtttgttcagtcttccatctacatttgtaagtcttttgcctgagtccttttactgctgtgatatgggctgtatagagccttcacaagtggatccagagtttatgcattaataaataactccatctggtgttctcatacatcactgattttagggagataatttttttagatcttttgctgaagagtcaaaggtcattttatgctgctgcttcagagtacaacacatgtctgtctcagagagagagagagggaaatgctcactcctgtcttgtatagtttcctgtttcaaccttgccttctatttttcggtaatggagagacacagttcaaatgttctgggtttaatttagtgggtcccggtagaataaccccaagtggattgtgggttcaatttgtgagatttaagaggtagagttgagagaagttggagactaggtaagtttttgcttgcttttattttcagggtggttggtgttgtatgaggaagagactaagaaagataagtcatagataacgtctggatttcttgcctgggaaactgggcagaaaacatcatcatcatggggactgagattgtagtctaagtagctggtttatggatgggtgggcaggaggaatgatttcagctttagatctgctaaacctatgggtcatccaaatggaaatatttagaagacagtgggatatacagaccctgagcttatgagagagatatgggctagaggaagttctgggaaggatcagcatgggaggtgatttagatagtgagtgaagatgagattatggaggaaaaagtgagtagagtaaaaaagaagaggagggagaagtgcaggatcaatcagtcaaaggatacttaaaagaagtggccagagaagtaggaaaaaagtttaggacactgttgtgtcatgaaatccatagcaacagaacatcttagagggaggaaatggtcaacagtattaaatgctacagagaaaaatgtatatatgatctgagcaattcttagtccagtacttgtcacacaattactcagtaaatatttgttgtggagaaaactatttgttaccttttacttcaaagaggtggttggcaatttggcaaaagcaagatcagtagaatgtaaagtgtataaaatagattcaattgtgttatctcccgaatgtgaggtaagatgtctactggagtagtagaactcttgcaataagcttagatggaaaaggaaaagagaggtgatgatacctagaagggaacctgtaagcagtagaagacctgagcatgtgccagtgtggatgggaaaatactgaaaagcaagggagaaattaaacatgcatatgaaagagaggggatcactgatagaatgaagtcctgaggagtgcagcgtgatgaattacagagcataggaggggaggattaactaaaggagtactacggaatgaatgtttgtattctccccaaattcatatgccaaagctcctctccccactgtgatggcatctaaagacggtgccgtttgggagctaattaggtcatgagggtagagcccttacagataagaccagtgcccttataagaaaagacaggagaggatctgtttgtgccatgtaaggatacagcaagaaggtgctcctctgcaaaccaggaagagggccctcaccggaagccaaatctgccaggacctggatcttggacctcccagcctccagaactgtgagaaatagatttctgttgtttaagatgcacagtctgtgacattctgtgatagcagactgagcagactaagacaaagaggattccctgtgtggctgacagggctaggaagatggatctggatgcaggtggggcctgcagaggagggatatggtagaggtgcagagtgacagggttcctgcctgctgacttttgtttacttgattagatagaagacagggtcatctgctgggagttaactgaaaggaggtgagttaagagtattaagggagtggtggaatttgcaggaaagaagtcagcagagaggtaaatcctggaggtttactgggtagttttggcttgatagaggtcagagatcaatatactttagttgttcctctatacctcatagttgtgccctttggcctgaatgttggagcagaaatgatagacatctgggttgatctagggtgagggtgttgctatgtgagtggaatgaaaagatgtgaggaagtcaggaacttgaggaattggcaaggaaatggaaaggtgatgggccgtgggctctaggttggagaagggaggaaggggagggagtgtaagaagggatgatggattcattcttttttaaaagcaagcatctatagaatgcctcacaccaggacagacaacatccctaccagcatggggaggggagacatgaatgataaaggcagttaaagataatgataggtgctataaagaaactaaacaggctgtcatggtaggtaacaggagggcctaatttagataagtgctcaggaagggcctctctaagaggtcatatttttgctgagatctaaagggtgagagggagccagccacatgaagatctggtcagaggaagaactaatgcacaggtcctgaagctgggaagagtttagcaagaatggaaaggaggctaaggtgactaaagggaaggtcagaatgagatgaatttgaaaaggcagggagcagccatgtcatttagggctttgtagttgtgtaaggcatttagatttcattgtaagtacaatgggaagcttttgaaatgtatacaacagaggagggatgagatcttactaagctacattgtcaagaatggagagcaggaatggaggcaggaggccagtcaagaggtcgtgatagtataccaagcaagagctgaagagggtttggatttgggagtggcagtgaagaagtggttggatttgagatatatttggacatatgtatctcaacgccctacccttggttcataggcctccccttggtttaaaccatcatctctcacttggagtatactaacagccttcccttttaactggtctttctgcttctactcttaattctatctccacatagcagagaatgaagccattgaaagcatatgtaagataatgttacatttgacttccaactctccagggacctctcatctcactcagagtttaaactctaaaagtggcctacaaggctgtccacagcccagctgctgtgttcactatgctccagccatgctggccttcttgcatttgttgaatacaccactcattcccacctcagaaactttacactgctggaagctttccccagcatgcttctcttccagacattctcatgacttgctctgttaccagtttctgtttatgtgtcaccttgcaatcctaccttccctgattgctatatttaaaaatcacatctgcctgtgctgtaccaacattcacgaacccatttccctgctttacttattctcctcaaaatttatcatgatctgacagtctatggattttatttatttgcttattttccatttttcctttccccagaatgctattttcatgaggacaagaattttttatgcctattactgtatcccagtacaatagtgcctgatacacagtaactactcagtaactatttgtaaaatgaatcgaatagattggctgtggaaaaaaagaaatggtataatcaaggaaagttaaaagtgcacagctttttagcctaatcaacttggtggtggtcataccatttactgaaagaaggatgactaggagagggacgggttttaaatggtacagtgggcattgtgcttgtgtcatgtagagtttcagatacctattatagctccaggtaggtattgcaggaaggaaattggatggaggcctggaactcagaggtgaggagtttgggagttatcaacatatacaggatttaaagccatgatgttgaataggatcatgtatgtggagagatagagaagagggaagattaagaagtgagtcccagtggtctccaacattgacagaggagaagcatccagtggcttctgagcaggagcagctggaaaggcaagagtaaaaccaggaaagtgtgttaacatgggggcttaaagaaaaaagaatttttacagaaatgagagtggcccaagaaagataagaacaaaaaagtagagaggacaaggcactggtggtctcagtgaaattacagaggaagtttagtgggagtaatggtgtgagataaccggagagcagtatgttatggtcagagcattgcacagttgaattttaaaggaacatatctagataacgtcaaggtctggaatttgactatggagtcttcttattttgagaaggtaaaacactaagagtctaggttaccagatgggatgttcacatagactgaaattatctttgtggagggtaaggcttaaggtcaagagtaagaatatgtagccagataccaaaatcttcagtgtatgcgggtctgttacttggtagaatacatggtaagagaatgctggcaggtgctggaaacatgatggcatgagcttctgaggggcaagaactgctgcccaagggctgagcattaatgatctggatgcactttgggcaacgaggagaagccagccctacatcctgcctcatagacaaaagttttttggggtaactcaacagctgcaaaagaagcagtgaactcaggctggtttctgtaaatagcatgtggacgtgttggggaatgtgtgtttcatggactcagattccaggagggttcagtggaaagacttggggagcaaagagaatgttagaaggcaaagtgaagagcagtgtgtagatgaatgtcagaggttggagtaccaaccttctgcctattgccatagaagaatcttctataatagttaactttcagcatgaccctgtcatgagatgcctgccagcatgaatatttgttaactgtgccccagataaccatatgcattaatctactgaatagaattatttactattacccatgtgaatgtggaaggatgcctgccaaacacaatgatagtggttttggcataaaaagtcctttctgacagtaattgttggccagtgtggttagctgcttgttgaggccactcttggcacaggagagcagtgccatgtcatcacagagggggaggaatgcttatcgccctctgtctgtgggcctgcttccaagccattcaaaatatgcatcaaattgctcgggtttgttcatgatctccgggctaggacacagccctgttttaagctgtttaagatgagaaagaaatgttttactcagagttacccatcagttttgaggaggttataaatcgttcttttccccaagacagcatgagaccagcttctttcctgccctcctccccaacaacctcactctggggtttgtgaaactgcagtttgccatagagtttagagtacagaaatttcctccctaataacatagataaaacagtggtgctgtcagacctttgattttggaaagttcttagatgtcttaaagttaggtaaagaattgtcactgaggcaggtagaagtggaggacaatctttgaagatttccaagttttgaccagatttgcttgttgtttttatctgattgagaaacaaacggaaaaggaagttttacactgaaaacatttttgttgggctgtgcataaatgcaaagcttgtctcattcattttaatttttaaggaaaagcttcctctttggactaaacggatcacagttttgacaggaaaagtagataattatttagataaccttccagccctttgagtctttgggagatacaaaactctcattggaagatcatcagcatgcctgcaactgttacttctctttagttctcaatgatggatgcatttacttaatgcgctcagttcagtgaagaacttgttaactggtgaactagtgaacatgcggatcatatattgaccatattacttttcaatggatgcagcttaatatttagattagttgtgaaaaatgacattttctactagtgtatgtttaggcctctcaggactcagtactgcattttatactgatctgtataaatggaactctcgtgggcctctgaggactctggtaaacaattcattcttctgttcatggcccttagtgtcagtaaaaattactggcaaaataataaccatgcattatacagtgtcttttctattttctatttatgcctttatttgaaactataattaaataatgtcaaacttgcaactataacaaaatagtatctgctctttgaatatgatacaggccaaattctataaactttaattagcccaagcttgtattgacctcagtaggaatctggctggctgaggatctcttttagttacctctgccttaaagtatgtaagaattttcccattgcctttctcactcaaggaacaatacatgcatagctgaactaataaaatgcttaaatagatacaaatcaaacttgaaaggtttaaactgttgttttcatcctgtaagtcagctgagaaaaagcatacagaccgtagttctaaattatgtccatagagtatttcaaatccagtgaattaactctgcctttttttcccatttgagctcataaatgttaacctcagaagtgcctcagattcttccattgaaataaacttgaactgacaatagccagatgatgtaaaattgaaactgaaattctatccttggcccatcccatgttcttccccataggtattagaggactcacaggagagttagcgttttcactctatttgagctgtaatatttgggcaaaacagggcatataaatttcttgctgccaggagaaagcaattaccagtgtggagaagatagcgggcaataaataaacagaactatgctagatagtgagcatgtttaaagatttatttagaatgacttagctgatagaaaacaggcctttatcatatgctttcattcaaagcttgatatggggactgtggtctttttgtaatagaaaggctaattatgttaccaagtatttatttggtacattattttaaaataaataaatcgagttatgttctattgtgcaactaaaaaatgaaaactattcacatatagcatagccaggcatggtgacacacacctgtagtcccagctacttgggaagctgaggcaggagaattgctggaacccagaaggcggaggttgcagtgagccgagatcatgccactgcactccagcctgggcgacagagcaagaaactccgtctcaaaaaacaaaacaaacaaaaaagcaagccaggcgcggtagctcatgcctgtaatcccagcactttgggagactgaggcgggtggatcacctgagatcaggagttcgagaccatcctggccaacatggtgaaaccctgtctccctaataatacaaaaattagccgggtgtgtggctaattttaatttaatttaattcttcagcctccagagtagctgtaatcccagctactctggagactgaggcaggagtatcacttgaacccaggaggcggaggttgcagtgagccaagattgccccactgcactccagcctgaccaacagagtgaaactgtgtctcaaaaaaaaaaaaaagaaagaaagaaagaaaacaaaactattcacatgtagcaaatcaaatagccctttgaaaatgtactatatctgtgtcaacattatttatggataatgactccctatgtgtctgtgtgggatctctacatgtagtgggagctaggtgttatccccgtcttactgatgaggaaaatgagctcacctggtgctaagaaacttcactttccctgggtatcaacccagatctatctgattgcaaaagtggtgctgctcttgacttctataatgtgccctctctcccgtgacaatccctttcatctctctctctctgtctcccatccatccatccatatacacatccctcacaaatatgagtttgtgcatatgtatatattacatatacacatacatatacttgtgtgtgtgtgtatatatatatatatacatatatgtatttattctcttttattttgaaaacaatgtgccagagagtcatggatgtggttttagagaagaagcaagaaggaatttttgtgaccccaaaattttattaggtagtcttatctagcctaatcccaaccccaacactaagggttagacagggaagggacttaccttatagttaatgtaactctgaggcattcttcaggataaaatagtaattcttaaagttccttacaccatatctgtcagtgaacctactctctaaaactcatggagaattaagaagtgggactccagctgtggttcatgtgggattagcagttattatcttgatattattatagaattcaagtacagagtattaaaatctattagatcaaattattttaggggaaaattatctaaatattgttcaatcaaggacactgttgtttttttttttttaaatgccaacaccaccataaatagctacagagccaaacccctgaagggaagaaataattttgcctcaaaaggcatttagaaaataagaaaacaaatcaaggtctgatgaaaattcaactctttatgacttgaagaattacatatgaaaagtacatgtcacaaacaccctatttttgaggaagaaacttttaaaatataaaaatgtatgcagaatattgtgtaaaaatcatagttgcactgcttagaatttaaaataagtaataatacatagtaacaaattaattagttaaaatttttgcattttttcccttcaccttcttttcttttatttatttttttgttcttttttcaccttcttttcttacaagaaataaaataatatagataaagctgtggccctcatctgaccaccactcacactattcaccttccctgaggcaccagtgagtctgttttttcagtttgttttctttctttcttttttttttttttttttttctttccaagatggagtcttgctctattgcccaggctggagtgcaatgacgcagtcttggctcactgcagcctctgtctcctgggtttaagcgattctcctgcctcagcctcccaagtagctgggattacaggtgtgagccatcacatccagccaatttttgtatttttagtagagatggggtttcatcatgttggccaggctggtctcaaactcctgacctcaaattatctgcctgccttggcctcccaaagtgctgggattacaggtgtgagccactacacctggccctcattttcttttctgacatttctgtaatatagcccataaactatatattgtattgttttgtgtgcatttttggatttaattatatcatatcagattttagaacagatatagtgtacttattcgctgaaaactacttgattttggtgacttgtatatgcagttgatctcagccttatgtgttcatcttatctttctgactactggggttctaagtataatttgctctcatttttatgaattgcctttaagaataacaatcatttgccactttttgtgagaataaaaaattactgattatcttttatgtgacaggtgggttcagtcttaatgaactctgtgtcctgatgcctagcatatggcaaggatttcatatttgttaatgtttactgaatgaatgattaatgtttactgaatgaataatccttttagatagggggaaaaaataaaactgcttgatttttgtccacattaagatatcttaagttctaacccatttcttttttctgctgaatagcattttgtcatataagtataccccattatctgtttagtccactatttatgatgggattttcctcatccatagtgaatatccgcacacgggggatatttgtggggatattcactacggatgaggaaaatcccatcataaatagtggactaaacagataatggactaaacagtctctaggggatgtagctgggagaagaggtgctgggttgtatggtgggctttttccattttgctacagtctgccaaaccagctgtgtgtaagagatgttatgtttttagaatataatatcattatgaaacttcttttatgaagatattttggcttttacatcttattcctattaaccaggagttggcactcttaaggcctgtgggccaaatctggtctcctatctgtttttgtaattaaagttaactgtagtcatcctacactggtatggaacactagaagttattccttctgttgagctataattttgtatcttttaacaaatctctctctatccctcccttcccctatccttcccagcttctagtatcctctgttctactttttagttctaggagcccaactttgttttgcttctccataggaatgagaacatgcagtgattaactttccgttcctggcttatttcgcttaacataatagtgtcctctagtttcatccatcttgctgccaatgattggattttattcttttttatggctggatgatatttcattgtgtgtatatgccatgctttccttatccattcatctgttgttggacacctgtgttgattccatgtcttggctattgtgaatagtgctgtagtaaagatgtgggtgcagatgtctcttcgatatactaatttcctttcctttggataaatgcccagtagtgggattgctggatcatatgtttattctatttgtggtttttttgaagaacctctatactgttctccatagtggctatactagtttgcagtcctaccaaaagtgtataagaattgccttttttctgcattctcgccagtgtttgttgttatttatttatttatttttggtcttttttacaatagccattctaactgggaggagatgatactacattgtagttttcatttgcatttctctgataatcatgaggttgagcattttttcatagatttgttggccatttgtatgtcttcttttgagaagtatctgttcagataatttgaccattttttaattggattgtttgttgttttgctgttgagatgtttgagttccttgtatattctggacattaatcccgtcagagaagcagtttgcaaatattttctcctataggttgtccgtcttttaactctgttgtttcctttgctgtgcggaagttttatttataaataggacataatcctatttatttttgcttatgttacctgtgcttttgaggtcttattcataaaatattttcccagaccaatgtcctgaagcatttcccctatgttttcttctagtagttttatagtcttggaccttacattgaggtttttggaagcaatctacagttttgctgcaatctgtatcaaaataccaatgacattcttcatagaaatagaaaaacaatcctaaaatctgtgtggaaccacaaaagaccccaaatagccaaagcaattctaagcaaaaagtacaaagctggaggcatcatactataagctattgtaacccaaactgcatggtactggcatcaaaacagacacacaaaccgatggaacagaataaagaagccagaaattcatccacatatctacagccaactgattttgacaaaggtgccaagaaccgttgtcactggagaaaggacagtctcttcaaaaagtggtgttggggaaactggatattcatacacaaaagaataaaactagacccccccacctctcaccctctattttattgtttttagttttgttttttgaattatctaatattcagctgcataaataagatgatttcagaatgtgatagaaacaatggaaaatggtgatatgagggggtgggtggtgacattaggtagggtggtagagagagtttgagaagatgccatatgagctaagacccaggagatgaagaaaccaaagctcagagaggtaaataatttgtgcaaattcacacaggtagttaatggcagaggttggattttaattcaagaataactttaaatataggactctttcctctgcaatacagctatcttcttaaattcatgtaaacacaatacaaagatgatacaatagcattgtgtgagaagcataagcaaaatggtttagttctggacttggcaacatagaaactagggttctgatgtgttgaaatttggactcagtgctgatgactgggtttgaatcataatcccagcactaacttggctgaatcacttaaacttgcagcctttattgttttttggtggggcgggggtgggagggagctcatctgtaaagtgaggagggtgtttggatgatctccacggactcttctggctctcactttctatgatgctgtgactttaggaggtggcatttgatctgggctttggagggtggggtgattttgacaggctgccttgtaaatgagaggaaaaggtattccaggtggtgaaaacagtttgagcagaaacacggtggctagtaactatagaaaggattctgggaatggcgtgtaatagtctggtttgacaaggctagaatttaatcctgcagaagacaggagaggccggaggaatctggccttgagctgagagagggccttaaaagttacgcttaggagctgggaattgtttacctggaattgcagaatttgaaaggttcttggtcctttctttagtatccctatcccatgactggcttctctgtatataaatagttctggtgacagagacttctctagaccatctattccattttcagacagctctaagtataagaaaattctgagcattgagtcaaaacgtacaggttctacctataccttgtccaaggtgtagataatggaagattataaatgataaaggacacgtttagggatatgtaactcaatggcctgaagtagagctgtggcagtagacatataatattataatacgtactccaaagcaatagaaatttaaagcctttaaaaagtattccagtcatgaagtgtgtgttgagcacctatgataggtcggtcactgaccaagaatacagcaataaggcaaagttcctgctctcacgttcttctcagactcatggagaagatggacaagtagatgattgtgacaaggactctggtagttcaggccaggagtacttaaccagcagatgaaggtaagaggtcaggagtcaggggccaggtaaagatttcctgaaagttgaggagcggccagattgaccaggacaggagagcactccagggaggaggagcttggaacatgagtgaacatggcctgtttaaggaactgaaagctgttctatgccagatgcgtggtgcgtgtgaagtggctagaagtgaggttggcatattagacagggacttgtcacaaggggctacgtttgccatgctaagcattttagattatatcctgaattcagtgagaagccagtattcctaaaaatggctgtccccctccccagtttatagaatgaatattagaacaaaattttaaaaattagaacatatagaaaatatgaaggaagaaataaaaatcacctttaatatcatcaactagaaataactgctgttaaaattttagtatattagtataatttagcatattggtataattttagtgtatttctaaccaagtatgtttctatgcataggctcataagaaaagcatgattttattacaaaatatagtttgtatcctgctttctctagtgtaatattgtatgccagcatttcccaggctatgctgttgaaagttttttgagaacttaacttctaatgacaacatataatagcccaaaaggtgactatagtttattatacttaaatatctcataatgggttaaattttaagttgcttgcattttttttttttttactattacaaataatgttgtgataaacagctttgtaaatttgtattaacatctgcttatttccttgggataaatctcgtcatgtccgtgattgccttttaagcaggagtgtgatggactcacttgtgtataagagcctttatgggccaggcgcagtggctcacacctgtaatcccagcactttgggaggctgaggcaggtggatcacaaggtcaggagatcgagaccatcctggctaacatggtgaaaccccatctctactaaagatacaaaaaattagccgggcatggtggtgggcgcctgtagttccagctacttgggaggctgaggcaggagaatggcatgaacctgggaggcagagcttgcagtgagctgagattgcaccactgcgctccagactgggtgacagagccagactctgtctctcaaaaaaaaaaaagcctttatgacaatattggaagggtggattggaaagaggtgattggaggcaaatggacaaatgcagatgctgtgtgagcaatttaggcaacgtatgaggggcataagttactggcagcatggttagagaaaagaggagatggtaatgattcttttttttttttactttgttttttttaattattatactttaagttttagggtacatgtgcacattgtgcaggttagttacatacgtatacatgtgccatgctggtgtgctgcacccactaactcgtcatctagcattaggtatatcaccctctgctatccctcccccctccccccaccccacaacagtccccagagtgtgatgttccccttcctgtgtccaagtgttcatgattcttaaggtgtatgtttgcataacacagctttcattgaatgtaatgaaagctgtcagcatgttttaaatatcaactctcgggggttgcagggcctctaaagtggctgtagggagaagagggtgacaagaggttaatggttcttttctctgaaataggaaataccaaggagggaagaacaggtttgaagggttggcctgggaagggggaaattatcatctcagtattaggtgtgttgcctttaaggacactcaggtaaaactgtcaggaagacagttggcaagagcaggatgttaggttgtggaagtcatccccatggagatgctgatgctgagaccctggaaatgacaacagttctagagatcagggtgtttaagataagaggatgtgggacataacctgcaagaagacttactcctaaatcagagacaaggggaaactagaaaaggagctgtgagataagtataaagaaaaccagaagagaatgctgttgaagaagccaagagaggcaagtgtttcaaagaaaaagccatcagactttcaaatgatgcagaggtcaaacaagaaaagggcggagggtgtccacgggagcaatttcagtcacctgtaaatggggacaagcagattcagattgtggggaggcaagccaggttgtagcgaagcagtgtggagtaaacagagccaaggaagttgtgggcttttctctaagatagcttgtttgaggagccggaaagggcaatggaggcagcagagggttcactttttgttctggtttatattaaattaggaaagctagatttgctaattgtcatatgactttgattacctctccaacatttgctttttaccatgtttaaaatccttttattggtgatttgtttttggacacagtatactctgtccaagcttcaaatgaaagcactgctctttaagctcctagcatcttaccttaagttctgttggaactgggtgagacctcatgtttgcgtatgcggtctcactgagttttagtaagactcagtttttaagcttcagcaactaatatttggaattgcactttttaaattatagaatatgatttgtgtccttgaagtttgatcattacctgaagaattggctgaaaacaataaatgtttaaatgttgcaatttagagaatgtctttattgtgttgccaaatgctgaatgacagagagctttaattctaactgctttaattagaaagagaaaaaaaaatcaaagggtaatctcaactagaatcaaaatgaaccagaacaagaaatacttttattggttacagaacatcagcaatgtgtggtatagtcttattcacctcctttatcaacagtgaaaatactgcaggcctctctagggaagttcggaccatcagtcttactgaacacataatcagtttaataggggtttttcgttagtaatatgatgctcttttgggctgcagaaaattatttttaaagatagggtaaatgattattggctttaaaaaacaaaacaatatggtaaatgttcctaatgaaggaagaactggatggtcaatgcagtgtattcactgattttttgcttagcagtgaattagcctgtttttggtattatttctctcagcataattactttaaagatgttgacatcaaaaacagttatcacttttttagaggttgttatgttataatagatagcagttatccaggtagaggattagaggagaatatatctgtgattctgctctataaagaacctggttacctttcttttaagataagattttacctttctttttttgaacctggttaactttcttttaagataagattttaccttctttttttaatcttcttccttttttttttttttttgagacggagtctcactctgttgcccagactggaatgcagtggcatgatctcagctcactgcaacctccacctcctgggttcaagtgattctcctgcctcggcctcctaagtagctgggactacaggtgcgtgtcaccatgcctgactaatttttgtatttttagtagagatggggttttgccatgttggacaggctggtgtcaaactcctgacctcaggtgatccacctgcctcggcctctcaaagtgctgggattatagtcatgagccactatgcctggccagattttacctttcttgaagataaaaactttgctctgaaattcttggtctttcttctttctctttgcttcccagtgaagttcaatattatatattttaacttcctttgggcctctcttcatcctcatccagtgtggaacccgtggaccattcctttaatcattcgttcaccatcatagtccagtctcttgctccttgaattttattgaacctaattcagtctgcccaggctcaacctaatcatttgacatcttgctactgtacctgggctgctggccaccgctaggtaaaacttgacaaccatggcagttataacctctaaaattcatggtctccatttgttaggccctcaagacagccttagcaatcctttttttttttttttttttgtcctgagtagttctccactgtgtggctgtttttcactttcaccccatctttaagcttcttccctgccacctattctcttagtctcagaagatgatcgtggcccctgttttatgtaggccaccaggcagaaactcataaaccttcctctttactaccacccccatcactacctacaaattttcttttaacccgtgtcactttctagttatttttctactttttctccttaactttgccactaggctgcttgaaagggtaatgcccccttgtttacccttctacagtctggcttccatccaaattgctgttggcaaagttaccggtgacctaactggtaaagcccgtgagatatttttcagcctttaccttgtttggtttctccatggcattttatctttcttgagcattttcttcaacttttatgaaaacctgtctttgaatcttatcccaccttaccagaaaaataagaagcatttaatgatttacaaaataataattgatatgaactcttataacccaatattaattatacttttaagaattgaattatacttttatataaatacaattcagtattatactttaaaaatacgaaatgctgtaatcccagcacttcgggaggccgaggcgggcagatcatgaggtcaggagatcaagaccatcctggctaacatagtgaaaccccgtctctacttaaaacacaaaaattagccgggcatggtagcatgtgcctgtagtcccagctacttgggaggctgaggcaggagaattgcttgaacccaggaggtggaggttgcagtgagctgagatcgcaccactgcactccagcctgggcgacagagcaagactccatctcaaataaataaataaataagaaatacttatttcttaaaatgcttaactctagtaatcattttactttgtgtatatatatccaaaccgtgatatatacaataaatatatataataaaatatgtacaataaaattataagacatacataatatactaattattccttggtttcttctgccctagttaatgaaggagttcccccttctgagtatgttcaatatccatgaaaaccttttagaagcccttctggaactacaagcatatgctgatgttcaggcagtcttagcaaagtatgatggtaagttcttgggtatttttatttacttgactattcctcttttgatgtattttccctgattagattagaagggtcatttcaaatagcacagcacttttgtagccatactcttatagaattttcacctacagttttatgatggtgtttggtatgatcttagaatttcatggttagcaaggaccagaaatgtcacatggcatgtgtctcgttcctctccttccctccgtacaggctcccctcatgctctccccatcaggcagttatgtctactctgctctattacctctgcggtcaggaatcacccagaacctcacaggcagtacctatcctgtaggggcagcactgactgttagagctcttgctataaatccacatcagttcactgtgaccacagcctattggtcacattgaccctttggagcaatgtagaacagctaatatcccttgcacatgtggcaattcagtaaatattggaagatgaaatcatgtccgcttcatcccagctcttctcattagcagcagaatatccccatttctttaaatggcaggctttgaagtccctttgccattctggttactcactcatgaacttattccattttgcctgttcctaagaaaccagaaaaataagccggcacatcctagatattttaaaactctaatgctcatattgtcattatccatgaattcattatttgattaattggacaaaaattgtccacataattacctgccacgacattgttactgaaatatctgcagagcttcatactattctgcctcatttcagtaaccatcttcctaaagtgtttccttgtaaaatggatgtagggaatgattacttattatataatcattttttgctttatgaaatattttttctttagtaagcatcttcagtgcatttaaagtgcatttaaagaattattcagattacaaaacatacagagcaaactataccatttgggtcttttttttttttttttaagagagatagggccttcctctctgtcaccccagatggagtatagtggtatgatcatagttcactataaccttgaactcctgggttctagccatcctcctgcttcagcctcccaagtgactaggactataggagtgtgccatcatgcttggctaatttttaaattttttttgtagagactggttatcgttatgttacccaggctggtctcaaactcctgtgaacttcccaccttggccccgcaaggcactgggagtacaggcgtgagccaccacacctggccattgggtcttatttttgacacatttcttcataaggaatctctgaaatgggtgagagttatcatctcctatagttgagggaactcaggcattatgagactgtttttgtttttgtttcattttcttcaaattttttctcaaatatatggaaacgaaaagccttcagccagtgatggcatcattttgcctgtgcagacataagtaccctgtgtaacaagatatatgctacctagtatggaactgatttgagaaacagagaaaagtatttgtggagcacttttaagtaaacaaaataaagactgtttggctttcatgtcagctcacttgtattctctatttatatgctaaaatcttactcatggttcagctaaacagtggtccaagcttaggggtctaaactattgggctgccttgtaggcaaaaatcctcgtatgttgacattcttttagtaccaaaggaattcagtcccatggccatgggttcaggcagcagtgcacttttccaaatgccactctgtagccatcaatgccatagcaatccttaatgctgacctatactcaatctgatgttatcaagccttcagaaataaaactttaatcagtagagcctttgggatggcaagcctcttaaggctcctttcatgaagatctccatttgttacagaaatcatcagcctcgtgttataagactgattgtaaaataaagaaatggaactctccattgtctctaactattccattgcacagcctctgttccacaacattcaaaaactgatttattagattctgataacatatgttcacattatttgttacaacagcccgtcccaccctccactgaaacttggctcacactttgaaaaattcttttgttgcaaatggacaaactcaccataccaaggcccttgtgttgagctttgtttatgttgtgtacctggcaacagagatgatgttcttgttcattattcatggaaaaagagcctcattagtggcaggacacatattgttgctgagatgcctcgttaggggttttgagttcagcagttgtcaatagagtacagatgacctaacaccgactgaattctgaagggagttttggtgctgacttggctcaggcctgtatcatttacagtagaaatataatgaagtggctgctgaagttactgttcttgagggttgagctgcagccactgaagattgtggaaaaacatgcctcttgtttctcaccccatatcatgaaatgggttctttcaagtttatccctgctgcttttcctggagacgtctactgagttgctggttccttatctggccctgggcgaggaagtgggtgctttagaggtcttagagtacagacagcttttagggcattctgatcttcaccctggttcagatgtctaatccatgagatgctggagacagcacttagaatcccagccccttcatccctctctgtagagccacacccaaagcagcaggattatatgtcctttttactaattggaatgctctggttgggtagccgttttttggattgtttttgggtacagcaatccttctttattacatttgctaggtggctgaattttttaagtagtatgctgggaacacaatgggattagttctgcttttctgaccttttcaaaaagatttagaaaaatggcaaggcactgggggccagggatgggggtgtcgaagaacatattttgggggaaagaagggaggcaaaatgtattccccttgtctcattgttcttcaccaccttaaaaaaagtttggctttgagtttataaatcagtaacaatcatatactcctgtgtccccacaaagattaccagttgattggacatatatccatgtagtctgcagtctgattttgatttttgccattgagataacttctaatgctttattattccaggtattagtctaaaatactatattgctatcctcaggatttttcatactcttgtattttcaatttgtgattcaacattataggtgggcagttttattccaggtggctgatcctggttctataatgttcttcacacagtgactaaaatagcagcaacagctagcatttattgagttcttgtaatgtatcagtatcatacatgattcaaaccacaagcatatttggtagatactgttgttagccccattttgcaggtatggtaactggtacaaaaagaaggtaattgctcacaggaagagcctataatatcaaagtaaagccatgtagatgtgatgttatgagagaaaagtgatcgactgagaacaacttcattaaatatgatgtgaattctacaagtaaaggaaagccaggataaaaacggaggtggtctcactccagacccatgcttttaaccaccacacttacactctttctgctgttggtagtatttatttaaattgtttttattaataccattgttcttgttgttgttattagccacaatctattgagaacctaccatgtgccaagcatgttattagcttggcattagctttaccctcacaataaccctgcaaggaggcagttattccattttagcagatgcagaaactgaggctttgtgagattaaataacttacaagaccacattcttagaaaactgcagagctgggattcaaatccagatccagctggctctaaatcccatgtgttttgcataaatgtaagcctcccaaaagtgatgtgctgggcctctctcactcctcttacaaaggcatgacttaggtgggctgaagccatggtgcagaatttcagtgacgcctcattgtcttgcaagattcctttctaatcattctttaagaactgagtgtatctatatttgcttgtctttctgaaactgtcttccaaacatggctttccatcttcaatcaacttgtatctgatttttttaatcacaaaggggatttgatgtaagatgttcatttaatttgagatttatttatctttctcttcagtcatacatttgctataaagacagccatgttttcaagatcattaagtcatgagaaccttcttttagaagccgttgcaaaagttcttacaagctttggattgcctttcaaagaagtttataggccacctacgtgaaaacttaagtcccaaagattagggtgggagtgtggaaaagaattcatatgtttcttattcattgtcatttgtgcatttcaattttaggagaatctcgtacagcaagcgaacacaggtctgagcactataaggtacctttgggagcatctagttctgcctgtctctagttagtgatccttggggataccagaaggcagtcatgggtggtggggaagaggtggatcaggtcccagctctgcctttcaccaactgagggagcttgagcaaattacttaacattccaagccttggtttctttctctggaaatgagatcgagacttagaaaggctaagtaacttgcccaagatcacacagcgggtaatttgttgtgaggattaaagtagtttaatctatgttaagtgtcaagaacagtgtgggacacacagtaagagttcagatattattcgctattataaagagccaaaagtgtcactcctaaacttcaccactattcttcattagtcttgttcaaatggaaaactatatataaaatgtcgcaatgagagaataagagcccagtcttatgctctgcaaaaagacaatgttacgacttgttattaaaattaattatggatctaataggacatatagatatttgataagaactaaaattcttagttttatctaaacttttggaaagctgaaaaaagacatgccagggatttttactcctgatcaaaggaaaaattacttctttgggttcatagcaacttcagcctctgaacaatttgtcctaatggaaatacagatctaagcacttttggatatttactccgttaagtcatttagtgattgccctaaatttggggcagaatcttctcttgttcttcccttccttctcaaacgaactagggacagctggtctttcttacagtcacaaaagttatataaatgcaaccactatatcaagatcatttttactgatgccatcaagcccatcctaaattagcattattatctgccatctggtaatttgcagagggtatactttttagaaaaggacatgtttctaacattggaggaaatgctttcatctcagtagattgaaaacagaagttctaaggaaagtcattagggaatcatgctatgttgagactattcagagaaaaagccttttgctgatactgttttgcagagtcagcatgtagttataactaaaaatttcgtaaaccttgcttatttcccaaggccttataactagcacaagttattcagctatcatcatagttcctttgaaatggttactggataccctgtcttttggttaggctgttttccatttatgtttgaggaataagtaaaaataggaaggatgtgagatgtctggaggtccaatgagtaaaatctgtatttgtcaaacacttcaagtgtcagtatgtccatacttccaaaacagtacttttcagttaagtatataaatgtgaattttgatgccacaggcacaagcagcctctgaaaatactcaccacaaaatttggctgcatattagaaagaagatttggtatgctgtcagtttctagtgacagactataaacctagtccggctcatttccctgggctcgctgttacggaaaagatcatggttaccaggcaagtgctcaaagagagtccttgtgtaaaagatgggcgaatgaaccacatcagtgcttcaaagaagaaaataattatcagcactgatactatggctgtggcttcatgcctgtaagcacaagtcactgagaaatggtggtcctgcatagctttgcactggatgctctacagatttggacaccaagaggtagatctgccaagaggactagtcctttgaggttactttagaacaaatgatagactgtcagggatgaactatatattgcattgagcaaaagttctgataatagatgtcatttcagtgaggactatatgcatgacaaacttctgtctctgatgatagaagacctttggtgaatgcatacatctgtaattcacatagctggcacatgtacaaaccctccaaatttatgttgggtttggtaatccttattgcccagttatcataatttaccaaggtaacatccctccccagccagccattaccatcagggaaactgctttgtttggcttcagggcaccagccacggaagggccctctgacacagaccttctggggtaatccagtccaaaagttgaaaataacaactggtgtttggctttgtagcgtaagacgaatttttctgggtgtagttgaatgcttagtgcttgtctttccccctgccccaaattactaaggtcatgtagaacttcccagttgaatcattgaactcccaagtggcacatctttttgagattcttgtatatcaatcccttttatttcttcagtgaaatttttccctttggttggaaggggacctcggattggctttttgaaggtggggcaaaaagacctcatactgcctgggatcaacagtaacaaaaatttaaggagaatcctgtatgtctattgttttctttacatcatatcataaacaagtaaattgagaaattaatcacataatgggacagtaagaacacatcacaatccacaaacaggttacgaaggagaaatggactgctttttaaatttcttttccatttttgtttgtttgtttgggtcatgcttccaagagcatctgtgaaggccaaatatgctggattataggagcttcaagtgtatctggtagaaatgatatcatttgttgcctgatataatttgttgcctgaccaagaaaagggattcttggtacttcataattttaaaggataacagagagtaaataggttaatttttttcaaattatttcagcaaggatctgttgagtccttattatgttgaagtacgaacttttaggtgctttagattcagagataaatataacctattctctgtcaccaagatggtttcagtctagtagagaaagatgttaaaaaacaaaaatacaaaaaaacaggcgaagcgagatgaatcagtgctcagtgagtctgtttgaaacaagctgtggggagtgcagagaaagaaagcccttgagagcaaactcatgcccccctactttcatctcaacctctgtgtactagggtagtcattgggaatatctgtggtctgtgagtgaattgatacataagatcccactacgacacagtgttctcatttgtgagatggtttgggatttatatatctacttgctgccacctttgaaaaaattttagattcatagatatgagaattgaccctcagttgacctatcatgcataagaatagtaatgatccttttaaaactacgtcttgattgttattactgggagatgaacaaaaggatattaggtcaaaaaggttatcatggaaaactgttctatcctgtctaaagttttgcaccataagttttccaagacccatctaattgacagttttactcataattacagacatttcttccaagattattgaattaaagtttggctattatgaaccacttatgacttttgaaaattcaagagtcattctccctaagatgaccttttgtttcagcagcagcattccaataacgggtccttaaggagccagaagaggtgtggttttctttgttttttctacttttcttcaaccttgtttcagtttttactttattgtttttcttcatcctgccccataatttcattccactgctgtttcaaatagacatcgagattagagcaccaacacaatttcaaactctgctggaactgtaagcaaagataaatgcagtacacatgttgagaaataacaagtttctgattccctattagaacgtacaacactgatcaattttggcttctaggagctaaattggatgtaaatgtttgcaaaatgaaggaagctaatatcaagatatttgagatgttagtacattaatttaggattttattcagcaaacactgagcgccaactatatttcagacattgttttttgttgtgggtgcaaggtgatgaagaagcacagcttttactcctaaatcacaccatgtacgcaggacagggaagtaagagaacaggcaattgctgttaagtataaagattgtgatacactttagcccaggatggaaggggcactgcatgcagcaaggaggagtgacgggagtcttccccttggaggtggtgtctgaactggacagcaaaggtgcttgaggcaaggaaagcatatggaaatgtgcagaggcacaattggcatggcttatttggagaattgtctgtatcccttagagcagagggatgaggagggatgcagtgaagggcagaagatgccttgggtgagttagctgggggtgtgggggggtagggggactggattaaaatccaagcttggattttattttatgggccctggagaggcctggggcaatttcaggtagggcttcagtcgagcccagagtgaagggggtggcacaatacattcacaccatgcccccttttgagtggaggtacttgagaaatcacagtgggaaagcactcagatgtggaagagtggagtgccactgcagtgggctggcgaggtgacctctgacactatagtggagcacattctgtcctggagggagacatttgtgaggttttctgaacattggtgtaaaagagttagaatttggtttttctttcttaagcaacaaatgggaatcctagtgcagaaacttttgtctcctgggtgggaaaacttcttattttaaactataaccactttatttcatttgcttccgggtaatctcttaactacaagaaactgaaccctatgtagacccaccataacccacagataatctttcaagggagcataactaagggagaagagcctgtcaggacctatgtagcccatcagtgcctacctacttctgctgagtcgttaacaatgacatgaggagaaaaaatgtggaagaggggaacaggtggtgtgtacagctgtactttctataaaggctgtgaatttgaagatagtagaggacatgatgcgaatgcctgtataaatctcacttgctaaaatcaaaccatctgaaaaattcctgccttgttgatacttcagttactactaaagtagacaaagcatgagaataataccatggatttaattcttaccgaaaaggaagaagcttaagagaaagagaccatgttatcctgtagctatagttaaaaaaataaataaataaataaaaggaatattaggcacaggtgtaccttgaatctgaaacaaacaaaagtaacaaaaagtgaaagccatgctcttttttgttgtttttgttttgagacagggtatagctctgtcgcctagactggagtacagtgacatgatcacagctcactgcagtctcaacttcccatgctcaagtgatcctcccacctcagcctcccaagtagctgggactacaggtgtgaaccactatgcctggccaattttttctattttttgtagagatgaggtctcactttgtcacctaggttgtttcttgaattcctgggctcaagtgatcctcttgccttggcctcccaaagtgctgggattacaggtgtgagccaccatgcccagccttttatttgtttattttaattcagaggaaagataaatatgaaaccacaaatggaatttcaattaatataacttactttatgctgagactatttggcataggagatacagagagtttttttaaaactggaaaatggttcgtgaaggatgaaagactaaaagttgaaattgcaattagtcccaatagataaaagtgtaaggaaatataaatgattaaagtgtacaaaaagatcagaatgacagatagctaaataagtacgtacaagtcaggtataaacttagaagcaggttttcagggtggctaaacaccagaggaagctaaagtctcccacattacaggatttaatgtatgactctattgtccaaaaaaacagtgaagaatgatgatagggaaagtaaaagcaggtatcacactaacattatgggatagtgacaaggacatggtattgcaggttcagttctgccactcatttgttaggtggctcttaagaaaatcgtttaactttgctgggcccatatttctcacctataaaagaaaaagattttgggaggttgaccttggcagtcctgtactgttgttcagtttttcgtctgtatcttgtggtagtactgttttgagcagaaaatattgtattaatacgttgctgaggtataattattcattcctattttatatttccctttagtattttttactttttaaaagaatgtatcaagtcaatcccaagcaaatcctggaaataattatgtggtttttgaccacaggaaaaaagatggtgattggggatctaacaatagatttattaagaaaaaattgtgtcaaataaacacagatgagatagtggatatgaaaatactgtttgtctatacaatagtatttaaatgtttatcttattagtgtaaatggcccttttcctttgtctttctgaaataggagaataccataaatgtgtttacatctttatttaaacaaagcatttggtaatattttaaatgctgtcctttcaggtaccatggaggaatatggatataatacctaattaataagtggttgcagacatatcattgcagactgttgcaaattgagggtgatctctagaatcctattcccagattctctcattggtattgccatggtcagtatttctaaaaatcagatcttggaaacacatagcacagtttaaaatcatgtgctcagatttgttctagatttgtgatattggcatatttcttaaccattctgtgcttcattttccccatctataaaacagggctaacagtcctacctcataggactgctctgaggattaaataggataatgtatataactgattaacaccagtgcctggaagttagcctttagtaagtgttggcagtcattttgatgatgataatggtcatttagggaagaagatatggagggagcaaagctgtgcatggtagcttgaatcagaaaaatgactaataagctggaatgacgtactgaaactattaagatttaatggctcagatttaattttaagatttgaaatttaatggaatcagatgtgaaatcctgcctgtatgtttttatttttattttttaatgttcatggcttacataaaagggagaaaagacctgactttagctgaagtctatttgaatagaattggaggtggggggtattgttgaccacacaatcataggaacaaacagagtcccagctgctcaacaccagggccgttctagctggtattcagagacgtagagtggcacagctcctcagactgcacgttttccctgagctctctactggtcagtttgggggatttagaggattgttttcatttctaattctcatattttgaaatcacatgtggccaggtaataaaaatagatgagaagttctgaagaatatgtcagttgaggaactggaggtatttatcctacagaagattgctatagaagagatatgttaaccatcttaattcttgaaagattgacgaacaataatcagattctgttttcttatggaaggtgtaagtgatttttagataaggatttgtggagagaatggagtggggcagaatgataaaaggcaagtaaaatgttatggaggtcagattggtaagataagacatcttcaggtgaccacaagattttaggtttttttgtttgtttgtttgtttgtttgtttgttttaattttttattggctaggtgcggtggctcatgcctgtaatcccagcattttgggaggccaaggtgggcagaacagttgaggacatgagttcgagactaccttggccaacgtggtgaaaccctgtctctactaaaaatacaaaaattatccaggcgtggtggtgtgcacctatagtcccagctacttgggaggctgaggcacaagaattgcttgaacccgggaggtggaggttgtagtgagggagattgtgctactgcactccagcctgggtgatagagcaaaactctgtctaaaaaaaaaaaaattatatatatataattgaggcatcaattacatatagttacaggtacaactcttaagtgcagagggatgatttttcacttatgtatatacccatgtgactgctacccagaatgaaacagaacttcctgaaatcttagaaggttgcctcatactcccttctagccaataactgccctccagcccagcagtaaccactttccttaccttgaacacaatatattagttttgcaaacttcatgcaaccactttggaacactgtctaacagtttccaataaagttaaacagacatctatcttcagatccagcaatcccatttttagttacatatccctgagaaatgagttttcttacgcttacacaaaaatgatcacagcagctttcttcataatagtccaaagtgggaaaacaattcaaatgtcctttatcaagaggatagataaacatgtggtgtatccacacaatgaaatactactcagcaatgaaaaagaatgaatgactgacacgtgctacaacatggatgaatctcaaaaacaatgtgctgagtgaaaggaaccagacaaaaatgagtacaaaaatgagtctgattccatttgtgtgaagttcaggattataacttttaatgaaaggctttcatgacaatttgattttgcatgcctaagatgtttggggaaatttcttctcctttcaggaaaacatttctataaaacataagatggcaaagaggtggaagaaaaattaatgccagcagttcagctttgactaagtgagaaacatttacttagcgttccttgtttctgcagtgagtaatggaattatgtgatatctcattatttcctttccttttgtttgctctttggattctaactcgtaagaggtaataatgtagctagctaaatgccacttacaaaagtcagaagggcactgcagagtcagtgtgttcatacaaaatcaaactaacttagaatgattttgagttgcttcctcaaaataaaatttctgaataaattacaggcaatattggaaagcggatgatttgttcttattgccaccatttcaatcactactggtagctactctattcatcttatcattttatccatttccgtagtgataaaagcatgaagtcatagcaggcagacagaactgtacagaacagattagtgatcaccaggggacatgtttgaggaaggacagggagggtacaaatataaaggggtagcaccagggagttcctctgtggtaatggaacagatctatatcttggtgtgtttacatgaatctagttatgggatgaaattggatagacatgcacacttgattttatgtaaaaaatggtgaaaatgaacaaggtctgtagtgtacctaatagtactctagcaatgtcaatttcttgttttttgatattatactacagttatataaaatatcaccgttgggagaagctgagtgaaacatttacaagactgtgtgctatttttataaatttctggaaacctctaattatgtcgaaatattaagtttaaaaattataataggcaaaaataaccaagcctcacccttttttgtggggtgaggtgggaatgaaagaggaggtgctcatggagcaggcagcctaaatactttctcctagaggatagtatttatggttcttcttaatggtgagccaaaacatcagttcctgcctgtggtttagatgttacgcagttattagattaaaatatggctaataagataactatactatagcaggcatactgtaaatagaacacactaattttcacaagagtatgtgaaagttacatctgatagatctccagactgacagcacctcatatgataaattctacttttgtctgtgctgtcggtatctggctccaccaatgtatttgcccatgaacttgcttcaggcaatttgtagaacagaattcttccctctagcatcattatctgctaaaaaaacagttactgcatgtacatgacaggaaactttggaaatacagataaacagtaggaaaaattgcctataatctcgccatgcagaaataaacactgctgatggagtagtcccctcttatccttagggcatatgttccaaaacctccagtggatgcctgaaaccatggagaatactgaaccctgtatacacaatattttttcatatacatatgtatttatgataaagtttaatttataaattaggcacagtaggccgggtgcagtggctcgcgcctgtaatcccagctctttgggaggccaaagtgggtggatcacgaggttggagttcaagaccagcctgaccaacatggtgaaaccctgtctctactaaaaatacaaaaattagctgggcatggtggcgcatgcctgtaatcccagctacttaggaggctgaggcaggagaatcgcttgaacccaagaggcggaggttgcagttagctgagatcgtgccattgcactctagcctgggcgacagagcgagactctgtctcaaaaaataaataaaataaaaataataaataaataaattaggcacagtaagagattaacaataactaatagaacagttataacaatatgtcataaagttatgtgaatgtggccactccttcttgtcattctacttactacacactgtggccataacttttgcagttttgaggtgcaacagtgaaactaacaaattgcttttccttcttcacaatatcacatgattcattcttgctgtagatcttagcagcctcggtgtatgatttttttctttttttattaagttgagaagtttcaccttttcatttaatggaagcaccttacatcttctctttggcatatccaaattgccagcatcactactcttgcactttgtggccattatgcaataaaataagggttacttgaacacaagcacagtgataactatgacagcaccgtgataactatgataacgcatatggccacaaagtaactgatgggcgggtagaatctacagtgcggatatgctggacgaagggatgattcacatcccgggttggatggagcagggcagtaacaagatctcatcacactactcagaatggcatgctgtttaaaacttataaattattcatttctggaattttccttttaatatcttcagactgcagttgactgtggacaactgaaaccacagaaagtgaaactactgataaggggagtctacaatatttggtgcatattattccaatctttgtgcatagaaatgcttttaaaaatgaatattaaagcatactttttataaacttattgatatgtgcacaatacatttcccccagatcattcagtacctttccaccgcataatttaatgactgcatggaattgtaccctgtgaatgaacttacagcatgttagccagtctatgattggacattgggccatttccaattttccattagaaacaatgttgtgatgaacaatctttgtgcacattgatgattatttcctaggataaagtcttagaagtggaattgctgggtagtcaaaatgtaaaagctttccatttatattgcctaagtgctctgcagaaaaatatgcatcattttcaaaaatgaaaattgtaaaccaaaacctatttgaacaacaagatgctctatgtgaagggaaatttaggatccgtttctttagagtgattcatccctccttagaggcaaattgctattaccaagtagatgtaatgtttttacagataaaagaataacattgaaaatatctaaataaaccagccatgcaagaatattttgctattttctatttctgttaatcagtgagaacaaaataacttactagcataaaaagataagtagaatgacatgccactaatggggaatggggtattttcatagagctacatttccctctttgatattgattaaaatatattttggttattttttttaagcatttttcttgtgcacatatactacttaataaaggagaaggagcaaacattttaaaaatggagaaaaggtactgtagtcgtcataatgttgctgaatgctgttgcatttttctagctgtgaatgtcctgtctatgctagtgggaacggaggtcaggattctagattaaagattacctttgattaggcatctctagtcatttgctggaacacctcgaatgtatctttttctgtatttctatctgggtgaaagtgtccatttgattgattagataaccatcaaacacaacttgatctttcttgttgggcagctaagtcattaaaaagaggctccttcttgtgctgccaccttcaaatagttatgatcattgttttcggaaacaaggcttgggtaattttaaaataaaaagtctgaacttttaagtaggccatgtgtcatctagttttttttattagcttcaaataacaatcaatgagtataccctagaaaacaacatatttcgttcctgtattgattccccacactggaaagctgttaaatgtttagatgctggaaaagcaacaagactaatccatgagtgtctggcatttttttcttcttaattgtaagtgcaccattttatatagtatgtatgtggtggtgacattttgcttgaatatagtttaagagattacgggtacaaagacctgttttcctttcaattctgtgctgatattttctatgattgtgttttatcaatgtcattgaaatttccctcaaagagaaattccttaggaatctccttggaattggcattaaatactctttattgaaagagagattggttttctttatgaaattgttttcttctgcctctgtctattggctaattatgggacttctatttttcatttctactttactgtaatcctttctaagttgaaaacagccttgcaaagaaactcgcagggcattccaggggcaaagagttcctctaacctagaatgaattttgcagcatctgggaatggcatatttttacctgttctgaattaaggtatttctgtgtcatagtgtaaatttggttgcaagtattaaatactaactcctattctggaaagaatgcaatcataatttaagaacacatttttcacccaaaggggtgccctctttgagtttatctactctcacttgtaccctgtgctttcactttcctgtaaactcattatctgaaccccacacccaccctggcccttctgaaatttttgtaaaattgaaaggaactgtttttcctgatgacaagtgaggcttcatatgaaaggagatttatgataggttttcatgagcaaaaattgtgtagttttctaaagatttcatacatataccctttaaaagttatatatgtttatttatatattagacatatatataacttggacttttacatttttaacaagcactattaaaaattgaatgtaaacttgaaatttaatgcaaaggaaatttagtttaaatctgtccactaaagaatcattcatttggctaagtcttcttttaatctagatttttttcttcaattagcatttcatatacctgttgagaaatttttgtaagtgacaaagacactttcatgtctttcacatcaaggatattcatgtgatatctaaatgtatatatttatagctatactctgcttaaactcaacatatgaaaattcatattttaaaatagaaggtgattgcttaagagtcagcctgttggacatgaattattcacaaaaatacaaactacccttagtttcacataccacgttgatacagtaaggaatagctgaaattcttgtgtaatgtctgtattaaaatattcttcatttatgctttattgcacttaaacgtgattaaaatgctagtgtattgaaaatgattgctctttgttacctgcaaacttatgtgttcctactttctttttctccaacagatataagcttaccaaagtcagcaacaatatgctacacagctgctttgctcaaagcaagagctgtctctgacaagtaagtgaataatagtttgcgcggtactaatgcctgaccggaattgagatgtgttgcctctgagggctttctctggaagtttctcttaggctatgagacccctgcttataagcatgcattttccaaaacctgctgttcttttctttcactattggaaggagggaatgtatatcctcaggtaatgtaagggtgtgtaaaggtatcctaaagcaggatttatttgaaattccatgcttctgagatgagttttttggtgtgagacagtagataccaaaacacctgcttgggacttaacacagaataccatccttctatttgttttttgcacattcctctcccttcagcggtccataactgggtagtgtcatacacacgtggaatgtggcagacaggatggtcatctctcattctttgcctcatcaacttcaaattagccccccactggtctattaactttgagttgccatctcaatggtacgtttgcctattttgttcaggcaggtgactatgacatatagacttttcataagcatccaaggatgcctgtcagatgaaagagcatagatggcttaactgcttttgagttcataaactcttacgcttccccaatataatccctctgtagcatcgaaagcagagaacaggaaaccagcctctgctgtatcagacaggtttgctgttaagtgtgtgtacacttcaagaccaaagtaattttctttcattcttttttatcctgtagatcgccagtacctactgcaacatcttttctccctacacagcgactccagcttgggagggcagggccagggttgtcacagcttcccctgtggtgtctgcctgccaagcacagctctggagttagccctgggtgtgaggtgagaaagagattgcatggtctggtttttttcattcacttgggcaggtgtcttgcccgcagtttgggcatgcacacaccctctgccggaatggccccaagcaggctcgcctgctgctgaagctgcaacgatttaacctccatcgcagcactgacattgggtgggaggcctcctttcaaatccttcccagttctgtttttaaccaagtgcgctcttctgtaacctagttttctctttttcctacactgtctgcccttgtcagtcctacctcttcccctgacctgagcaggtacctcgtagaagatttagattagccatttagacagagacttgacagccgaatttaactcctgccatgactagatgcaagcacgctttctgcttctgctggggtttttgctggcctcggtccgtggggtcactcagaggttccatgcagtagaagtttggagagctcatgctattggctcactgtggttttatgggccctagatgtgtagatgcttccgggttgatgcccaagcagtggtcccacctggatggtttttgtctttctgcttttcagattctctcctgaggctgcatctcggcgggggctgagcacagcagagatgaatgcagtagaggccattcatagagctgtggaattcaatcctcatgtgccaaaagtgagtctgtggaatccccacaggaactcgttatgatagcagagaaagcattcattgaccacagtgttgtatctcaagtacaccgcttataaaaaaatgaattgcaaccaacaaatgttgagaccctgtataatgtatgggcattagcctcattttaagcaaaagctatactcaagaggctttggggcagatttccagacttcacttaataagggtaaatcgatagacctcgcttaggcaggccaggaagcctgaaattggcaaaaagtagatatcccgggagtgttgacacatttgacaggaatttcacaccagttatggtctcacatagaccaaactcaggaaataaatgttgttgtgaataaaactggtaaaaaaaaaatactaatgtggcattccgtgtctctataaatgaatgatagtaatcagtattggcaagaaaataatagagaaaacttcaaaatatgaagaagtattttgctttgtaccattttaataagtgtatatagtagaaaatatttgtcttagttattaaccacatggttgaccaatttataaatacccaatatttccaattttttttcctgaaattgattttaagggaatcaaatcagagcagggaatatttctgtaatcttttattcaggagatgaatgtgtatttattatttacctatatttaactccctgctcttttagtatctacatgctgtattacgtaattatcatcttctctgagggaggaaaaaaagtagctgagagccactttcagtcccgctattaagtacattttggcctctaagaaacttcgtgtggttcacctcaggtatgacaagccataacttccttggcaaaatgtctgatgaagacttagtggtgaaaaatgacaaaggaaggctgtttgacttgtgttgtagcactatagcaaaagggtgggggggtatgagtgagagagagagagatggtttatggagttaactactttattttgttgatattcagagtgacagagataagtgatctaatattcctgggattttactcaagtctaggtcatttttttcacttagcaggaaattgaagagtggttcactatgccacatttgcataaggatgtatatattccttaggcctaatgggtaatgaccaacatagtatttgcagatttatgtattgtccatatggtgctataactatatctccttatataatatttttcacctaagataaaaatgtttattccactttgactaaaatttaaaactaatcatgaaaaaattatcctgaattacagtaaactgaggtcatctatgaatacttattgaatgccattctctacagagctattcagtaagcataaataaggctcttttagaagtagtattgagcaataagttctggattctgaggcgaaaacttgtgttccacttgtgattctgtcatttatcagccattggacattgggcttagcatctctaagctcaaagttgtccctcatttttaaatgaagttaggatataagccctgcctatcttctgtggtaaagatcaagtgagattatatatttgaagttctttgaaaacatttgagcaccatttatttgtaaattattaagatttttgatgattttaatatcaacattttttgataattattaagaattttgataatggttgggggctcctcatatctaggaaccagatcttttaccgtgatcctaactagagccttgcaatcctggggcacaagacagaaaatcagtacagtacttgttggttagatattttgattgaagtagtcatttaatgctaaaacactggtctgaaatggttaattgagcctctagaagaatattaaaagccctaagaaacactttaaggctgccatggaagaatttgacacagttaactaggattccacctgcaaaatagaattatcctaaaagtggaaacatttcaaatatttgattgcactctactttctaatcatgaaactgagagaaggcagggtaaactacctgggtaaactgactctccagcactttgcttcattggtgattgtgctgagggggagatgtgtttccagatcctcttcgtctatcagaatttccgtggggaacgggtcctgggattcactggccctatctgtcaagaattagccacagatttctaatatacagtatgcagtgtgctctaaatatctaactttagcagatacacacacacacacacacacacacacacacacggtgccttggaggcagtgaataatagtcttagttctaatgagacatcggtgaaggttacaaactcttggactcttagcataagatgatccttaaagatcatctaggtcaccttcccatcctaaccttgactctctccttataatgatactgtgataaccatttttattattggtttcttttgaatgttaatgtgccaagcacagtgctagctgaagtatataagccctctcacttatttttcataacaactctgtgaggtgtattatattattatccctattacatagatgagggcactgacggtttggagaggttaaataatctgctcatggtcatacagcaaataaatgacagagccagaaccaattctgggttatctactcttaaatgttgccctctactgcctaccacaccccaccaggaaacagaccagcctaggcttggactcttcaaatgctggcaggcacactgcttcctaagacattcaatcccttaaggacaattcaggtttcttcaggatatcttaaatgatgtgacttccatggcttctttttctctatcacaggaatttgtcagtggcccaccacaggaatttttagtatctacatgctgtattgcataattgtcatcttctctgagggagaaaaaaataccaaatataataactgagaactgacttccttgcatttccagcttcgcttcatctggtatcccattaagcaaagatagataggtagtatttcaccatccaatgataaatactagtcatttaccttcggagggctactcttaggaactctcttcacttgcagacataaggagtagggaggaagtgttgctccttactacatcacaggactgggaaataaataagaacagtaaaaaccccttgtctctgttctgaagcagagccacttaagtggtcagatggatgcgaaacactagaatttctgaagtattagattgcagcaaactagtaaagaggaagcaaacacataggctcatcattaccaacagaattgtcactccctcctgagaaactgtagctgtgccgccagctcccataggaaaaggcataaactccttgtgagattcttcagtacccttcataatctgacccaacttgtttttcattttttccacttcataactatttgttcatcattccagaaacattctctttcctttccctcttcactttctctaagaaaaccctgttgccccttcaccacccccattaagagtcattaggaagcttgttcttcttcatcagaagtagtctgtctcctccgtggtgtctcactataatgcttgtacttgctatttaccttttcttgaggaaaattggggatgttaatgatgctggtgattttcaacaactgagaacaaaagaagacaaagaaatcttgaatccattagaggatgttttccatttaatgggattaaaatagctttgcatgtaaagaaaattccattcatgtaatgctggacaaacaaaggactaccctcaccacggttctataccttcatctttgtattgttacagtttattggatttggggccttctttctgcagatatgctgcatgctcactctgctcttcctcagcagtcttgagatttacactggggtgggcatgggggagacatttctatcagtgacccatcaactacacagacctgggttaaccagcgcttatgtgctcttagtatgctgcagccacactgcaagcctttcactgcgaggagacacatttttgttttggaggatgttacattaactccttcagggtaccaaagataaacttccattttctgacaagtttccaaaaggtggactaaattatttgtttgttacaggcagtattaaatatgtcttttgctctatagtgatattataaaaaacaatctactcatatttaagactatttctagccttttttcctacatattttaaatacttttactatttaaaaaaaaattagcatagggctcttaacatggactttatggttgggtattgggggtatatttgtttctgaggggggattatcagattttcagagttctttaaccttaaaaaggttatcctccaacttacagttcaagtattttatccgtgtgccttcagactcttttaaggcagtttctataactggatacttctgttttggatacttcttttttatgggtgtaaggtaaaaaatatgtaatatgagatctaccctcttaacaaatttttaggtgtacagtacaatcttgttaactgtattagtccattctcatgctgcaaataaagacatactcaagactaagtgatttatagaggaaagaggtttaattgactcacagttcagcatggctagggaggcctcaggaaacttacattcatagcggaaggggaagtaaacacgtcctttttcacatgacagcaggaagcagaagaatgagcaaaaggagaaaaagccccttataaaaccatcagatcttgtgaaaactcactcactatcatgagaacagcatgcagataaccgctcccatgattcagttacctcccaccaggtctctcccactatacatggggattatgggaagtataattcaagaagagatttgggtgggaacacagccaaaccatatcattaactatatgcacatcactgtacagtaatctccagaactttttcatcttgcatgactgaaactctattcttattgaacagcaactcctcattttcccctccccacagcccctggcaagtaccattatactctctgcttctgtgaatttgactactttagatacctcatatcagtggaatcatgtattgtttgtctttccgtgactggcttattttagttagcataatgtcctcaaggttcatctgtgttctagccaccatatgacaaaattttcttctttttaaagaccgaaaattattccactgaatatatatgccacattgtctttatccactcatctgtccatggacatttaggttatttccatctcttggctattgtgaataatgctgcaatgaaaatagcagtgcaaatattctcctcaagatcctgctttcacttcttttgaatgaatacccagaagggggaatgactggatcatatagtggtgattctatttttgattttttgagaaacttccaaactgttttccttagtggctgcaccattgtacattcccaccaacagtgcacaagggttccagtttttccacaaacttgccaacccttgttattttgttgagagtggccatcctaacacgtcaggtaaaatttttttgcggttttgatttgcatttctctgcttgttagtgatgttgagcatcttttcatataccagttggtcattcatatatcttcttggagaaatgtctatttgagtcttttgccaagttttaaatcagataatcagattgttgggctttttttttttttttttttttttttttgctattgagttgtaggagttgcttatatgttttcaatattaaccccttattagatatatgatttgcagatattttctctattccacaggttaccttttcgctctgttgattgttttctttgctacacagaagcatttcagtttgacgtagtcccacttgtgtatttttgcttttgttgcttgtgcttttggtgtcatatctaagaaatcattgctaaaactaatgtcatgaagtttttcgctcctttactttcttctaggagttttgtagtttatatttaaatttttaatgcattttgagttgatttttgtgtatggtgtaagataagagttcaatttcattctgttacattttgttgaagagaattatctacttcttccctctttcccacccgctgacccaaggcagggttgtactctgtcacccaggctggagtgcaatgacacaatcatagctcattgtaatctcaaactcaagggctcaagggatcctccagcctcagcctctagagtagctgggactataggtatgcgcccctacactcagccagcttttaaaaatttttaatagagacgaagtctctgttgcccaagttgtgcctcaagcagtccttctaccttgtcctcccaaagtgctgggattatgggtgtgagggactgtgcacacagcgtaatctacttcttgagtcctccatggtagatatcaaattgacatgacgggtcaacttctataatgaacctctttgggcaagaagattttttagtcaggattatttccttagggtagatttaaagaatgggaattactaagtcatgtgtagaagcacttaaggctcttgatattgcggaactacttgccaaaaaagattatagcagtttaaatcagcagacaactccttcttcactattttatcatatcctcactgtcattgagcagtttgtttaaaaaagaaagaaggggagcaataaatatttatgaacctattaagtacaaatggaattttgttcttttagtctgcatttctttgccactactagtttggtagaacattgttagccatttgtatttattcctttctgaattgtgaggcaaaacattataacaacagagcaaggaataatgacctaaaggtaaggagagctatgaagtatcattgaaagggttcatcacgcctgtaattccagcattttgggaggctgaggcaggaagatcgcttgagtctaggagtttgagaccagcctggcaacgtagtgagacctaatctccacaaacaaacaaaaaaattagctgggtgtggtggcatactctacttgggaggctgagccagaaggtcaagactgcagtgagccatgattgtgctgctgcaccacagcctgggtgacagaaagagactttgtctctaaaaaagagaaaagctcaaaagtgttcagaacaatgactcccgttacttcctgtccacaggactggaataaagtatgggaggagggagttaattagtttcctgcccattcttgttttgataaaatgaggataaaagtaatggcttcacaggactgatgacaggtaaatgaaattacatcgtgtaattcattcagtacctgctcagtacatgttggccccttcgttatctcttcctttttacctcccgttctatttctgtgcttgcaggctaggtggaaatagaggctgcctagaaacatgcattaacaggtgcttcttgggccaccctagcctgaagaaggacaaccagagagtataacagtggcacctcaatgccttggccttgaggaccctcagtgtcccttcaggcctccagatttgaggggaggctctagcatgttctggctgcagctattgtcttcagggattctgcagcttgtagctgcttggtaagttctttgcttgtggctgattgttacccatttccgacctgtgtcttatattcttgttctgagcctggtaccatccttgctccatgccaacccactcccatcaggtcttctaccccaacacaacacttcacgtctggtatgaaacttgcccatacgcaggccccttcctctccctgttgcacctgcctcctcaggtggaacaggcctgaaagcctgtcctaggcatgcatgaggttgcctcataaaacatcactgtgtcttctactttgattatagagccaggtgtccccactattatggaggctgaggccacccctgtctttctgttatataactcatatttccctgtctgagtaatcaagattgtagggctacattaacagtccctaatacacacatacatactccaaacccatcatcattgactcccccagcgaaatgtttccagattctattaagttttcgctctttccaaagcttttcctcttcagcctataaaaagcaagcagctatttgcttcattcccaggggtacttctaccaattggagctgggctgttggagtcatctccactgcctaccaccaggacaagcagagaagtgtgagtggaagagagagaggtggcagggaaatctccctttgtgtgagctgtgtggtcaggggtcccaggtgcccacagtcatagaggaggtaggggcccacttgaaaatcaccagatgcttttttcagaccaggcctgagtggttttttgtctcccagcctgggttgcttatatctccttcctccctgcccctgcaccctctgtcttggtgcctattctcattatcagagttggtaaggctctcatgccctcagaagaggaattcgtccattttctccctcagctggaagccacacaccttgctaggtctcctgtcaaccacaacatatttgaactacttttacttaagcaggatcactctgccctaatagaataaccaggaggcatccctgcaactttacttcattctggaggggctaaccttcctgctgctgtccatcagcttctctagtctccaaaggtgtacaattctgaagcagagtcctcttttccctcccagcagcgcattcagctagcacttattgagcactaattatgtgccagccactgggacgctggtcagaacatgatgcgtgctctcaagaagtgcccagtcattgagaagacagaccgggccgtgcccctatgaggcaggcagagttctgctgggcccactggaacgaggcaaccagctcacagtcagagttggggcagatagcccaggtgctctgttaactcctggaagccagatcccgtgctttgctgttacaaacattctccaagtgtgcagtggtaggggagtggcctggctgtatacagaatgcccaaaccttccactcaactctgaaaaccttgaacattgtggtccccagaattgagccttggctgataggaaatcctgacctggtcattatcaccaaggagggcttcccaagtcacggggtcttcactaccacacacaggcctccactggccagcttgtgcttaaaccatctagtatttacttgtacaaaaacaaataatttttaacttttttaaagcaataaacatttttcctctcctaattcagtcttacatgaaaccttaaagtagatgtaggcctgctctggttgaaactggaatgagaagtctggtagcccagcaaccccaaggccccctctgcatacagttcagaaaataacagatgggtgtgacccatcaccaccagaaaatcccaagtttttgaggtcccacccatagaggaggaggcctccaccctgctctgagcagcagggagggggctgcagagccagtacccgttccttagcatgtccacgtgctgtagacagagctgctgagggggaaaaaaataaagaaaaattgccagcaccaatgggggatagctttcatcttaatcttgccccaaatcccagaaccagtaaaccatctgctgtcctcactgtgcccgcccaagaggtagtggagggcacaacaggcagtcccagagggtaccgaggggaggagggtgccacactcccagcactcatttcagcagcggggcagactgggcttgacacaatatggaggtgaggacctagcccagtacgtatttagctttcaaattataagtctgggagtgcgggaagtcaagagaaaatagagaggaaagaatgaagagtgttatgacagaaatgcattcccattaaaaatgtactcttttttttttttttttaaaaaaaaaagaaagctcatctaatgttaatctagaaactctaatttcatggggatttcaagaggcttgtggaagaaaacatcgtggtaattgtatatgctaatggagtacctacaggacattgttatagtgatggaaattctatttcatgcaaacactaaagcagtcctccctttatatcttggtaaagctgattgacagagtataaaattgctttttaatccaatttaggaaacaaaatgtgtagtgggttttagcattttaaaatgcttgaagcgtggaagcagaaattcaaaataccctggcagactgtctatgatattatatatcaacaggacattttagaaatattatttcgatataagtttctttgaattgagtcatattttgttccaaagcttttttggattagagtaaggagaatgtattgtggaaatatgacccagaggaaaatgaacagaaaccagtttttagccacatttctcaggaataggaagtttaagtctctttctttaacaaaaagcactgcagctgctttccccaagactactcccatacaggccacccccaccaggctcattacctctactgaggtcactcttattaaggccgctgccacctaggccaccagatctgttggcctcttctcaaacctcatcctatttcatctctcctcagcatttggtcccactgaccaactgctttttatgttttttttgtgtgtggttttttttttttccatgagacagggtcttgctctgtcacccaggctggaatgcagtggtgctatcatggctcactgcagcctcgacctcccaagctcaagcaatcctcccacctcagcctccaccttagttttgccatgttgcccaggctggtcttgaactcctgggctgaagagatttgcctgccttggcctcccaaagtgctgggattacaggtgtgagccactgcccccagccagcctgcttcttatgtcttgaggccatctcgactccatgacaccttctctctgtgccactcctgtatgtcagcactctcctcctactcctttcctgcgctgccacgcgttcatgttttccagggagctctattcactgccctctccctccttgctcgaagctatctttttttttttttttttgagacggagtctcgctctgacgcccaggctggagtgcagtggcgggatcttggctcactgcaagctccgcctcccgggttcacgccattctcctgcctcagcctcccaagtagctgggactacaggcgcccgccactaagcccggctaattttttttgtatttttagtagagacggggtttcaccgttttagccgggatggtctcgatctcctgacctcgtgatccgcccgcctcggcctcccaaagtgctgggattacaggcgtgagccaccgcgcccggcctcgaagctatcttgagagatctcgggtgctcctactgcgcagcttccatctctggcccagaacacccacatttgtgtctccagattctctcctaagctccagacctgaagacccagctgccttcaggccatttctccagggatgttctgcaggttctttaagctgtttttgttaccttcccctgctaagcctcttcctcctttggtgtctttaccctagctaaggagctcacattattctagtttcttatgccaaaaatttgtcaccttcggttctttccctcactctcacatttagtcaggtgccaagtcctggagaagctcctcctccaccccgcaattttgtccccatcacctggactctaacaggagctttttaagactttgctaatttccatctgttccctgtctgttgatcctacacatgactcacccatttctctcaaaattgcaaactgcacaactcacttcccaattgcctatggcagtgatttccaaactgtcctcctaggagagccaggagggttccccggacctctcttgggtccctccctcagatttccccacagctttgtttttcatcagcttcacagattctaagtgtttttttccccccctcagtatctgcaggggattggttccaggacccctcacatataccaaaatctgcacatactcaagtcccccagtgggccctgcagaaccgaacagaacctgtgttatgcaaaaaatcagctctctgtatatgcaggtttcccatcccatgaatattatattttcaatccgtgtttagttgaaaaaaattttgtataaaagtaagcctgtgcagttcaaacccaggttgctcaagagccaactgtagtctgtgtctaaaagtctgaaaaccagttactgaaggtcagggcaccctctggagcaggtcatgaaggccttttacagcctactttttctacttcactcctttggagagtagcctgagttcaaatgcaggttttgccacttccaactgtgtaaccctgaacaagttagttcctaaagccttcattttcccatctgtgaaacaggaatagaaatattagctctatcacagagttagtgttaaggagttactgagataatgcttggcatgtgtgttagtgtgtaatcagtgttggcagttaccatcatgttagtactcaggccccaccagtttagaaacacatcatgcccttgaatgccttggtttgcttttggtaggctttgatgcttttggtatactttgcccgttaatgctggtttggaatcccccctcctcattttttcagtataaactcttatttaattagtaaaattgatgttttcatttttctgtgaagcttctcagacacaatgctctccatttgcttccttagtgctaagtttatacatcttactaaggtacttaccatgttgaattttattctttctccatacattctctttttctctcctctctctctccctcctctactcctacaaagactatggatcatcaaggtggggacctggcctgattcatatccatgcccctgaggtaaattatggtgcttccatatctgtgtccttggaatacacaaaggatccttccatatccatgtccttggataggctgtgggtgctcccatatctgtacacttgagatacactgtgggccttcgcatattttttgaatgaagcaaagtaaccgatgaacagagaagtgaaccaggaagaagcaggtgccttgtgatgaggacccctgagtggtactgaaatcaccaggtttaatttgacaattcagctttgctttatgcttgcctccatatcggtcggttaatgaccctcgttagcccaggtctcttcaactgatctgctactacaataaaagtgctgaagtattttacctaaaaacaaactcagttatctgtgggacatgtatatgtggaaaacacaaattacctctacagtaatatgaacatttaatttttttggtagcaaaaatatctactattcaatgcacgcttatatgccaggtactatgtgaatgaatgctttacatatattacataatcttcaaaaattaaaaccagcaaggtgtgtttttactattccagttttacagaggagcaaactgaggttcaaagaaattaaataacatgtccagggtctcgtagctaaacagtagagccaggattccagtaagtgattcaaagtggcagatggtagatgagaggaggtaaggcaaggaatcctggtgatgtctacctcattctccatcaccgcatgatctgagtgagccatggctacttgcagtgttttttttgtcctgtgcctgctttgtgtcttactgattccagggagtaagcaacattgaaactcagactatgtggtgtctctcccaaatagcactagctttattctcagaactccttattgatgttttaaaaacatcttttctggtcttaggccattttatcagagccagttgcaccaaagcattgtaggcatgaaaaaaatttgctatctccagttatcttttgtttgtatgtttgtgtgtgtgtgtggttgtgtctgtttttgatgcaagtctagaaaatagatttgtattacatatatacttacatacatatagagagagagaaaaataaaaatgcttattacaagccaggcatggtggcatatgccttatagtcccagtaacttgggaggctgaggcaggaggatcgcttgagcccaggagttcaaggctgcagtgagctatggttgcaccactgcactccagcctggacaacagagtgagaccccatcccttaaaaaatgcttattatagaaaacttggaaagcacagaaggagtacaaaagaagttaatctcccattaaaatcaaatatttaaccaccatgaacattcaacctgtgattgtccaatggtttttaatgcctacctatacctttttttgtcaaaataattaataatctgctatgtaaattgttagggtacattgatttttttccatttagcaatgtatgatgaacatttccctgtgctaatacatattatttcactacctggttttgggagcaacttaatagtcatcattgactgtgatataaattaatgtacctgttttttttcacattttgtttatttatacttttgctaatgattttcatatgacttatgctattgttgatattgaaaatcccgaaaaaatagttgtatgagttaattctttggtattaacatttatgtgaatgataactatgggatcattttcattcaaattatgatagaattttaagatcttagcaaaaagcactttagcagccacccaaggtagcctctaataggccacatctcttcagcagtttccctgacaggtgagccagtctccactcagagacctccatgagtaggcgctgctcacacctaaagaccacagctctctgcttctcttcatatgccctgactttggatgctcctgcagtggaggctgacacaaatagattttgaaaagttgcttccaaaatttttagaagcactgcatttcaagatcagtgtgattttatctgggaaggaagttagaggcaggatggcgggcaaaatagcacagaaccaagccattattatagatggacaaagcgtgttctttgatttgtgagctacagttattctaattgatttctgcatacttgtggatagggatctgccctgttccatttatttttctcttgacaagtaagatgtgaaatgttgttccatgcttttctaatttaaatgttgcacatgttgagaactgatcttgccagccattttaagcctggccaaaaacataacacattgttgttattagccttcatcatttggttagggccaacattttgtttggaattataaaggagtgtaaatctcttttatagtcatagccgatttctgccataagatagataagatgagaaggcagagttgtttccttgatgtattgctttggttagcctcataaggctgattaggccagggatgttcactttgagagacttcttgggaagtaagatttcaatgtaattcaacttaaaaaaatattaccttgatgtgcaaggctctgtaggaggtgtggggaggggaaattaaggtgcagatggcaaagttcatgctcttgggggtcttatgatttagcagaggaacaagatacacaataactaatataaggtggcgtgtgattagtacacatacacaaagattggagagaacttagaggagaaacagcattacctcatggcctatgtttggggctgcggatgatgtccttgaggccatatgtatcccattgatcctgcaggctgagtaagccatccgtctcacacacatatgtactactgttttccaaatgtattatatgtagatgctctggtggccaacaatgcttttagattaatttttgttgtattacatttatggtagctttttgtcatattgtatattttcagtcagtagctactaccctgatgattcctgtcatgaacacctttgaaattttttcatgttaaaaattggtccagttatccaaagatgaaaaaccattgtccacaacagtcaatgctgtccaaaagacttttccgtgatcatggaaatattccctgcattgtccaatacagtagttattagccacatgcagcacctgagcacttgaaatatggctagtgagatggaggaaatgaatttttaattttgtttggttttaactaattaaaatataaataaccacatgcagtagaaactgtcgtattgaaaacggatggcacatatctataatgtccctttgtcaggaattttctgaactcttcccctcccctgccaggttgacttgccctgcctcctgctagtttcttttcattttttttttttttaggcggagtcttgctgtgttgcccaggctggagtgcagtggcgctatcttggctcactgcaacctctgcctcccaagttcaaacaattctctgccttagcctcctgaacagctgggattgtaggcacccaccaccacgcccagctaatttttgtatttttagtagagacagagttttaccaccttggccaggctggtcttgaactcctgacctcgtgatccacccgccacgacctcccaaagtgctgagattacagccgtgagccaccgcgcccagccctgctagtttattttctacccacaaatgtgggtgactaccaggcccacttcttctcaggtgcccctattcctgaaggttctttaggctaagagaagagttctttcatagatgcttaatgaaatgtgaaagccttttctaatcatagaaatgaaaagaatggtagtttacacttttcttttatccaccatctgattgtcaggggctttaagaagatttctgtatacctgggacacatgagttagttgttttcatattttatgtttcaaattttataaacatgatccttctttaaaaattgactatttgataaatgtggtggctatgaataattagaaagtcagatcaaaatcttattccagggctctcattaggccagaaatttcccttctcctttgtttttttgatgatgattgttatggataaccaaatgctcttccttatccaacttactctggaacaattaatacagttcataacactttacaagttatttattttttttcatgactcgtagcctcggggtcctttaagactatcactggcagtagcaatgtacattttaatggttcctattaaggtaacaaaatcacaagaggatagccaggtaactccgaacataaaatccaccataatataaatataattatttatattatggctgatattcattataaacatagtgcaaattggattgctgtgtaattctctattcttatttttccgaaaagatttttgtcttgcactgttttaaaacaagacattaggaggaaagcagtagttcatagaatccaaaaaggcagatggccagaaagctcttctagaactcatgtttgaggagttccaccaaaataacaaacacctctcatggaccagcctggaaatgggtcccaggtctttctgtggagtatggctttctatcctacctcctcccaagtgtgacgaccgttatcagtgtcctcctgctgctctctgggtgtctcacttccctactcttcctgctttgaggccagaagcttggaggtttcttcaaatatcagacccagagggaggaaggtttcagttgctgagccaagatgcctgcatgtgttctcctggctcctgctgggccatacacctcgacaccaaccgtgccaatgggagaggaagcttaagggcaactgagggatgcccaaagggtacaaatcctcaactagatgacagggaaacattgatagttgtgccatagtctccattctgtataccaggactcttctacctttcactgtctttcataaacttccacggacagaaaaatacataggcaattatttctgatgctaaaatttttgaacacctttttaagcgcttgatcttgctgtccatatccctctgtagtctactagtctccattttacaggagattgcatgggctgttgttatgtttgtctttggtggtggtggtggggtgggtgtatgtgtgggtgtgtgtgtgtgtgtgtgtgtgtgtgtgtgtgtgtgtgtgtcagggatggatccaggaggggagaatgccagccagaaaagaaaggttaacatttgcaattataaaataaccttcaaaaattgctccctatctatcctatagtaaaacaaaagaataaaaatggaaacgtagtcttttctcagcccccgggaagtatatccattcttgccctgtactcctacccactttgtagaagatagcaatgaagaggtgtacgctgagacccccatcccctaccccaactccctagtcttcgggaaaggatcgaagagtgtcacagtttggggtctataatgctcccctcccttgggtcttcccatgctctggctgccacccttcctccctgtagcacctgagcagctgtgggtggctcttttcataggacaagatttttctccttgatacatgtgtatagaaaaaaataatggacagtgctactcaatctcaaatctttctaatgcacttggtttagccacataacttcttaaccttcatgtgtctgttttataaggtttcattctgcttccaaaattataccaaattattgtgtcttctacattttcctttatgctgtttgagtcttatgtatttctttgattagagtgtcttagcctgaaagcctctgatcttcactgtaggaaactagtacaaggctaatcatctgtcagcaaactttgtattgctggatgttttagtaattgccttcaaatgtagtaatgaggttgcaggtttaatgaaatgcttataagtggtggctttagggaaatcaactgctctattttcaatactgaattctaaattacttaggtattaacacaagtgtgtcctgcttttttatttcagtacctactagaaatgaaaagcttaatcctacccccagaacatatcctgaagagaggagacagtgaagcaatagcatatgcattctttcatcttgcacactggaagagagtggaaggggctttgaatcttttgcattgtacgtgggaaggcagtaagtaattttctttttttgaaacatttttaagagcatgaaaaggtgctaaaatgtttttgcactgtttatgatgaataatgaagatttacatatgtactgctcttgtgttctgtgatggcccatctaagccagttagtgacttaggttctcccatcccccggtggtggtgggtattcctgtggtgaggctgtttccacagctcagaaaggtaagtttatattatagatggggtgaacccagatgttcttcaaaggggcaccttgtcaccctgaaaaccctgtttggaaacttggacagccccacagcatcatggtgatctttggcattgggttaggcttcgtgctggacactgatgaccacttcttgatggcctttgtgggagggttggctaagagccacagttatcctccactggaaccagaccggccatccaaaaaggtgtggcagttatgcttcaaaccaaggacagtggccattgaaccctggtgtttgctaggaggtgtagcattcatgtattaacggataaatgctgggtagatgaatgcgggcttgttctccatagatagtattattccatgtaaggagaataggctgtaatggtgggggagacatgctccctgcatgtcgtctaattgggaagaggaaccagcagcacgtggcagctgcctgttgattttcagaagggagaggtccatggggtggagtgatcttggttaacattatgagtcagatgagatttgaaccaagccttgaagaagtaggacattattataagcaaggacaccatgtgaagaaatggtaagtggtggggctgtttgagaggatgtaaattaaggaaaaaagtcaagactatgaattattggacaacaagtgcattgacattctgctagcattaattttagcaaaacaagtacaatatgaagcatgggtttctttttccacccatgggaaactaaaacaagagagtcttctgacagttgtttcctagctcacccttactctgatcaacctcacaaacaagtgtctttttaatcctttcactctgtttatctttactgcttccattttcattttgataatctgctcctcccttttccggcccttccctaacccagcaggagtccaagttggtgtaggaagggaggttgggggagcaaaatgggatagtgtaaaaataagctacagatgggactcaaagttgattgaaaatttttgtttcattttgaaaatatttctttagcaaattagcagtagttctgcttctatagattactatttataacttgaaggaggattttatcagtgcctccgcccctcctcagtaagtgtaatagcacactccaggtgcctgcgtggcaccagcaactgtatttaaatgggttaagacacaccactctccactcagggtgtgtgtgagcatggtcatgattccttctggcttgtgcttcctgttgtatgtaagatgttctatcagaaaggaaacacaatacatgtttatttaagcatgagaaagagacagaaaagcccagcagggttgaacgggagaggcctcacctagtgtcagttgtggagaaattaaatggacaagttggcttaccaaatttttgtagattggcatcttagaaataataatagaagcatccattgggtctcatagaaaagaaagttacctgtcccatagaaaggacccaaaaaaggggtggggcaaagggtgataaagacatggtatcaccatagaaaaatggcatcaccatagaaaaaataaaaatcctatgaagagtaactggaaactctctttggaaattagttatccatgtggtcagataacagtggggagatgatctgatcaactggaaggataatgagattaaaagaaacatgaagtgaaacagggagctacaaagtcaagcagaatagttgtatggggatttaattttctcaaattaaattggcagaatgctttattaggataaaaagagggggtgggttttcaggcataacacagtatggccaggtacctataggaaaggaaaattctgcagttgatccttacagataggcaggaaccactctggagaagtgtttgtgaaaatcaggtaactgtgatcccagccaaagtcacttacactgccattcagttttcacagagagccataacattcaattttagaaaagaggactgtggaagtgcttactatatgctaaatgcttgagaatgccacgaaccttgaagagtgtttgtttaactaggtaatttacagaggttttgcatttacatcattcactcttcctgataatattctgagttaggccggacagaggtggccatctcaatttttcaagagaggaaacaggttcattgagatcggtgtcttgttgaaggtcctgtggccactgttggggagccaggatgtaaacccaaggtcacttttccttcactgtactgaacaacagattaagaatacgaagattaatcatctctgaaacatttgtttggaagcccacaattgaaatttacatcactacttacagcatagggtgtatttattacacctgatctctctatagtgtttagaaagttaatcatcctatataaaattatattttgttgtttaatattgacttaaacattttaaatatcgaatgagaccaattttataaaataaataacaggtatgtataaataaatgaaagagactggaagtaaataagcctgttttaagtgattaccactcaattgtggattttaagtaatttcttttttcttcatatttctgtttttaaattttcaacaagcataaatatgcatatgtatatatacacatatgtatacacatatatttaaaaaataatatctcattacagatgtttttggtcttttaaaaaaacaaagctgtaaatatcatgcaatttagaagaaagaattacccctccaaacccagacaatcttatccagtcttttgacatcgcttctggatctatgttcattataaattaaatggaggttcagagctctggattttccatcagatgacctggattagaattctgactcagctacttatagtagcatttacttaactttagtaatttttagaaactgtgaagcactgatgatactgaatgccataccccacccaccccagattggtgacttcaggaaagttgccgcagctccctctcaggtccgctggccatgcataggaagcctgtgcaggagcaaaggaggctgcacttccaccattgtaccacttggtggtgccttttgacatctccagcctcatagtttaggtttttctcctttgaatcatttttatcttcattctgaaatttaggaccattccccaactcccttccaacttccctttttcattagaaagaaaattcagggaagaaggtaacagtacctaattttactgggttccatgtttaaaatgattattagtaaatttattttgggagatttaaaacaaattcttagtttctgtcaaaagtgttctctgggagtaggggtggaggtgtattttgttttgctttttaatgaatttgttatgttggaacattagccatccttaattagtggacttaagtgagttttccaccaatcaagctgaaaaaaaacctcccatttttgataaaacccccgaagtccagctgatgcatggcagagattgtttgggtttgaaacatatggtggttttaaaaaaaaaaacaaaactgaatcctcaaccacaaatacatcagcatttcaaaggtttccaaaatgtttgattcatcactgtcccagcccctgaaattacacaatacgttcctcaaagtcaagataattaagaaagggcaagagttttaatttacaagattttataatatgtttccagttcattacatagctgccaccttatctgaatcacatttatttgaaacactgttctggcgatcctcacatacatgcaccactggaagtatgagttgaacataaaaaacatagaaacgaagggtctcgtttgaactgagtcttcttcactagggtattacacctatggggccctattttatttatttattttttatttttgctggggccctattttaaatggcacattttctgttttacctgtattaatactgatgtgactttatctccttcctatcttgatcttttcaaggctgtgttttggctgtatttattttagaaagcagggtcgcctgccgaccacaactgtgaactttaattttctagttctatatatcaggaggctagtctgccatggggtaaatcacttagcctttctttgtttccgtttttttctacttgaccaagtaagactctttattttctttttagagatccccccgccccaaagaatccactaaataatgtataagatttgaggatggtgttttttaggggaactaaggcagagtatttcctttgagaggggaaaatggcccattgttgaagcgtaggatgagattctgattctaatttattctctttgaacctaatggcaaatgctgctcactgtaagatgtggttcttagggcatttcctctaaccaaacctttcctccataaggctggcaccttttgaactaccaaagagaaattccaccaccctcccccatagatctaaggctaaattctgtaatttcggagaaagcaatgataggctaaagtcgctggtcatagctaacttaccctaatagccagactccagatatcatatgatggttccccacctactgcccagtagaaccaacttgctcctttcctttattccgtctcggtgaatggctatcatatgggtccacctgagtttttaaaaaggaatattctgtctcttcttgattgtgcgtttattcattcattactttattcaacaaatatttattgagtccatcctttgtgccaggcattgggttgaggagatcaagatgaataagaatctgaaatgctttgggaagaacatttgtgtgtgtgtgtgtgtgtgtgtgtgtgtgtgtgtgtgtgtgtgtacagtgtatataagcaaaaaatacacacacacacacctcacatcagatagatagatagtaatgcttgtatccacactatctgtcatgacagtaggaactgagtattagagtggtgagggtcactaagaagttagtgagtctgctgtaagaccctagaatttcagagtagaacatcatttaatccaactaagggaaagtgtttttcccaaggccacacaattaggtagtgacagcatgtggatcacaacccagccttttgacttttgaattttctttattgctgcacccaaatgcctcactaaaaacagatggccttcgtggctggttagctacattgaacttaaaaataaggacatgaaatttgcgatttggtgataatttcctgttctatcacttgcatttctaattattaacaaacaagcagaatttttacttataaactagagtatgacctgacagagaaagtaggaactttaggtttaatagagagggatatgggggaaagagaaacccaacctttactgagcagccaggcactatatgtggatgccttgacctctgctgttacacttagttcctttaccagccttttgaggcctgtggtattctcattttacagatgaagagacagggacacagattaacgacccacgcaaagtcatacgctagtgagcctaggcaggtcctgctcatcctttagatgccactttggccgcttctccattatgtacacacagcaccatgactcccttggaggtattcatcaccgtgggaacctttgctcttactttcatgattggatcctgcttctggcacttggtggtgagctccatgagggcaggggcagtgtgtgctgggctcacctttgtgtgcttgtcacataagaagccactcaccttttgtcaagcaactgattataagaagtagagctgggattcaaactcggttccctctgttacaaataatctgtataaaattatctaagatactctaagattgattacattctatccttgcctatctagtaggtagagtaagaagaggtcattagaagtcattgggaaaatcaggaattaacttgttcatgtatccatccttttgtcatttctttggttctgtttatttttccccccagtatcaattgagaatctctgacgggaacagcactgatagacttggaacctagaaaatgtgtctggtcagggatagaagaagacagcattgtgccacagacttgattgtgaaggcatgatctgttctttcactaattctcagtttcattttgacccttcagcaaattcacaaccaaaatcaaggtaggggaagggatggcacacagaggaaagtgcagaaatatcatttatataccatgtattcactctgagtggcctaacttttttgttttgtttttaacccaatacatgtgtatttttaattcctctgaaatttgtgttttcttaaggatttttaggtctgtattcattcataaaatagatctgttcaaatgacctttttctattcttattagcaccaccaaatcagtgtgtttttaatacttagattcgcaaaatttctggacatttggcaaaaggcacaaggctgtcatggagcagttgcatgtcttagcagtgaaagggaccaggaggtgggaggtgacgctggcaaggcttgtgcagtgcctctaccggcctctctctggacctcccctgcttatctcacacttgactgggccctgcactgcagggtgggtaaaggatagaattgcaagcagaaattgtatttgcttttgtttagtgaagccaaaagccttaatattattttttgagctcaatgcaaatggcaactgacatgagagagattttaagagcaccataagcatctttataatcatgggggtggagggcaatccgggaagagggtgtgggtgggtgggtggctgtgtgtacacatgcactctttttaaagttgtattgtgtctctaacctctccaaaaaagaccagaaccaattagaaaaaggaaaaggccaacttgacgcacaaaattctatatgcatgccaaatattggagtgaaaaacatgtagcatttgactgaaaagacaccaaccaaccattagatttctatggttgaacactctcaagatcttgcactcctgtatttcatttaaaaaattactccctgaagtgcaaactgacttcaattttgaataaaatttagcattcaaatttatagccactttgaaaactgagggtttatttatatcatatgaacttgaacagatacttaattacagcaacccagcagccctttgcacatggagaatctggatttgggaaaaaaaaaaacaaaaaaaaaaacttcccacgtaggtttttccacatttttcagatgcttttgtagcagccatcatttatgggaaatggcattaaaatcctgccgtaatgtagtttaagtttaaattcagtgcttcccagaagagattttagtgtatcctataaaggcactaaaaggcttatttttgtttttgtttgtttttgtggggggtgttttgttctcttgaaagtctggttctaatgagagagatgttggttccttggaatgatctttgtgtgttaacaacctgtgcaaagaactcctctcttgcttgttctagcgggcaaaagtcatctttgtttgcgtgcaagaaaaggtctgattgaactagggtgagcctttcattttaagcagagttaaagtctggggtgtttttaatgttttaatctctgtttaagaggtttctgttatgagaggaaaattgataacatttttacctcagcaaactgccagcaaactggctctgctctaatcccacatttatagtgatttatattctccgtggcaatgtgctgtaacctcagagtgataccactgcggtgtagattgactgcattccaaatgctggaatcacatacataatgtttttacttttaaataatattcagacaccagaataaataccatatgtgcactgatgctggttacaatggaaccttgtcatttcttgtgagggagaacattctttgtttctgattcctgtttgaaataagtatgcaaaagataaatatgtacattgacagcattttgagaaggctctggtagttacacagctgaggatgtagctatgattccttgaaatgtatcatttaaaactaaaaatattgctgcatgttgcccccatccctcactaccatacatgaaggcaaggattgttatctgacattcccagagtagggtagagcttttatattttatatctacagcaggctgtagtaagaggacatctgttgaagaaaaattacctccgtgagtactgttcataggaacagtgagactaacatgctgatgacattgtaacagggagagtaacacacttgatcatgggaaaggatggattgattggaaagccgtaattcagtgtgagccctaatgtcatctgatgctacaaaagcagaatttaggtggcctaacatcatcaaaatacagataattaatctctccagatcaattttcccacatgataaaagttaagatttaaacttttaataaagtttagaaacacctcccgagttatacatttttagatttttgtttttattcatcttgattggaattcaaatccacttaaacagtattttttaaatcaatttggtagaatacctttcatatttgtacatctatacaaactccaacaagtcgatccacatttgcttcttggggaagcattttaatccacgtttgcatgattactatttgtttagctatattgaattagtgcccataacattttaataatatttagtagatgatgaaaccctgggcattgatactgatggcttcccaacccctctgcacctctgtccccacccagttttgtgaggtttgctcagaatatatagtgtgagatgaatgtgtgagtaatccatcacaatttatctctgacatttcatctggcacatagcttggtggggtaagccttgcctcctttgtagaagtgttccctgttataaaaatgctcaaacgcccctttttgcagttgggaagttatgacacaaacattggacatctctgacatattttttctcgttttcagcttttcggatgatcccttatcccttggaaaaggggcacctattttatccttacccaatctgtacagaaacagcagaccgagagctgcttccatgtaagtctcacctctcttcagccagtgagggtgtgtggtgaaaggtggggattggaagaggtgggaatatcaaagtttagaatgctccttgtcttttattacttttctccaaacccctgtccttgtttgatagcatatgtattaaagtgaattatgtgagtgggtttggcttccttttcctccaagtctctccaaatttatcaaagggaaagatgccaaaggattgaaatgtagctgaagaaaccctatgtactgattggcctgagcacagagacccctggtttgggctggtgtctgctgggctggtccattgtgagggttctgcctgggctcttcagctggacagatgtggtctgcaccgaccggagtttgaagaggagctgctgactgagagggagctgcgcatgagtcatgggtgggaggccagcaccaggaagctggcaccatggccagatgtggagttgtggggcagggcagtgtgctgtgtggtgaggctgtgctctggcaagagggatttcccgtgagcacctcgtgggttgcatgtagtgactcggagtaccatgtgcagagcacacgtgtagcctcagcactgtatgaaagcacacaaaagaaaaccctgccctcgactaccttacacttgctagcagtctaatgacccataccacatgtggaaaatattattttgctttgctgtaatacaacattgttttgacaattcaggctaaatggttattatcaaatcatactatgtacaaggatcatgtcaggctcttcatgtggcccagacttaggatatatttttctccctcagataataagctccaaattttagctcttctcccttctctgtcctctctcctgccatctctgccctttcaccagccccagttatatcaatatcttatagctgtaacatataagtactttccccagaggaacagtgtaaccttagagccctgggtgcatagtaaatttccaaacaccagcatcatcaagccagtcatgaatctccagcatggtgggatctgggtgcagaactcaatggctgtcatcagattgaggtagcaggagttgctcacttgccttcctgccagccagacccagtgcgagatttgttactcagggaactgggagatccccgtgatgtgtttctcaccgttcgagtttgattgtgaaaagagtctggtacctcacacattagatttgatttcagaaatcctcaccgtgggcccatagtttacctttcaactcccccttcagggagatccttgttaagtttcggttttctggtaagaaaggcagttttctgaaaagtacagtatttttaaatgttttaatcgagtccaattaagtttccatggggatagattagttattagaacaagattacagttcttaagagaaaccttatagggataatctttataagcctgaaataggaaattatggctcacattaattgaatgcagtgctccaagtctggtctccctccaaaatcttttttggttggatgttaagggtgaggatatgaagaaggtaggttgttttaagtgctacccataatttgcacattaaaagtataattatagccacacgaggccctgagcacacttgttccgtgtgtttgaatcccagcaggctgacctacctggatgtagtaggcatattcgtctgcatggagttcctcctggattccctccaccctcagtattagccttgtggattactgttgaagactctgaggaataggagctgaatggtagaggaaaggcctctagatcttgtattccctgaggaccatggagccctctggtcctcttggttagagtgggctgtttctcacgtgcagtttcacagcctctcccccagcacccccagcaggtggctctttctcctcctgcaggcccgccccatcgacccaggcagtctctcaggcagcctcatcatgagcacagagaaggaggcgattctcttgacctctgtaccacagctttttggttttcccaaacccaatgtttgaaatataatataaaaattatagagggcactctaaagagcaccagcttttcttgtttttttgatgattgttggaagtgtatttgtcatcaagagtctcttacaattgtgccagataaccctagcagtcttgaccttccctccttgcagtttgaatagacctacatgtgaggtccttgctggatatctctctatgagggtggcaccctccactgatatacttagagggtgccaggaaaaaatacaggagaaactagtatcatctcattataatgattttttaaatacaggaaggaaaaaatatagacgggataccttttttccctgtatactcggttttggattttccaggttttgtacaatgaacacgtgttttgtaatttgagtaaattacaaattgtttcagctgtgtttgcttttgagaaaaaaatactatacattaggcataggcggtgctcctcttccctcccatgaaggcgtgacaccctcaaatcagccccctcctgcctcaatttagagtgctgaaggctggatggagacttgcgaccagcagatgggcctccaaaggctgggtcagatgttggctatggtttgtcaggtgtgctattttttcatttcccataggcttccaactctttcccaagctctggagtcagtgccaccataaagacctcccctgagagtgcagtttactccagccctgatatttcccttttggtcttctccacagctttccatgaagtctcagtttacccaaagaaggagcttcccttctttattctctttactgctggattatgttccttcacagccatgctggccctcctgacacatcagttcccggaacttatgggggtcttcgcaaaagctgtgagtgtttgcctagagggaggccttggggaatggatggggaaagccaagggcataaaagcagcgtgagagaaatggggttgccttacagaaatgggtacgagcctgcaaagatcattgctcaccatttaattttcatgatcgtcaatggaatcaaagcattaagggtcaaatgagaaagtgcaggttgttactgcatgccttgcctcatttcacaacaaattcttagcagtttccaaaaaatgcaggaggtccaaaaggatggaatgatttaggaaatcctagcaaatgaaaatgtgtgggaagttactcggttttctgtaaattgaatgacattatttccaatcgttggatattgtgggtctttccttagtgaaggatgagatttacattttcaaagatgatttaaataattttttttaatggctgcaaacccttggcttgtctaaggaatgaacagagggtgtaaagggcttattaagaagtaaactgaaatgacatttagaaatatggaaatccattaagagtctttaaggagcttggggagaggagctttaataagaaaagccatctgcattgacagccaagaaccattgtttctttgttgaaaactgaccatttcaacctgcacatgcagttgaggataagtttactgatcttgccacagatgagtttcaaacagaaggaataaggaaaacagtatcaattgtttccctggaactccattcagatttcaaggcgagtgcaatcagaaaggatgatttctaacttggctgggttgatttaatccctttccagatgattgacattttctgctcggcagagttcagggactggaattgcaagagtattttcatgcgtgttgaagatgaactggaaatccctccggcacctcaatctcaacatttccaaaactgaactcatcacccctcttcccccaccaccaaaactgctcctcctcctgtattcctgacctccgccatccaccccgttgctcaagccggaaactcggcagcccttccaaactcttccctctctcactccccacatcccatcgtctcggccttcacaatctgtcagttctaacctcctaagcaactaggccttcagtaaatgtgattcacctcttctttccctccttttcccaaagcatccctcttagtctaggtccttgttgtttcttgcctgaactcctgccatagtcttaactggtctccttgcttcctgtcttatcctccaccgtctttcttttatactgacacaagaatggtctttctgaattgcacatgtgagcatgtcacttccctgcttaaatttctccagtggattcccagggacttcaggatcaagtcctagttgttcagcatggcatccaagactctttatgatctggcccttgcttacctctcagccttagctctcccaactcttgcacagtcactgctcttcagccatagtggatcactcaccattcccagatgtaccaggctctcgcacacctctgcacctttgcacgtgctgtttgctgtgcgtggaatgcccttcactgtcaccaccctgctcatccactctactaatgcctcttcattcttttatactcagctttctttaaagttcttctaagctgagttaggtgtctgtcctttatgatcccgcagtattccatgaatacgtatattctcacatttattgtactgtattataattgttgaaaacttgtctgtcccatttagaatgtgagctccttgagagcagaacggtgtcttcattatctctgtatccccaaggctttgcacagtgccttgctcatagtaggttttcaataaatgattattaaataaataataaatggtagtggtctctgcagaaagaatcaatggaaaaatcagatacagcttagtatttttttttctcttcttgtatacttataatcatagcctcttagagttgaaagggacctgaagcaaattgcctttaatagcaaccctgagtggaggtcacctagactcatcttgaatactttcagtgatggggcactcacatatttataaacatcaaagcccatttgattattggatgactcagaacttttccttgtactgtaaaaatctgcctccctttggtttccacttattcctattctatattgagggtacaccaagcagccctccttcctcttgcaaattcttaggacagctcactcattcatggccacctctaaccaactacctgctttttcctccaggtagaatatcttacatttccttaagtcttctgtgcatgacatgatttctacacccattatcacccatattgctgccttggatgttccttagtttatgggcctacactacttgttattttcttctactccctagccaatctctgagtaaaagtagttgccaaaactctgagtagagtgtgacttagtaaaatttaaaataagaatatatttacattaaacaattattgctcttttatgttttctgtttttctgttaaacatttttagagcatatttgtaaaaatatgtcattagtccagtattcttcattaaactaactgtaatagcacttggtgggagttttgaatcagtagagattcccagcctccagtctatatattcacctggccgcaccaccagaaatccaaaatcttgagtattagcaggaggtatctgtatttttcacaaagcccccagcatattctgaggatggagattgatggcattctcccgtctccttccagggacactgcttggaaagctgaaccttcgagcagccacttgcagctgcatggtgtgccatcacagctgttcaggtggaagcttttcaggaatcagtggtttccctggctctaccttggaatcatcgaaaaacttaaaagttactgaggcctgtccccacaaccggaactttcttggtctggggtccgcatgggcaactcagttgtcaagcactcccctggtgatgcggatgtacaaccagtgtattgaatagaatgaataattgcctgagcctgctttaaccagcaaggggattggcaatgcagagggaaggatagtgactagaatacacctgggtgttctctaggactggccgtacagctgtgcttccagagtatcggagaggggtgttcattaaggatgtgggacaggactcaactcgcctcatttcatgttttcaaagctttggttttgagtatagcatcaaatgattgaataaaatagaaatctgcctttagggtcctcatattttctgctctaccaaggtgtggtagtttggtcagctccccatagttttcaaatgtactttagataagtttgcatttcaacctctatctggagaatcacatttatcttgcccttcattaaggtctagcagtttccaaaatgtctgtagagactgtgtggggaaggaagatggatggcctgaatgagacaagccccttctcccgccgcctcctcgacctgcccccagagtcttctctgcatcttcaccctggtcacttcatcaggcccctcccgaagctcccacgccacaccccacaccccgcaggttatcgcaactgccctagaggctgcctgcgaccatttgcagcttgtgaaagtgattttctcagccctttgctgagataatgtccctgggacaatgacctttagtagatgcagagagattgcactgccacccccagctgctggcttgggaactctccagcatgtttacttggtgaccatgatgtgcagtccataaggaagcccacagggaagcgtgaaccactgggaaatagtggaaagagcagcttccactggcatttccccctaatctaatctacctcagtgatttaggactaactcttcctagaatgtttagttacaaagataagcttgcacatataaatacgttatcattccaaacccacctcctcacagaatgtgggaaggtcaggattctgacccctctgtctttccttctcttgtctctctccttctccgagactgagcctcttgatttctgactctcatgttcacttatagtcctcgacctctttgaagcctgatattgattaccgtgaaatgtcaattgtctgattgcagtagggcacctggaagttattcagataagcagaggcgttttgaatgttaatgaagcctgttgggagccgtgaccttctaagtgatggtgtttcaggaaaaggaagatcaggcaattgaaatgtcgttctctttttttactagttcagttgctttttctcaccacgagacactcattgaatcctagggcattttgattaaagatatgaccatgtatctctgccctctggacagttttagacatcgagataaataggctgttccaggttttcttggtgttgctcattcagacttaacttttcagcagtaaatttccccctaagtcaagtgaaaactgctgtttctccttctatattggttgggtctccaactaaaaaatattgactgattttcaaacatgcgcagaaatacaactgagcatcccaagcaagtctgcacctccagacattttttaaaaaatatctcctgatggagcttttatttggttatgaagtgaaagggcttagcagcttcagacacctcactacattgcctgctccttccttgcaggtatgggatggaaggcttgctgtgggggaaggtggcttagtaatgaagggagcccatctcaactggggctcgtgggagagtaaattaggccctctaggaaaaagttcaagggagtctttgtgaattctcccaaggatggaacattctagataggagggatagaagcaaatcattctatacgttggaagcattggggcttcgtattcttgtggaaccttgttgagaagggcaggtgtcatccaggaaagaagggaccacagtactttgctgtgcagcatggggaaaagggagcatttatggacatcaaccaggatgaagctttcctcctgattttcagaggcttcacttttgtgctttttatccaagtcaggttagtgcccaaaacaaagcaaacaaataaaggcctttattttaagccaaccttgtaacatctccattcattctacagctcaaggtgaggctccccgaggaccccacattttagtgtgtgtgcatcacccagagtacagactttgagcgatgcctgttatctagctgcgctggctcatgttcagcagttgcaacagctccatggctgcaatggctcaatatcagcagttccttccccactcaaccacaacttcaacagttctaaatctgtttttggccaagtcttcaggatataactttgccagcaatatcaccttgtttattaagccctatcttccaccacctgtcagaatctctggtttatcgagaccactgtaacactttaactcctctttatgaagttgagcattatagacagatgctgtggtttgtggagccttggtagtctctgattatatatgtgtctgtgtatgtagatatacatatacgcagacatatataattatgtatgtacacatattatgtgtgtatttcctatcatgttgggtgaatgcaatcagtagacttgttccatattatcctcttataactaggattttacaaatgctttcagagtaattgggcagtaattgctcattcccaggcccattgtctcccatgatgccttccaactgcattcatgggtgctcccaatccagctctaaactgaaaaagataggccatctattccgtagggtggttttgtgcactcaacaaaggataatttcagaagattatcagaaactgccatgtacctggcacccgcttgaggatggcaccgtctcctctttgctcaagcactgacatggctgcctgtttcttaactgcagatccaacctgacacgcagggccctccccagtatccttctagccacttttgaactctacttcttctaactgtcctagctaaactgaaccatttactaccttctggtaatagtgttgcttttccatttctctttgactgtttattgagcctggagggcccaccctgctcctatttcttcctttaccatccttactccatctctctcttttgatattccaagcatccactggagtccatttcacttgcctctttctcaaaagtattcctgctcctttcaacagaatggattctctcccttttccaatcccagtgctttgtttgggcctctatcctgattgccatcacagcctatctcattattagtttgctctgtccagatcttcgtggccccctccatcactgggctttgagcttcctgacagtgggagtttagttttgaactacacccctttatatttcacccagcacttaagtgccttactaaataaatacatttaattggtgtaaaacacagattggagaaggatcccaaattttacgctgtcttgattttgcattatatggatctcgcatttgatgatctggctattttgtgttacctgccttcccagtgtgtgttctactggtccaaaaacaaaatgaaacaacaggacagattctgggtcagcaaatttgggaaacttgcccaccatacctcttctcgaagacccacagtccacagaacatttacctagtaaaggagcctgatttaactttattaaatatactaaatttgcttgacctcagaactatgatcccctctgcattatatacacacacactgcactacacttctatgagaaattcttggtagtgtagatggtgctgtgtaatggacaagggcttaggacaaagggctccatggtacaagaaccaggtgttgaaccccagtaagacaatacctgggttctgagcagagagagggcaatgaaaccatcccaacaactctctcttccctgactgggatagggcacctcttctgccagatgctggatggggtgtggaatgaaactgattcttcacaagaacagaattagaatggatttgagaatattttaataagtatctcatgtgaagcacttggctttcttaaaagacacagctaatgagctttattctctacatgaaaagcagaaaggaatttagtaaccaaatgaaagagttcccagaggtgcactcggaacagccccttaacaaggatctgtcctccatggaatagcccgtttgccgccttctcccagggtcccaggcatgctgctaaacatgtggctcagaaaggagcccacgctggtgtctgggaggcagtaggaccgcaaagaaattcatacacaacacacttgacctgtaaaattgccatttccatttaaagtgagctctacacccagctagatgagcagctggtctaagttgtcaccattttttaactcttgtgcccacttgccaccaatctgtcattcctgtttgacgacaccagtcatctgcatggcagctggcagatgctaaagactagcaggaagacctcaggactgtgggccacctgtcaggggagtgagggggctgtcagctgacacttctcccccttatctaacagtgctggggccaaggactggaatgcaggtttgaccatcagctgatgtttcctgtaaacataaagatgaaatggttgccttttgagactttcgtaatgcagagacttaagctgcaagcgtgggtggagaggtttgttttatagtcttgaacaaggtttctgctgacttctgtgtctgtctggtttctttgcagttcctcagcactttgtttgcccccttaaactttgtcatggagaaagtggagagcatcctcccatccagtctgtggcaccagctaacacggatctgagagaagccctgtcctccactcacctcacccgccgctgccaccatctcctctgtgccaactccttgtggaccgcaagaaagcatgactttgaaaaagggaagccattccgagattttaaaatgttcatggactattccatattaaaagctgtttttgttgtacaaaattcactgatgttcagttctattttattttgccttcagaaaagaagaaagtcaaaaataaaacttttgtgtattacagcaatcatttgtatcctcctgtgtcttccaaccctaaaattgttgatgtcccaaataaacctttggatttaccttgagtttcctgggaacctggatctactgaatgccacatcatggtttctgtgctgatggaacacatctcagcaggccctgagaaccccttataggcagaggcttggaaaatggaatctcttgggttcaacaggaccatcattgtcaaccccaaactgtccttctaggccaaatgcacagaaaaagctcgcaagaggaatcactggaagcatgaatgaagcaaaatgtgtgtgccatggcaggttgttctggttcagagactctacttactgaatagtgttcaacactgtagttccaggaatccttttggttttgctgtttgaaaacttcttgtgagaaaactcctgataagaagccgcagacccaacagtctgtggtagaacctgaccagtttactgtcattgccatttttaaaatgttttctcgtaagggtacttttaaattttttatcatgtttgcattcctgatgcttcagtgtgagcattctttgagtattttagtgatctgaaccaaagtgatcatttgtcctcaccacctttaaaagctttccatatgattcatatcttgcttagcatctggctttacttaagcaaaaaaaaaaaaaaagaaaagaaaagaaaaataaataaacttgaatcctctatctaaagtgaaaaataccactatttaaaatctcactccagtgcctaaaaacaaagggcctgtcctttatgtagcttgtttttccccttattgagaatctgaagtctttccccactagtgttaaaataagcagtattcggggaaagcacctggccacatctccttctcaggggatcttcctgctggccccaagagcatagtcaggtgggcaggtaacatttaggtgcacaagggctttttatgcttttggcaaacccttctttgtacctactttgtacaaagccctaatgggatatgtagctagctccggctcttgaagtatctcataagagcttgaactccatgtacacacactggtagcactgctcttggcaggggccaggtctatcttgtggatatctgctcttggtggcaggagccaggtctgtctcgtggatatctgctcttggtggcaggggccaggtctatctctttccctcttcttcctctgacacaactctcaacataaaggggatgtgcaaatgatttcttggatgaattgatgcgatacgtgataggtataaataacctttgacccatattcagaggaggaagatgggttccagctgagaaggaccagggaaggcttggaaatgtaattttgagccagaagaaaaaatgatgagaatctgattctttgatttagtagatgaggaaacaaaagtccaaagtcgacctaccgaagttgggactccagattgcgataatccttgaatgaaggtttaagagcttataggcagtgggaagtggaaatgcccaaagacatcgttgttagaaaatccaagttttctgtaatcccagcaatttgggaggccaggtcaggaggattatttgagcccaggagttcaaggctagcctgagtaacatagtaagacctgagctccacaaaaaaaaatttttaattaggtgggcatggtggcatgtgcctgtagtcccagctacttggaaggctgaggtgggaggatcacttgggcccaggaggtcgaggctgcagtgagccctgattacactccagcctgggtgacagagtgagaccctgtctcaaaagaaaaaaaaaaaaaaacaagttgcagaaaatacagcaaagatacggaagataaggattttaaagtgcctaatgaatttaatagttaggattttagagccatttcatggaaaggtgaggctttgaggggtaggaggagttaatgggaagtgcagatggaaaaaagatggtgacagatgtagacacaatcagatgacagatgtgggtaatactgttgaaggaaatgacagggtgggtaatattgttgaaggaaatgagtccattggctaataggagtgtattagtctattcgtgtattgctatatagaaatatctgggactgggtaatttataagtaaagaggtttaattggctcacgattctgcaggctgtacaggaagcatagcagcatctgcttctggggaagcctcaggaggcttccaatcatggcagaaggtgaagtggggacaggcacatcacatggtgaaagcaagagcaacagagagaaagtgagggggaggcgccacgtgcttttttcttttcttttttttttttttttgagacggagtctcgctctgtcgcccaggctggagtgcggtggcgtgatctcagctcactgcaagctccgcctcccgggttcacgccattctcctgcgtcagcctcccgagtagctgggagtacaggcgtctgccacctcgcccggctaattttttgtatttttagtagagatggggtttcatcgcgttagccaggatggtctccgtctcctgacgtcgtgattcgcccgcctcggcctcgcgaagtgctggtattacagacgtgagccactgcgccctgcccacatgcttttaaatgaccagaatcactatcagacagcaccaagccatgaggtatccgctcccatgatccaaacacctctcaccaggctcacctccagcatttgggattacaactcaacatcagatttggatagggacagatatccaaactctatcaagggctaatcaggtgaggagagagagacaccttccctgaacttgagagaagcaaatgatgtgaacttcctagaccttgcaccttatgacccagagtcaagaccccctcctcaactactctgctcaactgttgagcccactcacaactcacactagcaattctcacctccccagtcctggatgccagggaggttgctgttttcccaggtcttgccttgttttgctgcccctgaggacaagcattaaggctctcttctttgtaaatcatttaatgcaaatatgtggagaggtagagccagagcaactcaaataacacagtagaagttttaaagatgattatttatatatcattcttacacttcctgaccaaggtccatggttcctgacttctgacagagatggcaactggaatccaggttgtcttctgccttctgctttgatttctatatgagggtgcatcaaaatccattccgatgggcttcctttataaagacccttccttccagcaggacagtaagtgttccttagtctcaacttatgtgtatgtgttggaatacaaatgtaaacattctaaattaaatatcagcaaatgcaatctagcaatggatacaggaaaaaagacaatatgaccaaatggaatgatctgccagtttggtttttcttttaaactttgtgatatggtttggatttgtgtccccacccaaatctcacgacaaattgtaatcctcaatattggaggtggggcctggtgctggtgattggatcttgggggcagatttttccctttggtggtgttttcgtgatagtgaattctcatgagatctggttgtttaaaagtgtgtggcacctccccgctctctcttcctcctgctccagccatgagaagtactttctggctcccccttcacctttcaccatgattgtaagtttcctgtggcctccccagaagccaagcagaagccactatgcttcctgtacagcctgcagaactgtgagccaattaaacctcttttctttataaattacctagtgccaggtatttcattatggcaatgggagaatggacaaatacacttcttttatcagtacttaccagcatcaaaattattatggctttataaaagaattgagaagaccagcctctgtggcttatactggtaatcccagcactttgagaggctgaagcaggagaatttcttgagcccaggagtttgagatcagcctgggcaagaatagtaaggctacaaaataaaacataaaacattcaaaaattttagctgggtgtggtgatgtgcacctatagtcccagctacttgggaggctgaggtgggacaagttccttgagcccaggcattggaggctgcagtgtactgtgattgcaccattgtactccagcctgggtgacagagggagactcagtctctaaaaatgtttttaaaaagaattgagaagctttccatatcttcatatggcctgaaataaacactgacattatctgccgttacaggattagggaaaagacatgaaacatctgattttcaggctctaatggtggatttttaaactttttttaatttttaatttttgtgggtacataggtgtatatgtttatggggtacatgagatgtttgatacaggcatgtgctgcatagtaatcatggaaaatggggtatccatcccctcaggtatttatcctttgtgttacaaaaaatcaaattatacttttttagttgttagttatttttaaatgtacaattaagttattattgactacagtagtcaccctgttgtgctatcaagtaggtttatccattctttctatttttttttatccatttaccatctccaccttctccctcaaacccccactacccttcccagcctctggtaaccatccttttactctgtatgtccgtgagttcaattgttttcatttttacatcccacaaataagtgagaacacgtgatgtttgtctttctgtgtctggcttatttcacttaacattaatggccccagttccatccatgttgttgcaaatgacggaatctcattcaattttatggctgaatagtactttatcatgtataagtaacacattttctttattcattcatctgtttatagacacgtaggttgcttctaaatcttagctattttgaacagtgctgcaataaacatgagagtgcagatatctctttgatatactgagttcctttcttttgggtatatacccagcaatgggattgttagtttatatcgtagctctattttaagatttttgaggaacctccaaatggttatccttagtggtcattctaatttacattcccaccaacagtgtacaagggtccccttttctccacatcctcaccagcatttgttgttggctgtcttttggatataagccattttaactggggtgagatgatatctcattgtagtttggacttgcatttctctaatgatcagtgatgttgagcaccttttcatatgcctgcttgcaatttgtatgtcttcttttcagaaatgtctattcaaatcttttgcccattttctgatcagattattagatttttttcctatagagctgtttgagctttttatatattctggttattaatctcttgtcagatgggtagtttgcaaatacttttcctattctgtgggttgtctcttccttttgttgattgttttctttgctgtgcagaagctttttaacttgacgtgattccatttgtccatttttgctttggttacctgtgcttgtggggtattgctgaagaaatatttgcccagaccaatgtcctagagactttctccaacgttttcttgtagtagtttcatagtttgaagtcttagatttaagtctttaatccattttgattggatttttctatatggcaagagataggggtcaagtttcatttttctgcatatggatatctaatgttcccagcgccatttattgaagagactgtcttttccccagtgtatgttcttggcacctttgttgaaaatgagttcactctaggtg
